United States Patent Application Publication US 2024/0327476 A1 - sequence listing, part 89

SEQ ID NO: 171196 - DNA, 1359 bp, synthetic construct
  misc_feature 1..1359: note = Description of Artificial Sequence: Synthetic coding sequence
  source 1..1359: mol_type = other DNA
atggccggcggcggcggggacctgagcaccaggatgttcacagaggaccagggcgtggatgaccggctgctgtatgacatcgtgttcaagcacttcaagaggaacaaggtggagatcagcaatgccatcaagaagaccttccccttcctggagggcctgcgggaccgggacctgatcaccaacaagatgtttgaggacagccaggacagctgcaggaacctggtgcctgtgcagagggtggtgtacaacgtgctgtctgagctggagaagaccttcaacctgcctgtgctggaggccctcttcagtgatgtgaacatgcaggagtacccagacctgatccacatctacaagggctttgaaaatgtcatccatgacaagctgcccctgcaggagagcgaggaggaggagcgggaggagaggagcggcctgcagctgagcctggagcagggcactggagaaaattccttccgcagcctgacctggccacccagcggcagccccagccacgccggcaccaccccaccagaaaatggcctgtctgagcacccctgtgaaacagagcagatcaatgccaagaggaaggacaccaccagtgacaaggatgacagcctgggcagccagcagaccaatgagcagtgtgcccagaaggccgagcccacagagagctgtgagcagattgctgtgcaggtgaacaatggagatgctggccgggagatgccctgccccctgccctgtgatgaggagagccctgaggccgagctgcacaaccacggcatccagatcaacagctgcagcgtgcggctggtggacatcaagaaggagaagcccttcagcaacagcaaggtggagtgccaggcccaggcccggacccaccacaaccaggccagtgacatcatcgtcatcagcagcgaggacagcgagggcagcacagatgtggatgagcccctggaggtgttcatcagcgcccccaggtctgagcctgtgatcaacaatgacaaccccctggagagcaatgatgagaaggagggccaggaggccacctgcagccggccccagatcgtgcctgagcccatggacttcaggaagctgagcaccttccgggagagcttcaagaagagggtgattggccaggaccatgacttcagcgagagcagcgaggaggaggccccagctgaggccagcagcggggccctgcggagcaagcacgcccccatgaccagccgcagcaccagcacctggaggatccccagcaggaagaggcgcttcagcagcagtgacttcagtgacctgagcaatggagaggagctgcaggagacctgcagcagcagcctgcggcggggcagcggcaaggaggactag

SEQ ID NO: 171197 - DNA, 1338 bp, synthetic construct
  misc_feature 1..1338: note = Description of Artificial Sequence: Synthetic coding sequence
  source 1..1338: mol_type = other DNA
atgatgttcacagaggaccagggcgtggatgaccggctgctgtatgacatcgtgttcaagcacttcaagaggaacaaggtggagatcagcaatgccatcaagaagaccttccccttcctggagggcctgcgggaccgggacctgatcaccaacaagatgtttgaggacagccaggacagctgcaggaacctggtgcctgtgcagagggtggtgtacaacgtgctgtctgagctggagaagaccttcaacctgcctgtgctggaggccctcttcagtgatgtgaacatgcaggagtacccagacctgatccacatctacaagggctttgaaaatgtcatccatgacaagctgcccctgcaggagagcgaggaggaggagcgggaggagaggagcggcctgcagctgagcctggagcagggcactggagaaaattccttccgcagcctgacctggccacccagcggcagccccagccacgccggcaccaccccaccagaaaatggcctgtctgagcacccctgtgaaacagagcagatcaatgccaagaggaaggacaccaccagtgacaaggatgacagcctgggcagccagcagaccaatgagcagtgtgcccagaaggccgagcccacagagagctgtgagcagattgctgtgcaggtgaacaatggagatgctggccgggagatgccctgccccctgccctgtgatgaggagagccctgaggccgagctgcacaaccacggcatccagatcaacagctgcagcgtgcggctggtggacatcaagaaggagaagcccttcagcaacagcaaggtggagtgccaggcccaggcccggacccaccacaaccaggccagtgacatcatcgtcatcagcagcgaggacagcgagggcagcacagatgtggatgagcccctggaggtgttcatcagcgcccccaggtctgagcctgtgatcaacaatgacaaccccctggagagcaatgatgagaaggagggccaggaggccacctgcagccggccccagatcgtgcctgagcccatggacttcaggaagctgagcaccttccgggagagcttcaagaagagggtgattggccaggaccatgacttcagcgagagcagcgaggaggaggccccagctgaggccagcagcggggccctgcggagcaagcacggggagaaggcccccatgaccagccgcagcaccagcacctggaggatccccagcaggaagaggcgcttcagcagcagtgacttcagtgacctgagcaatggagaggagctgcaggagacctgcagcagcagcctgcggcggggcagcggcaaggaggactag

SEQ ID NO: 171198 - DNA, 2142 bp, synthetic construct
  misc_feature 1..2142: note = Description of Artificial Sequence: Synthetic coding sequence
  source 1..2142: mol_type = other DNA
atgttcaccatgacccgggccatggaggaggccctcttccagcacttcatgcaccagaagctgggcatcgcctatgccatccacaagcccttccccttctttgagggcctgctggacaacagcatcatcaccaagaggatgtacatggagagcctggaggcctgcaggaacctgatccctgtgtcccgggtggtgcacaacatcctgacccagctggagaggaccttcaacctgagcctgctggtgaccctcttcagccagatcaacctgcgggagtaccccaacctggtgaccatctaccgctccttcaagagggtgggcgccagctatgagtggcagagccgggacacccccatcctgctggaggcccccaccggcctggccgagggcagcagcctgcacacccccctggccctgcccccaccccagcccccccagcccagctgcagcccctgtgccccccgggtgtctgagcccggcaccagcagccagcagagtgatgagatcctgtctgagagccccagccccagcgaccctgtgctgcccctgcctgccctgatccaggagggccgcagcacctctgtgaccaatgacaagctgaccagcaagatgaatgctgaggaggacagcgaggagatgcccagcctgctgaccagcacagtgcaggtggccagtgacaacctgatcccccagatccgggacaaggaggacccccaggagatgccccacagccccctgggctccatgcctgagatccgggacaacagccctgagcccaatgaccctgaggagccccaggaggtgagcagcacccccagcgacaagaagggcaagaagaggaagcgctgcatctggagcacccccaagaggaggcacaagaagaagagcctgcccggcggcacagccagcagccgccacggcatccagaagaagctgaagagggtggaccaggtgccccagaagaaggatgacagcacctgcaacagcacagtggagacccgggcccagaaggccaggacagaatgtgccaggaagagccgctctgaggagatcattgatggcaccagcgagatgaatgaaggcaagaggagccagaagacccccagcaccccccggcgggtgacccagggcgccgccagccctggccacggcatccaggagaagctgcaggtggtggacaaggtgacccagaggaaggatgacagcacctggaacagcgaggtgatgatgagggtgcagaaggcccggaccaagtgtgccaggaagagccggctgaaggagaagaagaaggagaaggacatctgcagcagcagcaagaggcgcttccagaagaacatccaccggcggggcaagcccaagagtgacacagtggacttccactgcagcaagctgcctgtgacctgtggggaggccaagggcatcctgtacaagaagaagatgaagcacggcagctctgtgaagtgcatcagaaatgaagatggcacctggctgaccccaaatgaatttgaggtggagggcaaaggaagaaatgccaagaactggaagaggaacatccgctgtgagggcatgaccctgggggagctgctgaagaggaagaacagtgatgaatgtgaggtgtgctgccagggcggccagctgctgtgctgcggcacctgccccagggtcttccacgaggactgccacatcccccctgtggaggccaagaggatgctgtggagctgcaccttctgcaggatgaagaggagcagcggcagccagcagtgccaccacgtgtccaagaccctggagcggcagatgcagccccaggaccagctgaagtgtgagttcctgctgctgaaggcctactgccacccccagagcagcttcttcaccggcatccccttcaacatccgggactatggagagcccttccaggaggccatgtggctggacctggtgaaggagcggctcatcacagagatgtacacagtggcctggtttgtgcgggacatgaggctgatgttcaggaaccacaagaccttctacaaggccagtgactttggccaggtgggcctggacctggaggccgagtttgagaaggacctgaaggatgtgctgggcttccacgaggccaatgatggcggcttctggaccctgccctag

SEQ ID NO: 171199 - DNA, 1650 bp, synthetic construct
  misc_feature 1..1650: note = Description of Artificial Sequence: Synthetic coding sequence
  source 1..1650: mol_type = other DNA
atgttcaccatgacccgggccatggaggaggccctcttccagcacttcatgcaccagaagctgggcatcgcctatgccatccacaagcccttccccttctttgagggcctgctggacaacagcatcatcaccaagaggatgtacatggagagcctggaggcctgcaggaacctgatccctgtgtcccgggtggtgcacaacatcctgacccagctggagaggaccttcaacctgagcctgctggtgaccctcttcagccagatcaacctgcgggagtaccccaacctggtgaccatctaccgctccttcaagagggtgggcgccagctatgagtggcagagccgggacacccccatcctgctggaggcccccaccggcctggccgagggcagcagcctgcacacccccctggccctgcccccaccccagcccccccagcccagctgcagcccctgtgccccccgggtgtctgagcccggcaccagcagccagcagagtgatgagatcctgtctgagagccccagccccagcgaccctgtgctgcccctgcctgccctgatccaggagggccgcagcacctctgtgaccaatgacaagctgaccagcaagatgaatgctgaggaggacagcgaggagatgcccagcctgctgaccagcacagtgcaggtggccagtgacaacctgatcccccagatccgggacaaggaggacccccaggagatgccccacagccccctgggctccatgcctgagatccgggacaacagccctgagcccaatgaccctgaggagccccaggaggtgagcagcacccccagcgacaagaagggcaagaagaggaagcgctgcatctggagcacccccaagaggaggcacaagaagaagagcctgcccggcggcacagccagcagccgccacggcatccagaagaagctgaagagggtggaccaggtgccccagaagaaggatgacagcacctgcaacagcacagtggagacccgggcccagaaggccaggacagaatgtgccaggaagagccgctctgaggagatcattgatggcaccagcgagatgaatgaaggcaagaggagccagaagacccccagcaccccccggcgggtgacccagggcgccgccagccctggccacggcatccaggagaagctgcaggtggtggacaaggtgacccagaggaaggatgacagcacctggaacagcgaggtgatgatgagggtgcagaaggcccggaccaagtgtgccaggaagagccggctgaaggagaagaagaaggagaaggacatctgcagcagcagcaagaggcgcttccagaagaacatccaccggcggggcaagcccaagagtgacacagtggacttccactgcagcaagctgcctgtgacctgtggggaggccaagggcatcctgtacaagaagaagatgaagcacggcagctctgtgaagtgcatcagaaatgaagatggcacctggctgaccccaaatgaatttgaggtggagggcaaaggaagaaatgccaagaactggaagaggaacatccgctgtgagggcatgaccctgggggagctgctgaagagcggcctgctgctgtgccccccacgcatcaacctgaagcgggagctgaacagcaagtag

SEQ ID NO: 171200 - DNA, 756 bp, synthetic construct
  misc_feature 1..756: note = Description of Artificial Sequence: Synthetic coding sequence
  source 1..756: mol_type = other DNA
atgcctgagatccgggacaacagccctgagcccaatgaccctgaggagccccaggaggtgagcagcacccccagcgacaagaagggcaagaagaggaagcgctgcatctggagcacccccaagaggaggcacaagaagaagagcctgcccggggagatcattgatggcaccagcgagatgaatgaaggcaagaggagccagaagacccccagcaccccccggcgggtgacccagggcgccgccagccctggccacggcatccaggagaagctgcaggtggtggacaaggtgacccagaggaaggatgacagcacctggaacagcgaggtgatgatgagggtgcagaaggcccggaccaagtgtgccaggaagagccggctgaaggagaagaagaaggagaaggacatctgcagcagcagcaagaggcgcttccagaagaacatccaccggcggggcaagcccaagagtgacacagtggacttccactgcagcaagctgcctgtgacctgtggggaggccaagggcatcctgtacaagaagaagatgaagcacggcagctctgtgaagtgcatcagaaatgaagatggcacctggctgaccccaaatgaatttgaggtggagggcaaaggaagaaatgccaagaactggaagaggaacatccgctgtgagggcatgaccctgggggagctgctgaagagcggcctgctgctgtgccccccacgcatcaacctgaagcgggagctgaacagcaagtag

SEQ ID NO: 171201 - DNA, 2070 bp, synthetic construct
  misc_feature 1..2070: note = Description of Artificial Sequence: Synthetic coding sequence
  source 1..2070: mol_type = other DNA
atgttcaccatgacccgggccatggaggaggccctcttccagcacttcatgcaccagaagctgggcatcgcctatgccatccacaagcccttccccttctttgagggcctgctggacaacagcatcatcaccaagaggatgtacatggagagcctggaggcctgcaggaacctgatccctgtgtcccgggtggtgcacaacatcctgacccagctggagaggaccttcaacctgagcctgctggtgaccctcttcagccagatcaacctgcgggagtaccccaacctggtgaccatctaccgctccttcaagagggtgggcgccagctatgagtggcagagccgggacacccccatcctgctggaggcccccaccggcctggccgagggcagcagcctgcacacccccctggccctgcccccaccccagcccccccagcccagctgcagcccctgtgccccccgggtgtctgagcccggcaccagcagccagcagagtgatgagatcctgtctgagagccccagccccagcgaccctgtgctgcccctgcctgccctgatccaggagggccgcagcacctctgtgaccaatgacaagctgaccagcaagatgaatgctgaggaggacagcgaggagatgcccagcctgctgaccagcacagtgcaggtggccagtgacaacctgatcccccagatccgggacaaggaggacccccaggagatgccccacagccccctgggctccatgcctgagatccgggacaacagccctgagcccaatgaccctgaggagccccaggaggtgagcagcacccccagcgacaagaagggcaagaagaggaagcgctgcatctggagcacccccaagaggaggcacaagaagaagagcctgcccggcggcacagccagcagccgccacggcatccagaagaagctgaagagggtggaccaggtgccccagaagaaggatgacagcacctgcaacagcacagtggagacccgggcccagaaggccaggacagaatgtgccaggaagagccgctctgaggagatcattgatggcaccagcgagatgaatgaaggcaagaggagccagaagacccccagcaccccccggcgggtgacccagggcgccgccagccctggccacggcatccaggagaagctgcaggtggtggacaaggtgacccagaggaaggatgacagcacctggaacagcgaggtgatgatgagggtgcagaaggcccggaccaagtgtgccaggaagagccggctgaaggagaagaagaaggagaaggacatctgcagcagcagcaagaggcgcttccagaagaacatccaccggcggggcaagcccaagagtgacacagtggacttccactgcagcaagctgcctgtgacctgtggggaggccaagggcatcctgtacaagaagaagatgaagcacggcagctctgtgaagtgcatcagaaatgaagatggcacctggctgaccccaaatgaatttgaggtggagggcaaaggaagaaatgccaagaactggaagaggaacatccgctgtgagggcatgaccctgggggagctgctgaagaggaagaacagtgatgaatgtgaggtgtgctgccagggcggccagctgctgtgctgcggcacctgccccagggtcttccacgaggactgccacatcccccctgtggaggccaagaggatgctgtggagctgcaccttctgcaggatgaagaggagcagcggcagccagcagtgccaccacgtgtccaagaccctggagcggcagatgcagccccaggaccagctgatccgggactatggagagcccttccaggaggccatgtggctggacctggtgaaggagcggctcatcacagagatgtacacagtggcctggtttgtgcgggacatgaggctgatgttcaggaaccacaagaccttctacaaggccagtgactttggccaggtgggcctggacctggaggccgagtttgagaaggacctgaaggatgtgctgggcttccacgaggccaatgatggcggcttctggaccctgccctag

SEQ ID NO: 171202 - DNA, 1644 bp, synthetic construct
  misc_feature 1..1644: note = Description of Artificial Sequence: Synthetic coding sequence
  source 1..1644: mol_type = other DNA
atgttcaccatgacccgggccatggaggaggccctcttccagcacttcatgcaccagaagctgggcatcgcctatgccatccacaagcccttccccttctttgagggcctgctggacaacagcatcatcaccaagaggatgtacatggagagcctggaggcctgcaggaacctgatccctgtgtcccgggtggtgcacaacatcctgacccagctggagaggaccttcaacctgagcctgctggtgaccctcttcagccagatcaacctgcgggagtaccccaacctggtgaccatctaccgctccttcaagagggtgggcgccagctatgagtggcagagccgggacacccccatcctgctggaggcccccaccggcctggccgagggcagcagcctgcacacccccctggccctgcccccaccccagcccccccagcccagctgcagcccctgtgccccccgggtgtctgagcccggcaccagcagccagcagagtgatgagatcctgtctgagagccccagccccagcgaccctgtgctgcccctgcctgccctgatccaggagggccgcagcacctctgtgaccaatgacaagctgaccagcaagatgaatgctgaggaggacagcgaggagatgcccagcctgctgaccagcacagtgcaggtggccagtgacaacctgatcccccagatccgggacaaggaggacccccaggagatgccccacagccccctgggctccatgcctgagatccgggacaacagccctgagcccaatgaccctgaggagccccaggaggtgagcagcacccccagcgacaagaagggcaagaagaggaagcgctgcatctggagcacccccaagaggaggcacaagaagaagagcctgcccggggccagcagccgccacggcatccagaagaagctgaagagggtggaccaggtgccccagaagaaggatgacagcacctgcaacagcacagtggagacccgggcccagaaggccaggacagaatgtgccaggaagagccgctctgaggagatcattgatggcaccagcgagatgaatgaaggcaagaggagccagaagacccccagcaccccccggcgggtgacccagggcgccgccagccctggccacggcatccaggagaagctgcaggtggtggacaaggtgacccagaggaaggatgacagcacctggaacagcgaggtgatgatgagggtgcagaaggcccggaccaagtgtgccaggaagagccggctgaaggagaagaagaaggagaaggacatctgcagcagcagcaagaggcgcttccagaagaacatccaccggcggggcaagcccaagagtgacacagtggacttccactgcagcaagctgcctgtgacctgtggggaggccaagggcatcctgtacaagaagaagatgaagcacggcagctctgtgaagtgcatcagaaatgaagatggcacctggctgaccccaaatgaatttgaggtggagggcaaaggaagaaatgccaagaactggaagaggaacatccgctgtgagggcatgaccctgggggagctgctgaagagcggcctgctgctgtgccccccacgcatcaacctgaagcgggagctgaacagcaagtag

SEQ ID NO: 171203 - DNA, 666 bp, synthetic construct
  misc_feature 1..666: note = Description of Artificial Sequence: Synthetic coding sequence
  source 1..666: mol_type = other DNA
atgttcaccatgacccgggccatggaggaggccctcttccagcacttcatgcaccagaagctgggcatcgcctatgccatccacaagcccttccccttctttgagggcctgctggacaacagcatcatcaccaagaggatgtacatggagagcctggaggcctgcaggaacctgatccctgtgtcccgggtggtgcacaacatcctgacccagctggagaggaccttcaacctgagcctgctggtgaccctcttcagccagatcaacctgcgggagtaccccaacctggtgaccatctaccgctccttcaagagggtgggcgccagctatgagtggcagagccgggacacccccatcctgctggaggcccccaccggcctggccgagggcagcagcctgcacacccccctggccctgcccccaccccagcccccccagcccagctgcagcccctgtgccccccgggtgtctgagcccggcaccagcagccagcagagtgatgagatcctgtctgagagccccagccccagcgaccctgtgctgcccctgcctgccctgatccaggagggccgcagcacctctgtgaccaatgacaagctgaccagcaagatgaatgctgaggaggacagcgaggagatgcccagcctgctgaccagcacagtgtag

SEQ ID NO: 171204 - DNA, 306 bp, synthetic construct
  misc_feature 1..306: note = Description of Artificial Sequence: Synthetic coding sequence
  source 1..306: mol_type = other DNA
atgttcaccatgacccgggccatggaggaggccctcttccagcacttcatgcaccagaagctgggcatcgcctatgccatccacaagcccttccccttctttgagggcctgctggacaacagcatcatcaccaagaggatgtacatggagagcctggaggcctgcaggaacctgatccctgtgtcccgggtggtgcacaacatcctgacccagctggagaggaccttcaacctgagcctgctggtgaccctcttcagccagatcaacctgcgggagtaccccaacctggtgaccatctacagatag

SEQ ID NO: 171205 - DNA, 1668 bp, synthetic construct
  misc_feature 1..1668: note = Description of Artificial Sequence: Synthetic coding sequence
  source 1..1668: mol_type = other DNA
atgggccggggcttcaggatgttcaccatgacccgggccatggaggaggccctcttccagcacttcatgcaccagaagctgggcatcgcctatgccatccacaagcccttccccttctttgagggcctgctggacaacagcatcatcaccaagaggatgtacatggagagcctggaggcctgcaggaacctgatccctgtgtcccgggtggtgcacaacatcctgacccagctggagaggaccttcaacctgagcctgctggtgaccctcttcagccagatcaacctgcgggagtaccccaacctggtgaccatctaccgctccttcaagagggtgggcgccagctatgagtggcagagccgggacacccccatcctgctggaggcccccaccggcctggccgagggcagcagcctgcacacccccctggccctgcccccaccccagcccccccagcccagctgcagcccctgtgccccccgggtgtctgagcccggcaccagcagccagcagagtgatgagatcctgtctgagagccccagccccagcgaccctgtgctgcccctgcctgccctgatccaggagggccgcagcacctctgtgaccaatgacaagctgaccagcaagatgaatgctgaggaggacagcgaggagatgcccagcctgctgaccagcacagtgcaggtggccagtgacaacctgatcccccagatccgggacaaggaggacccccaggagatgccccacagccccctgggctccatgcctgagatccgggacaacagccctgagcccaatgaccctgaggagccccaggaggtgagcagcacccccagcgacaagaagggcaagaagaggaagcgctgcatctggagcacccccaagaggaggcacaagaagaagagcctgcccggcggcacagccagcagccgccacggcatccagaagaagctgaagagggtggaccaggtgccccagaagaaggatgacagcacctgcaacagcacagtggagacccgggcccagaaggccaggacagaatgtgccaggaagagccgctctgaggagatcattgatggcaccagcgagatgaatgaaggcaagaggagccagaagacccccagcaccccccggcgggtgacccagggcgccgccagccctggccacggcatccaggagaagctgcaggtggtggacaaggtgacccagaggaaggatgacagcacctggaacagcgaggtgatgatgagggtgcagaaggcccggaccaagtgtgccaggaagagccggctgaaggagaagaagaaggagaaggacatctgcagcagcagcaagaggcgcttccagaagaacatccaccggcggggcaagcccaagagtgacacagtggacttccactgcagcaagctgcctgtgacctgtggggaggccaagggcatcctgtacaagaagaagatgaagcacggcagctctgtgaagtgcatcagaaatgaagatggcacctggctgaccccaaatgaatttgaggtggagggcaaaggaagaaatgccaagaactggaagaggaacatccgctgtgagggcatgaccctgggggagctgctgaagagcggcctgctgctgtgccccccacgcatcaacctgaagcgggagctgaacagcaagtag

SEQ ID NO: 171206 - DNA, 2346 bp, synthetic construct
  misc_feature 1..2346: note = Description of Artificial Sequence: Synthetic coding sequence
  source 1..2346: mol_type = other DNA
atgacagcccctgagaagcctgtgaagcaggaggagatggccgccctggatgtggacagcggcggcggcggcggcggcggcggcggccacggggagtacctgcagcagcagcagcagcacggcaatggagctgtggccgctgctgctgctgcccaggacacccagcccagccccctggccctgctggccgccacctgcagcaagattggcccccccagccctggagatgatgaggaggaggccgctgctgctgctggggccccagctgctgctggggccaccggggacctggccagcgcccagctgggcggggcccccaaccgctgggaggtgctgagcgccacccccaccaccatcaaggatgaagctggcaacctggtgcagatccccagcgctgccaccagcagcggccagtatgtgctgcccctgcagaacctgcagaaccagcagatcttctctgtggcccctggcagtgacagcagcaatggcaccgtgtcctctgtgcagtaccaggtgatcccccagatccagagcgcagatggccagcaggtgcagatcggcttcaccggcagcagtgacaatggaggcatcaaccaggagagcagccagatccagatcatccctggcagcaaccagaccctgctggccagcggcaccccatctgccaacatccagaacctgatcccccagacaggccaggtgcaggtgcagggcgtggccatcggcggcagcagcttccctggccagacccaggtggtggccaacgtgcccctgggcctgcccggcaacatcacctttgtgcccatcaacagcgtggacctggacagcctgggcctgagcggcagcagccagaccatgacagctggcatcaatgctgatggccacctgatcaacacaggccaggccatggacagcagtgacaacagcgagaggactggagagcgggtgtccccagacatcaatgagaccaacacagacacagacctgtttgtgcccaccagcagcagcagccagctgcctgtgaccatcgacagcacaggcatcctgcagcagaacaccaacagcctgaccaccagcagcggccaggtgcacagcagtgacctgcagggcaactacatccagagccctgtgtctgaggagacccaggcccagaacatccaggtgtccacagcccagcctgtggtgcagcacctgcagctgcaggagagccagcagcccaccagccaggcccagatcgtgcagggcatcaccccccagaccatccacggcgtgcaggccagcggccagaacatcagccagcaggccctgcagaacctgcagctgcagctgaaccctggcaccttcctgatccaggcccagacagtgacccccagcggccaggtgacctggcagaccttccaggtgcagggcgtgcagaacctgcagaacctgcagatccagaacacagctgcccagcagatcaccctgacccctgtgcagaccctgaccctgggccaggtggccgccggcggggccttcaccagcacccctgtgtccctgagcacaggccagctgcccaacctgcagacagtgacagtgaacagcattgattctgctggcatccagctgcaccctggagaaaatgctgacagccctgctgacatccgcatcaaggaggaggagccagaccctgaggagtggcagctgagcggggacagcaccctgaacaccaatgacctgacccacctgcgggtgcaggtggtggatgaggagggggaccagcagcaccaggagggcaagaggctgcggcgggtggcctgcacctgccccaactgcaaggagggcggcggccggggcaccaacctgggcaagaagaagcagcacatctgccacatccctggctgtgggaaggtgtatggcaagaccagccacctgcgggcccacctgcgctggcacagcggggagcggccctttgtgtgcaactggatgtactgtgggaagcgcttcaccaggagtgatgagctgcagaggcacaggaggacccacactggagagaagaagtttgtgtgcccagaatgttccaagcgcttcatgagaagtgaccacctggccaagcacatcaagacccaccagaacaagaagggcatccacagcagcagcacagtgctggcctctgtggaggccgccagagatgacaccctcatcacagctgggggcaccaccctcatcctggccaacatccagcagggctctgtgtctggcatcggcaccgtgaacaccagcgccaccagcaaccaggacatcctgaccaacacagagatccccctgcagctggtgacagtgtctggaaatgagaccatggagtag

SEQ ID NO: 171207 - DNA, 2217 bp, synthetic construct
  misc_feature 1..2217: note = Description of Artificial Sequence: Synthetic coding sequence
  source 1..2217: mol_type = other DNA
tgaccagagaagcctgtgaagcaggaggagatggccgccctggatgtggacagcggcggcggcggcggcggcggcggcggccacggggagtacctgcagcagcagcagcagcacggcaatggagctgtggccgctgctgctgctgcccagacaggagacctggccagcgcccagctgggcggggcccccaaccgctgggaggtgctgagcgccacccccaccaccatcaaggatgaggccggcaacctggtgcagatccccagcgctgccaccagcagcggccagtatgtgctgcccctgcagaacctgcagaaccagcagatcttctctgtggcccctggcagtgacagcagcaatggaacagtgtcctctgtgcagtaccaggtgatcccccagatccagagcgcagatggccagcaggtgcagatcggcttcaccggcagcagtgacaatggaggcatcaaccaggagagcagccagatccagatcatccctggcagcaaccagaccctgctggccagcggcacccccagcgccaacatccagaacctgatcccccagacaggccaggtgcaggtgcagggcgtggccatcggcggcagcagcttccctggccagacccaggtggtggccaacgtgcccctgggcctgcccggcaacatcacctttgtgcccatcaacagcgtggacctggacagcctgggcctgagcggcagcagccagaccatgacagctggcatcaatgctgatggccacctgatcaacacaggccaggccatggacagcagtgacaacagcgagaggactggagagcgggtgtccccagacatcaatgagaccaacacagacacagacctgtttgtgcccaccagcagcagcagccagctgcctgtgaccatcgacagcacaggcatcctgcagcagaacaccaacagcctgaccaccagcagcggccaggtgcacagcagtgacctgcagggcaactacatccagagccctgtgtctgaggagacccaggcccagaacatccaggtgtccacagcccagcctgtggtgcagcacctgcagctgcaggagagccagcagcccaccagccaggcccagatcgtgcagggcatcaccccccagaccatccatggagtgcaggccagcggccagaacatcagccagcaggccctgcagaacctgcagctgcagctgaaccctggcaccttcctgatccaggcccagacagtgaccccatctggccaggtgacctggcagaccttccaggtgcagggcgtgcagaacctgcagaacctgcagatccagaacacagctgcccagcagatcaccctgacccctgtgcagaccctgaccctgggccaggtggccgccggcggggccttcaccagcacccctgtgtccctgagcacaggccagctgcccaacctgcagacagtgacagtgaacagcattgacagcgctggcatccagctgcaccctggagaaaatgctgacagccctgctgacatccgcatcaaggaggaggagccagaccctgaggagtggcagctgagcggggacagcaccctgaacaccaatgacctgacccacctgcgggtgcaggtggtggatgaggagggggaccagcagcaccaggagggcaagaggctgcggcgggtggcctgcacctgccccaactgcaaggagggcggcggccggggcaccaacctgggcaagaagaagcagcacatctgccacatccctggctgcggcaaggtgtatggcaagaccagccacctgcgggcccacctgcgctggcacagcggggagcggccctttgtgtgcaactggatgtactgcggcaagcgcttcaccaggagtgatgagctgcagaggcacaggaggacccacactggagagaagaagtttgtgtgcccagagtgcagcaagcgcttcatgagaagtgaccacctggccaagcacatcaagacccaccagaacaagaagggcatccacagcagcagcacagtgctggcctctgtggaggccgccagagatgacaccctcatcacagctgggggcaccaccctcatcctggccaacatccagcagggctctgtgtctggaattggaacagtgaacaccagcgccaccagcaaccaggacatcctgaccaacacagagatccccctgcagctggtgacagtgtctggaaatgagaccatggagtag

SEQ ID NO: 171208 - DNA, 2142 bp, synthetic construct
  misc_feature 1..2142: note = Description of Artificial Sequence: Synthetic coding sequence
  source 1..2142: mol_type = other DNA
attggcccccccagccctggagatgatgaggaggaggccgctgctgctgctggggccccagctgctgctggggccaccggggacctggccagcgcccagctgggcggggcccccaaccgctgggaggtgctgagcgccacccccaccaccatcaaggatgaagctggcaacctggtgcagatccccagcgctgccaccagcagcggccagtatgtgctgcccctgcagaacctgcagaaccagcagatcttctctgtggcccctggcagtgacagcagcaatggcaccgtgtcctctgtgcagtaccaggtgatcccccagatccagagcgcagatggccagcaggtgcagatcggcttcaccggcagcagtgacaatggaggcatcaaccaggagagcagccagatccagatcatccctggcagcaaccagaccctgctggccagcggcaccccatctgccaacatccagaacctgatcccccagacaggccaggtgcaggtgcagggcgtggccatcggcggcagcagcttccctggccagacccaggtggtggccaacgtgcccctgggcctgcccggcaacatcacctttgtgcccatcaacagcgtggacctggacagcctgggcctgagcggcagcagccagaccatgacagctggcatcaatgctgatggccacctgatcaacacaggccaggccatggacagcagtgacaacagcgagaggactggagagcgggtgtccccagacatcaatgagaccaacacagacacagacctgtttgtgcccaccagcagcagcagccagctgcctgtgaccatcgacagcacaggcatcctgcagcagaacaccaacagcctgaccaccagcagcggccaggtgcacagcagtgacctgcagggcaactacatccagagccctgtgtctgaggagacccaggcccagaacatccaggtgtccacagcccagcctgtggtgcagcacctgcagctgcaggagagccagcagcccaccagccaggcccagatcgtgcagggcatcaccccccagaccatccacggcgtgcaggccagcggccagaacatcagccagcaggccctgcagaacctgcagctgcagctgaaccctggcaccttcctgatccaggcccagacagtgacccccagcggccaggtgacctggcagaccttccaggtgcagggcgtgcagaacctgcagaacctgcagatccagaacacagctgcccagcagatcaccctgacccctgtgcagaccctgaccctgggccaggtggccgccggcggggccttcaccagcacccctgtgtccctgagcacaggccagctgcccaacctgcagacagtgacagtgaacagcattgattctgctggcatccagctgcaccctggagaaaatgctgacagccctgctgacatccgcatcaaggaggaggagccagaccctgaggagtggcagctgagcggggacagcaccctgaacaccaatgacctgacccacctgcgggtgcaggtggtggatgaggagggggaccagcagcaccaggagggcaagaggctgcggcgggtggcctgcacctgccccaactgcaaggagggcggcggccggggcaccaacctgggcaagaagaagcagcacatctgccacatccctggctgtgggaaggtgtatggcaagaccagccacctgcgggcccacctgcgctggcacagcggggagcggccctttgtgtgcaactggatgtactgtgggaagcgcttcaccaggagtgatgagctgcagaggcacaggaggacccacactggagagaagaagtttgtgtgcccagaatgttccaagcgcttcatgagaagtgaccacctggccaagcacatcaagacccaccagaacaagaagggcatccacagcagcagcacagtgctggcctctgtggaggccgccagagatgacaccctcatcacagctgggggcaccaccctcatcctggccaacatccagcagggctctgtgtctggcatcggcaccgtgaacaccagcgccaccagcaaccaggacatcctgaccaacacagagatccccctgcagctggtgacagtgtctggaaatgagaccatggagtag

SEQ ID NO: 171209 - DNA, 2187 bp, synthetic construct
  misc_feature 1..2187: note = Description of Artificial Sequence: Synthetic coding sequence
  source 1..2187: mol_type = other DNA
atggccgccctggatgtggacagcggcggcggcggcggcggcggcggcggccacggggagtacctgcagcagcagcagcagcacggcaatggagctgtggccgctgctgctgctgcccagacaggagacctggccagcgcccagctgggcggggcccccaaccgctgggaggtgctgagcgccacccccaccaccatcaaggatgaggccggcaacctggtgcagatccccagcgctgccaccagcagcggccagtatgtgctgcccctgcagaacctgcagaaccagcagatcttctctgtggcccctggcagtgacagcagcaatggaacagtgtcctctgtgcagtaccaggtgatcccccagatccagagcgcagatggccagcaggtgcagatcggcttcaccggcagcagtgacaatggaggcatcaaccaggagagcagccagatccagatcatccctggcagcaaccagaccctgctggccagcggcacccccagcgccaacatccagaacctgatcccccagacaggccaggtgcaggtgcagggcgtggccatcggcggcagcagcttccctggccagacccaggtggtggccaacgtgcccctgggcctgcccggcaacatcacctttgtgcccatcaacagcgtggacctggacagcctgggcctgagcggcagcagccagaccatgacagctggcatcaatgctgatggccacctgatcaacacaggccaggccatggacagcagtgacaacagcgagaggactggagagcgggtgtccccagacatcaatgagaccaacacagacacagacctgtttgtgcccaccagcagcagcagccagctgcctgtgaccatcgacagcacaggcatcctgcagcagaacaccaacagcctgaccaccagcagcggccaggtgcacagcagtgacctgcagggcaactacatccagagccctgtgtctgaggagacccaggcccagaacatccaggtgtccacagcccagcctgtggtgcagcacctgcagctgcaggagagccagcagcccaccagccaggcccagatcgtgcagggcatcaccccccagaccatccatggagtgcaggccagcggccagaacatcagccagcaggccctgcagaacctgcagctgcagctgaaccctggcaccttcctgatccaggcccagacagtgaccccatctggccaggtgacctggcagaccttccaggtgcagggcgtgcagaacctgcagaacctgcagatccagaacacagctgcccagcagatcaccctgacccctgtgcagaccctgaccctgggccaggtggccgccggcggggccttcaccagcacccctgtgtccctgagcacaggccagctgcccaacctgcagacagtgacagtgaacagcattgacagcgctggcatccagctgcaccctggagaaaatgctgacagccctgctgacatccgcatcaaggaggaggagccagaccctgaggagtggcagctgagcggggacagcaccctgaacaccaatgacctgacccacctgcgggtgcaggtggtggatgaggagggggaccagcagcaccaggagggcaagaggctgcggcgggtggcctgcacctgccccaactgcaaggagggcggcggccggggcaccaacctgggcaagaagaagcagcacatctgccacatccctggctgcggcaaggtgtatggcaagaccagccacctgcgggcccacctgcgctggcacagcggggagcggccctttgtgtgcaactggatgtactgcggcaagcgcttcaccaggagtgatgagctgcagaggcacaggaggacccacactggagagaagaagtttgtgtgcccagagtgcagcaagcgcttcatgagaagtgaccacctggccaagcacatcaagacccaccagaacaagaagggcatccacagcagcagcacagtgctggcctctgtggaggccgccagagatgacaccctcatcacagctgggggcaccaccctcatcctggccaacatccagcagggctctgtgtctggaattggaacagtgaacaccagcgccaccagcaaccaggacatcctgaccaacacagagatccccctgcagctggtgacagtgtctggaaatgagaccatggagtag

SEQ ID NO: 171210 - DNA, 1545 bp, synthetic construct
  misc_feature 1..1545: note = Description of Artificial Sequence: Synthetic coding sequence
  source 1..1545: mol_type = other DNA
atggtgtgggaggtgaagaccaaccagatgcccaatgctgtgcagaagctgctgctggtgatggacaagagggccagcggcatgaatgacagcctggagctgctgcagtgcaatgaaaacctgcccagcagccctggctacaacagctgtgatgagcacatggagctggatgacctgcctgagctgcaggccgtgcagagcgaccccacccagagcggcatgtaccagctgagcagtgatgtgagccaccaggagtaccccaggagctcctggaaccagaacaccagtgacatccctgagaccacctacagagaaaatgaggtggactggctgacagagctggccaacatcgccaccagcccccagagccccctgatgcagtgcagcttctacaacagaagcagccctgtgcacatcatcgccaccagcaagagcctgcacagctatgcccggcccccacctgtgagcagcagcagcaagtctgagcccgccttcccccaccaccactggaaggaggagacccctgtgagacatgagcgggccaacagcgagagcgagagcggcatcttctgcatgagcagcctgagtgatgatgatgacctgggctggtgcaacagctggcccagcacagtgtggcactgcttcctgaagggcacccggctgtgcttccacaagggcagcaacaaggagtggcaggatgtggaggactttgcccgggcagagggctgtgacaatgaggaggacctgcagatgggcatccacaagggctacggcagtgatggcctgaagctgctgagccatgaggagagcgtgtcctttggagagagcgtgctgaagctgacctttgaccccggcaccgtggaggatggcctgctgactgtggagtgcaagctggaccaccccttctacgtgaagaacaagggctggagcagcttctaccccagcctgactgtggtgcagcacggcatcccctgctgtgaggtgcacatcggagatgtgtgcctgcccccaggccacccagatgccatcaactttgatgacagcggcgtgtttgacaccttcaagagctatgacttcacccccatggacagcagcgctgtgtatgtgctgagctccatggcccggcagaggcgggccagcctgagctgtggcggccctgggggccaggactttgcccggagcggcttcagcaagaactgtggcagccctggcagcagccagctgagcagcaacagcctgtatgccaaggctgtgaagaaccacagcagcggcaccgtgtctgccaccagccccaacaagtgcaagaggcccatgaatgccttcatgctgtttgccaagaagtacagagtggagtacacccagatgtacccaggcaaggacaacagagccatcagcgtcatcctgggggaccgctggaagaagatgaagaatgaggagaggaggatgtacaccctggaggccaaggccctggccgaggagcagaagaggctgaacccagactgctggaagaggaagaggaccaacagcggcagccagcagcactag

SEQ ID NO: 171211 - DNA, 432 bp, synthetic construct
  misc_feature 1..432: note = Description of Artificial Sequence: Synthetic coding sequence
  source 1..432: mol_type = other DNA
atgtctgaccagaagaaggaggaggaggaggaggccgctgctgctgctgccatggccacagagggcggcaagaccagcgagcctgagaacaacaacaagaagcccaagaccagcggcagccaggacagccagcccagccccctggccctgctggccgccacctgcagcaagattggcaccccaggagagaaccaggccaccggccagcagcagaggaacctgctggagaccctgggcaacctgctgccccccctgctgctgctgcagaagaggatcaccttcctgaaccagcccctggtgcggctggtgctgcctgctgtgatcactggagtgcacctgctgcagaagctgaaccaggtgatcctgccccccctggtgaacttcaagagctacaagtacaagatccaggtggtggtgtacagcaccaagtag

SEQ ID NO: 171212 - DNA, 1296 bp, synthetic construct
  misc_feature 1..1296: note = Description of Artificial Sequence: Synthetic coding sequence
  source 1..1296: mol_type = other DNA
atggccagcagcctgctggaggaggaggtgcactacggcagcagccccctggccatgctgacagctgcctgcagcaagtttggaggcagcagccccctgcgggacagcaccaccctgggcaaggccggcaccaagaagccctacagcgtgggcagtgacctgagcgccagcaagaccatgggagatgcctacccagcccccttcaccagcaccaacggcctgctgagccctgctggcagccccccagcccccaccagcggctacgccaatgactacccacccttcagccacagcttccctggccccaccggcacccaggaccccggcctgctggtgcccaagggccacagcagcagtgactgcctgcccagcgtgtacaccagcctggacatgacccacccctacggctcctggtacaaggccggcatccatgctggcatcagccctggccctggcaacacccccaccccctggtgggacatgcaccctgggggcaactggctgggcggcggccagggccagggagatggcctgcagggcaccctgcccaccggccctgcccagccccccctgaacccccagctgcccacctaccccagcgactttgcccccctgaacccagccccctacccagccccccacctgctgcagcccggcccccagcacgtgctgccccaggatgtgtacaagcccaaggctgtgggcaacagcggccagctggagggcagcggcggggccaagccacccaggggggccagcactggaggcagcggcggctacggcggcagcggggccggccgcagcagctgtgactgccccaactgccaggagctggagcggctgggcgctgctgctgctggcctgaggaagaagcccatccacagctgccacatccctggctgcggcaaggtgtatggcaaggccagccacctgaaggcccacctgcgctggcacactggagagcggccctttgtgtgcaactggctgttctgtgggaagcgcttcaccaggagtgatgagctggagcggcacgtgaggacccacacccgggagaagaagttcacctgcctgctgtgcagcaagcgcttcaccaggagtgaccacctgagcaagcaccagaggacccacggggagcccggccctggccccccacccagcggccccaaggagctgggggagggccgcagcactggagaggaggaggccagccagaccccccggcccagcgccagccctgccaccccagagaaggcccctgggggcagccctgagcagagcaacctgctggagatctag

SEQ ID NO: 171213 - DNA, 1296 bp, synthetic construct; identical to SEQ ID NO: 171212
  misc_feature 1..1296: note = Description of Artificial Sequence: Synthetic coding sequence
  source 1..1296: mol_type = other DNA

SEQ ID NO: 171214 - DNA, 1242 bp, synthetic construct
  misc_feature 1..1242: note = Description of Artificial Sequence: Synthetic coding sequence
  source 1..1242: mol_type = other DNA
atgctgacagctgcctgcagcaagtttggaggcagcagccccctgcgggacagcaccaccctgggcaaggccggcaccaagaagccctacagcgtgggcagtgacctgagcgccagcaagaccatgggagatgcctacccagcccccttcaccagcaccaacggcctgctgagccctgctggcagccccccagcccccaccagcggctacgccaatgactacccacccttcagccacagcttccctggccccaccggcacccaggaccccggcctgctggtgcccaagggccacagcagcagtgactgcctgcccagcgtgtacaccagcctggacatgacccacccctacggctcctggtacaaggccggcatccatgctggcatcagccctggccctggcaacacccccaccccctggtgggacatgcaccctgggggcaactggctgggcggcggccagggccagggagatggcctgcagggcaccctgcccaccggccctgcccagccccccctgaacccccagctgcccacctaccccagcgactttgcccccctgaacccagccccctacccagccccccacctgctgcagcccggcccccagcacgtgctgccccaggatgtgtacaagcccaaggctgtgggcaacagcggccagctggagggcagcggcggggccaagccacccaggggggccagcactggaggcagcggcggctacggcggcagcggggccggccgcagcagctgtgactgccccaactgccaggagctggagcggctgggcgctgctgctgctggcctgaggaagaagcccatccacagctgccacatccctggctgcggcaaggtgtatggcaaggccagccacctgaaggcccacctgcgctggcacactggagagcggccctttgtgtgcaactggctgttctgtgggaagcgcttcaccaggagtgatgagctggagcggcacgtgaggacccacacccgggagaagaagttcacctgcctgctgtgcagcaagcgcttcaccaggagtgaccacctgagcaagcaccagaggacccacggggagcccggccctggccccccacccagcggccccaaggagctgggggagggccgcagcactggagaggaggaggccagccagaccccccggcccagcgccagccctgccaccccagagaaggcccctgggggcagccctgagcagagcaacctgctggagatctag

SEQ ID NO: 171215 - DNA, 1401 bp, synthetic construct
  misc_feature 1..1401: note = Description of Artificial Sequence: Synthetic coding sequence
  source 1..1401: mol_type = other DNA
atggccaccagcctgctgggggaggagccccggctgggcagcacccccctggccatgctggccgccacctgcaacaagattggcagccccagccccagccccagcagcctgagtgacagcagcagcagctttgggaagggcttccacccctggaagaggagcagcagcagcagcagcgccagctgcaatgtggtgggcagcagcctgagcagctttggagtgtctggggccagcagaaatggaggcagcagcagcgctgctgctgctgctgctgctgctgctgctgctgctgctgccctggtgtctgacagcttcagctgtggcggcagccctggcagcagcgccttcagcctgaccagcagcggcggcagcagcgcccacagccaggacggcagccaccagcctgtgttcatcagcaaggtgcacacctctgtggatggcctgcagggcatctacccccgggtgggcatggcccacccctatgaatcctggttcaagcccagccaccctggcctgggcgctgctggggaggtgggcagcgctggggccagctcctggtgggatgtgggcgccggctggattgatgtgcagaaccccaacagcgctgctgccctgcccggcagcctgcaccctgctgctgggggcctgcagaccagcctgcacagccccctgggcggctacaacagcgactacagcggcctgagccacagcgccttcagcagcggggccagcagccacctgctgagccctgctggccagcacctgatggatggcttcaagcctgtgctgcccggcagctacccagacagcgcccccagccccctggccggggccggcggctccatgctgtctgctggccccagcgcccccctgggcggcagccccaggagcagcgcccggcgctacagcggccgggccacctgtgactgccccaactgccaggaggccgagcggctgggccctgctggggccagcctgcggaggaagggcctgcacagctgccacatccctggctgcggcaaggtgtatggcaagaccagccacctgaaggcccacctgcgctggcacactggagagcggccctttgtgtgcaactggctgttctgtgggaagcgcttcaccaggagtgatgagctgcagaggcacctgcggacccacactggagagaagagatttgcctgccctgtgtgcaacaagcgcttcatgagaagtgaccacctgagcaagcacgtgaagacccacagcggcggcggcggcggcggcggcagcgctggcagcggcagcggcggcaagaagggcagtgacacagacagcgagcacagcgctgctggcagccccccctgccacagccctgagctgctgcagcccccagagcccggccacagaaatggcctggagtag

SEQ ID NO: 171216 - DNA, 1473 bp, synthetic construct
  misc_feature 1..1473: note = Description of Artificial Sequence: Synthetic coding sequence
  source 1..1473: mol_type = other DNA
atgctggccgccacctgcaacaagattggcagccccagccccagccccagcagcctgagtgacagcagcagcagctttgggaagggcttccacccctggaagaggagcagcagcagcagcagcgccagctgcaatgtggtgggcagcagcctgagcagctttggagtgtctggggccagcagaaatggaggcagcagcagcgctgctgctgctgctgctgctgctgctgctgctgctgctgccctggtgtctgacagcttcagctgtggcggcagccctggcagcagcgccttcagcctgaccagcagcagcgctgctgctgctgctgctgctgctgctgctgctgccagcagcagcccctttgccaatgactacagcgtcttccaggcccctggggtgtctgggggcagcggcggcggcggcggcggcggcggcggcggcagcagcgcccacagccaggacggcagccaccagcctgtgttcatcagcaaggtgcacacctctgtggatggcctgcagggcatctacccccgggtgggcatggcccacccctatgaatcctggttcaagcccagccaccctggcctgggcgctgctggggaggtgggcagcgctggggccagctcctggtgggatgtgggcgccggctggattgatgtgcagaaccccaacagcgctgctgccctgcccggcagcctgcaccctgctgctgggggcctgcagaccagcctgcacagccccctgggcggctacaacagcgactacagcggcctgagccacagcgccttcagcagcggggccagcagccacctgctgagccctgctggccagcacctgatggatggcttcaagcctgtgctgcccggcagctacccagacagcgcccccagccccctggccggggccggcggctccatgctgtctgctggccccagcgcccccctgggcggcagccccaggagcagcgcccggcgctacagcggccgggccacctgtgactgccccaactgccaggaggccgagcggctgggccctgctggggccagcctgcggaggaagggcctgcacagctgccacatccctggctgcggcaaggtgtatggcaagaccagccacctgaaggcccacctgcgctggcacactggagagcggccctttgtgtgcaactggctgttctgtgggaagcgcttcaccaggagtgatgagctgcagaggcacctgcggacccacactggagagaagagatttgcctgccctgtgtgcaacaagcgcttcatgagaagtgaccacctgagcaagcacgtgaagacccacagcggcggcggcggcggcggcggcagcgctggcagcggcagcggcggcaagaagggcagtgacacagacagcgagcacagcgctgctggcagccccccctgccacagccctgagctgctgcagcccccagagcccggccacagaaatggcctggagtag

SEQ ID NO: 171217 - DNA, 1527 bp, synthetic construct
  misc_feature 1..1527: note = Description of Artificial Sequence: Synthetic coding sequence
  source 1..1527: mol_type = other DNA
atggccaccagcctgctgggggaggagccccggctgggcagcacccccctggccatgctggccgccacctgcaacaagattggcagccccagccccagccccagcagcctgagtgacagcagcagcagctttgggaagggcttccacccctggaagaggagcagcagcagcagcagcgccagctgcaatgtggtgggcagcagcctgagcagctttggagtgtctggggccagcagaaatggaggcagcagcagcgctgctgctgctgctgctgctgctgctgctgctgctgctgccctggtgtctgacagcttcagctgtggcggcagccctggcagcagcgccttcagcctgaccagcagcagcgctgctgctgctgctgctgctgctgctgctgctgccagcagcagcccctttgccaatgactacagcgtcttccaggcccctggggtgtctgggggcagcggcggcggcggcggcggcggcggcggcggcagcagcgcccacagccaggacggcagccaccagcctgtgttcatcagcaaggtgcacacctctgtggatggcctgcagggcatctacccccgggtgggcatggcccacccctatgaatcctggttcaagcccagccaccctggcctgggcgctgctggggaggtgggcagcgctggggccagctcctggtgggatgtgggcgccggctggattgatgtgcagaaccccaacagcgctgctgccctgcccggcagcctgcaccctgctgctgggggcctgcagaccagcctgcacagccccctgggcggctacaacagcgactacagcggcctgagccacagcgccttcagcagcggggccagcagccacctgctgagccctgctggccagcacctgatggatggcttcaagcctgtgctgcccggcagctacccagacagcgcccccagccccctggccggggccggcggctccatgctgtctgctggccccagcgcccccctgggcggcagccccaggagcagcgcccggcgctacagcggccgggccacctgtgactgccccaactgccaggaggccgagcggctgggccctgctggggccagcctgcggaggaagggcctgcacagctgccacatccctggctgcggcaaggtgtatggcaagaccagccacctgaaggcccacctgcgctggcacactggagagcggccctttgtgtgcaactggctgttctgtgggaagcgcttcaccaggagtgatgagctgcagaggcacctgcggacccacactggagagaagagatttgcctgccctgtgtgcaacaagcgcttcatgagaagtgaccacctgagcaagcacgtgaagacccacagcggcggcggcggcggcggcggcagcgctggcagcggcagcggcggcaagaagggcagtgacacagacagcgagcacagcgctgctggcagccccccctgccacagccctgagctgctgcagcccccagagcccggccacagaaatggcctggagtag

SEQ ID NO: 171218 - DNA, 294 bp, synthetic construct
  misc_feature 1..294: note = Description of Artificial Sequence: Synthetic coding sequence
  source 1..294: mol_type = other DNA
atggacaagcagagcagcgctggaggagtgaagaggtctgtgccctgtgacagcaatgaggccaatgagatgatgcctgagacccccaccggggacagcgacccccagcctgcccccaagaagatgaagaccagcgagagcagcaccatcctggtggtgcgctacagaagaaacttcaagaggaccagccctgaggagctgctgaatgaccacgcccgggagaaccgcatcaaccccctgcagatggaggaggaggagttcatggagatcatggtggagatcccagccaagtag

SEQ ID NO: 171219 - DNA, 294 bp, synthetic construct
  misc_feature 1..294: note = Description of Artificial Sequence: Synthetic coding sequence
  source 1..294: mol_type = other DNA
atggacaagcagagcagcgctggaggagtgaagaggtctgtgccctgtgagagcaatgaggtgaatgagaccatgcctgagacccccaccggggacagcgacccccagcctgcccccaagaagatgaagaccagcgagagcagcaccatcctggtggtgcgctacagaagaaatgtgaagaggaccagccctgaggagctgctgaatgaccacgcccgggagaaccgcatcaaccccctgcagatggaggaggaggagttcatggagatcatggtggagatcccagccaagtag

SEQ ID NO: 171220 - DNA, 1308 bp, synthetic construct
  misc_feature 1..1308: note = Description of Artificial Sequence: Synthetic coding sequence
  source 1..1308: mol_type = other DNA
atgctgcctgcccgctgtgcccggctgctgaccccccacctgctgctggtgctggtgcagctgagccctgcccggggccacaggaccaccggcccccgcttcctgatcagtgaccgggacccccagtgcaacctgcactgcagcaggacccagcccaagcccatctgtgccagtgatggccgctcctatgaatccatgtgtgagtaccagagggccaagtgccgggaccccaccctgggcgtggtgcaccggggccgctgcaaggatgctggccagagcaagtgccgcctggagcgggcccaggccctggagcaggccaagaagccccaggaggccgtgtttgtgcctgaatgtggggaggatggcagcttcacccaggtgcagtgccacacctacacaggctactgctggtgtgtgaccccagatggcaagcccatcagcggcagctctgtgcagaacaagacccctgtgtgcagcggctctgtgacagacaagcccctgagccagggcaacagcggcaggaaggatgatggcagcaagcccacccccaccatggagacccagcctgtgtttgatggagatgagatcacagcccccaccctgtggatcaagcacctggtgatcaaggacagcaagctgaacaacaccaacatcagaaattctgagaaggtgtacagctgtgaccaggagcggcagagcgccctggaggaggcccagcagaacccccgggagggcatcgtcatcccagaatgtgcccctgggggcctgtacaagcctgtgcagtgccaccagagcacaggctactgctggtgtgtgctggtggacaccggccggcccctgcccggcaccagcaccaggtatgtgatgcccagctgtgagagtgatgcccgggccaagaccacagaagcagatgaccccttcaaggaccgggagctgcccggctgcccagagggcaagaagatggagttcatcaccagcctgctggatgccctgaccacagacatggtgcaggccatcaacagcgctgcccccactggaggcggccgcttcagcgagccagaccccagccacaccctggaggagcgggtggtgcactggtacttcagccagctggacagcaacagcagcaatgacatcaacaagcgggagatgaagcccttcaagcgctacgtgaagaagaaggccaagcccaagaagtgtgcccggcgcttcacagactactgtgacctgaacaaggacaaggtgatcagcctgcctgagctgaagggctgcctgggcgtgtccaaggaggtgggccgcctggtgtag

SEQ ID NO: 171221 - DNA, 1305 bp, synthetic construct
  misc_feature 1..1305: note = Description of Artificial Sequence: Synthetic coding sequence
  source 1..1305: mol_type = other DNA
atgctgcctgcccgctgtgcccggctgctgaccccccacctgctgctggtgctggtgcagctgagccctgcccggggccacaggaccaccggcccccgcttcctgatcagtgaccgggacccccagtgcaacctgcactgcagcaggacccagcccaagcccatctgtgccagtgatggccgctcctatgaatccatgtgtgagtaccagagggccaagtgccgggaccccaccctgggcgtggtgcaccggggccgctgcaaggatgctggccagagcaagtgccgcctggagcgggcccaggccctggagcaggccaagaagccccaggaggccgtgtttgtgcctgaatgtggggaggatggcagcttcacccaggtgcagtgccacacctacacaggctactgctggtgtgtgaccccagatggcaagcccatcagcggcagctctgtgcagaacaagacccctgtgtgcagcggctctgtgacagacaagcccctgagccagggcaacagcggcaggaaggatgatggcagcaagcccacccccaccatggagacccagcctgtgtttgatggagatgagatcacagcccccaccctgtggatcaagcacctggtgatcaaggacagcaagctgaacaacaccaacatcagaaattctgagaaggtgtacagctgtgaccaggagcggcagagcgccctggaggaggcccagcagaacccccgggagggcatcgtcatcccagaatgtgcccctgggggcctgtacaagcctgtgcagtgccaccagagcacaggctactgctggtgtgtgctggtggacaccggccggcccctgcccggcaccagcaccaggtatgtgatgcccagctgtgagagtgatgcccgggccaagaccacagaagcagatgaccccttcaaggaccgggagctgcccggctgcccagagggcaagaagatggagttcatcaccagcctgctggatgccctgaccacagacatggtgcaggccatcaacagcgctgcccccactggaggcggccgcttcagcgagccagaccccagccacaccctggaggagcgggtggtgcactggtacttcagccagctggacagcaacagcagcaatgacatcaacaagcgggagatgaagcccttcaagcgctacgtgaagaagaaggccaagcccaagaagtgtgcccggcgcttcacagactactgtgacctgaacaaggacaaggtgatcagcctgcctgagctgaagggctgcctgggcgtgtccaaggagggccgcctggtgtag

SEQ ID NO: 171222 - DNA, 1374 bp, synthetic construct
  misc_feature 1..1374: note = Description of Artificial Sequence: Synthetic coding sequence
  source 1..1374: mol_type = other DNA
atgctgctgccccagctgtgctggctgcccctgctggccggcctgctgccccctgtgcctgcccagaagttcagcgccctgaccttcctgcgggtggaccaggacaaggacaaggactgcagcctggactgtgccggcagcccccagaagcccctgtgtgccagtgatggccgcaccttcctgagccgctgtgagttccagagggccaagtgcaaggacccccagctggagatcgcctaccggggcaactgcaaggatgtgagccgctgtgtggccgagaggaagtacacccaggagcaggccaggaaggagttccagcaggtgttcatccctgagtgcaatgatgatggcacctacagccaggtgcagtgccacagctacacaggctactgctggtgtgtgaccccaaatggccggcccatcagcggcacagctgtggcccacaagaccccccgctgccccggctctgtgaatgagaagctgccccagcgggagggcaccgggaagacagtgtccctgcagatcttctctgtgctgaacagtgatgatgctgctgccccagccctggagacccagccccagggagatgaggaggacatcgccagccgctaccccaccctgtggacagagcaggtgaagagccggcagaacaagaccaacaagaacagcgtgagcagctgtgaccaggagcaccagagcgccctggaggaggccaagcagcccaagaatgacaacgtggtgatcccagaatgtgcccatggaggcctgtacaagcctgtgcagtgccaccccagcacaggctactgctggtgtgtgctggtggacaccggccggcccatccctggcaccagcaccaggtatgagcagcccaagtgtgacaacacagcccgggcccacccagccaaggcccgggacctgtacaagggccggcagctgcagggctgccctggggccaagaagcatgagttcctgacctctgtgctggatgccctgagcacagacatggtgcacgccgccagtgaccccagcagcagcagcggccgcctgtctgagccagaccccagccacaccctggaggagcgggtggtgcactggtacttcaagctgctggacaagaacagcagcggggacatcggcaagaaggagatcaagcccttcaagcgcttcctgaggaagaagagcaagcccaagaagtgtgtgaagaagtttgtggagtactgtgatgtgaacaatgacaagagcatctctgtgcaggagctgatgggctgcctgggcgtggccaaggaggatggcaaggctgacaccaagaagaggcacaccccccggggccatgctgagagcaccagcaaccggcagcccaggaagcagggctag

SEQ ID NO: 171223 - DNA, 1341 bp, synthetic construct
  misc_feature 1..1341: note = Description of Artificial Sequence: Synthetic coding sequence
  source 1..1341: mol_type = other DNA
atgctgctgccccagctgtgctggctgcccctgctggccggcctgctgccccctgtgcctgcccagaagttcagcgccctgaccttcctgcgggtggaccaggacaaggacaaggactgcagcctggactgtgccggcagcccccagaagcccctgtgtgccagtgatggccgcaccttcctgagccgctgtgagttccagagggccaagtgcaaggacccccagctggagatcgcctaccggggcaactgcaaggatgtgagccgctgtgtggccgagaggaagtacacccaggagcaggccaggaaggagttccagcaggtgttcatccctgagtgcaatgatgatggcacctacagccaggtgcagtgccacagctacacaggctactgctggtgtgtgaccccaaatggccggcccatcagcggcacagctgtggcccacaagaccccccgctgccccggctctgtgaatgagaagctgccccagcgggagggcaccgggaagacagatgatgctgctgccccagccctggagacccagccccagggagatgaagaagatattgccagccgctaccccaccctgtggacagagcaggtgaagagccggcagaacaagaccaacaagaacagcgtgagcagctgtgaccaggagcaccagagcgccctggaggaggccaagcagcccaagaatgacaacgtggtgatcccagaatgtgcccacggcggcctgtacaagcctgtgcagtgccaccccagcacaggctactgctggtgtgtgctggtggacaccggccggcccatccctggcaccagcaccaggtatgagcagcccaagtgtgacaacacagcccgggcccacccagccaaggcccgggacctgtacaagggccggcagctgcagggctgccctggggccaagaagcatgagttcctgacctctgtgctggatgccctgagcacagacatggtgcatgctgccagtgaccccagcagcagcagcggccgcctgtctgagccagaccccagccacaccctggaggagcgggtggtgcactggtacttcaagctgctggacaagaacagcagcggggacatcggcaagaaggagatcaagcccttcaagcgcttcctgaggaagaagagcaagcccaagaagtgtgtgaagaagtttgtggagtactgtgatgtgaacaatgacaagagcatctctgtgcaggagctgatgggctgcctgggcgtggccaaggaggatggcaaggctgacaccaagaagaggcacaccccccggggccacgccgagagcaccagcaaccggcagcccaggaagcagggctag

SEQ ID NO: 171224 - DNA, 1347 bp, synthetic construct
  misc_feature 1..1347: note = Description of Artificial Sequence: Synthetic coding sequence
  source 1..1347: mol_type = other DNA
atgctgctgccccagctgtgctggctgcccctgctggccggcctgctgccccctgtgcctgcccagaagttcagcgccctgaccttcctgcgggtggaccaggacaaggacaaggactgcagcctggactgtgccggcagcccccagaagcccctgtgtgccagtgatggccgcaccttcctgagccgctgtgagttccagagggccaagtgcaaggacccccagctggagatcgcctaccggggcaactgcaaggatgtgagccgctgtgtggccgagaggaagtacacccaggagcaggccaggaaggagttccagcaggtgttcatccctgagtgcaatgatgatggcacctacagccaggtgcagtgccacagctacacaggctactgctggtgtgtgaccccaaatggccggcccatcagcggcacagctgtggcccacaagaccccccgctgccccggctctgtgaatgagaagctgccccagcgggagggcaccgggaagacagatgatgctgctgccccagccctggagacccagccccagggagatgaagaagatattgccagccgctaccccaccctgtggacagagcaggtgaagagccggcagaacaagaccaacaagaacagcgtgagcagctgtgaccaggagcaccagagcgccctggaggaggccaagcagcccaagaatgacaacgtggtgatcccagaatgtgcccacggcggcctgtacaagcctgtgcagtgccaccccagcacaggctactgctggtgtgtgctggtggacaccggccggcccatccctggcaccagcaccaggtatgagcagcccaagtgtgacaacacagcccgggcccacccagccaaggcccgggacctgtacaagggccggcagctgcagggctgccctggggccaagaagcatgagttcctgacctctgtgctggatgccctgagcacagacatggtgcatgctgccagtgaccccagcagcagcagcggccgcctgtctgagccagaccccagccacaccctggaggagcgggtggtgcactggtacttcaagctgctggacaagaacagcagcggggacatcggcaagaaggagatcaagcccttcaagcgcttcctgaggaagaagagcaagcccaagaagtgtgtgaagaagtttgtggagtactgtgatgtgaacaatgacaagagcatctctgtgcaggagctgatgggctgcctgggcgtggccaaggaggatggcaaggctgacaccaagaagaggcacaccccccggggccacgccgagagcaccagcaaccggcaggagaaccccaggaaggagggctag

SEQ ID NO: 171225 - DNA, 255 bp, synthetic construct
  misc_feature 1..255: note = Description of Artificial Sequence: Synthetic coding sequence
  source 1..255: mol_type = other DNA
aagaagagcaagcccaagaagtgtgtgaagaagtttgtggagtactgtgatgtgaacaatgacaagagcatctctgtgcaggagctgatgggctgcctgggcgtggccaaggaggatggcaaggctgacaccaagaagaggcacaccccccggggccacgccgagagcaccagcaaccggcaggatgccatggtggtgagcagccggcccaaggccaccacccacaggaagagcaggaccctgagcagaagatag

SEQ ID NO: 171226 - DNA, 1275 bp, synthetic construct
  misc_feature 1..1275: note = Description of Artificial Sequence: Synthetic coding sequence
  source 1..1275: mol_type = other DNA
atgagggcccctggctgcggccgcctggtgctgcccctgctgctgctggccgctgctgccctggccgagggagatgccaagggcctgaaggagggggagaccccaggcaacttcatggaggatgagcagtggctgagcagcatcagccagtacagcggcaagatcaagcactggaaccgcttcagagatgaggtggaggatgactacatcaagtcctgggaggacaaccagcagggagatgaggccctggacaccaccaaggacccctgccagaaggtgaagtgcagccgccacaaggtgtgcatcgcccagggctaccagagggccatgtgcatcagcaggaagaagctggagcaccgcatcaagcagcccaccgtgaagctgcacggcaacaaggacagcatctgcaagccctgccacatggcccagctggcctctgtgtgtggcagtgatggccacacctacagctctgtgtgcaagctggagcagcaggcctgcctgagcagcaagcagctggccgtgcgctgtgagggcccctgcccctgccccacagagcaggccgccaccagcacagcagatggcaagccagagacctgcaccggccaggacctggccgacctgggggaccggctgcgggactggttccagctgctgcacgagaacagcaagcagaatggaagtgccagctctgtggccggccctgccagcggcctggacaagagcctgggcgccagctgcaaggacagcatcggctggatgttcagcaagctggacaccagcgctgacctcttcctggaccagacagagctggccgccatcaacctggacaagtatgaggtgtgcatccggcccttcttcaacagctgtgacacctacaaggatggccgggtgtccacagctgagtggtgcttctgcttctggagggagaagccaccctgcctggccgagctggagcgcatccagatccaggaggccgccaagaagaagccaggcatcttcatccccagctgtgatgaagatggctactacaggaagatgcagtgtgaccagagcagcggggactgctggtgtgtggaccagctgggcctggagctgaccggcaccaggacccacggcagcccagactgtgatgacatcgtgggcttcagcggggactttggcagcggcgtgggctgggaggatgaggaggagaaggagacagaggaggccggggaggaggccgaggaggaggagggggaggccggggaggctgatgatggcggctacatctggtag

SEQ ID NO: 171227 - DNA, 1266 bp, synthetic construct
  misc_feature 1..1266: note = Description of Artificial Sequence: Synthetic coding sequence
  source 1..1266: mol_type = other DNA
atgagggcccctggctgcggccgcctggtgctgcccctgctgctgctggccgctgctgccctggccgagggagatgccaagggcctgaaggagggggagaccccaggcaacttcatggaggatgagcagtggctgagcagcatcagccagtacagcggcaagatcaagcactggaaccgcttcagagatgatgactacatcaagtcctgggaggacaaccagcagggagatgaggccctggacaccaccaaggacccctgccagaaggtgaagtgcagccgccacaaggtgtgcatcgcccagggctaccagagggccatgtgcatcagcaggaagaagctggagcaccgcatcaagcagcccaccgtgaagctgcacggcaacaaggacagcatctgcaagccctgccacatggcccagctggcctctgtgtgtggcagtgatggccacacctacagctctgtgtgcaagctggagcagcaggcctgcctgagcagcaagcagctggccgtgcgctgtgagggcccctgcccctgccccacagagcaggccgccaccagcacagcagatggcaagccagagacctgcaccggccaggacctggccgacctgggggaccggctgcgggactggttccagctgctgcacgagaacagcaagcagaatggcagcgccagctctgtggccggccctgccagcggcctggacaagagcctgggcgccagctgcaaggacagcatcggctggatgttcagcaagctggacaccagcgctgacctcttcctggaccagacagagctggccgccatcaacctggacaagtatgaggtgtgcatccggcccttcttcaacagctgtgacacctacaaggatggccgggtgtccacagctgagtggtgcttctgcttctggagggagaagccaccctgcctggccgagctggagcgcatccagatccaggaggccgccaagaagaagccaggcatcttcatccccagctgtgatgaagatggctactacaggaagatgcagtgtgaccagagcagcggggactgctggtgtgtggaccagctgggcctggagctgaccggcaccaggacccacggcagcccagactgtgatgacatcgtgggcttcagcggggactttggaagtggagtgggctgggaggatgaggaggagaaggagacagaggaggccggggaggaggccgaggaggaggagggggaggccggggaggctgatgatggcggctacatctggtag

SEQ ID NO: 171228 - DNA, 234 bp, synthetic construct
  misc_feature 1..234: note = Description of Artificial Sequence: Synthetic coding sequence
  source 1..234: mol_type = other DNA
atgagggcccctggctgcggccgcctggtgctgcccctgctgctgctggccgctgctgccctggccgagggagatgccaagggcctgaaggagggggagaccccaggcaacttcatggaggatgagcagtggctgagcagcatcagccagtacagcggcaagatcaagcactggaaccgcttcagagatgtgcccagcagtgacccccccagcaccacccaggccaccccctag

SEQ ID NO: 171229 - DNA, 1275 bp, synthetic construct
  misc_feature 1..1275: note = Description of Artificial Sequence: Synthetic coding sequence
  source 1..1275: mol_type = other DNA
atgagggcccctggctgcggccgcctggtgctgcccctgctgctgctggccgctgctgccctggccgagggagatgccaagggcctgaaggagggggagaccccaggcaacttcatggaggatgagcagtggctgagcagcatcagccagtacagcggcaagatcaagcactggaaccgcttcagagatggcattgaagatgactacatcaagtcctgggaggacaaccagcagggagatgaggccctggacaccaccaaggacccctgccagaaggtgaagtgcagccgccacaaggtgtgcatcgcccagggctaccagagggccatgtgcatcagcaggaagaagctggagcaccgcatcaagcagcccaccgtgaagctgcacggcaacaaggacagcatctgcaagccctgccacatggcccagctggcctctgtgtgtggcagtgatggccacacctacagctctgtgtgcaagctggagcagcaggcctgcctgagcagcaagcagctggccgtgcgctgtgagggcccctgcccctgccccacagagcaggccgccaccagcacagcagatggcaagccagagacctgcaccggccaggacctggccgacctgggggaccggctgcgggactggttccagctgctgcacgagaacagcaagcagaatggaagtgccagctctgtggccggccctgccagcggcctggacaagagcctgggcgccagctgcaaggacagcatcggctggatgttcagcaagctggacaccagcgctgacctcttcctggaccagacagagctggccgccatcaacctggacaagtatgaggtgtgcatccggcccttcttcaacagctgtgacacctacaaggatggccgggtgtccacagctgagtggtgcttctgcttctggagggagaagccaccctgcctggccgagctggagcgcatccagatccaggaggccgccaagaagaagccaggcatcttcatccccagctgtgatgaagatggctactacaggaagatgcagtgtgaccagagcagcggggactgctggtgtgtggaccagctgggcctggagctgaccggcaccaggacccacggcagcccagactgtgatgacatcgtgggcttcagcggggactttggcagcggcgtgggctgggaggatgaggaggagaaggagacagaggaggccggggaggaggccgaggaggaggagggggaggccggggaggctgatgatggcggctacatctggtag

SEQ ID NO: 171230 - DNA, 1311 bp, synthetic construct
  misc_feature 1..1311: note = Description of Artificial Sequence: Synthetic coding sequence
  source 1..1311: mol_type = other DNA
atgctgaaggtgtctgctgtgctgtgtgtgtgtgccgccgcctggtgcagccagagcctggccgctgctgctgctgtggccgctgctgggggccgcagtgatggcggcaacttcctggatgacaagcagtggctgaccaccatcagccagtatgacaaggaggtgggccagtggaacaagttcagagatgaggtggaggatgactacttccgcacctggagccctgggaagccctttgaccaggccctggaccctgccaaggacccctgcctgaagatgaagtgcagccgccacaaggtgtgcatcgcccaggacagccagacagctgtgtgcatcagccaccggcggctgacccacaggatgaaggaggccggcgtggaccaccggcagtggaggggccccatcctgagcacctgcaagcagtgccctgtggtgtaccccagccctgtgtgtggcagtgatggccacacctacagcttccagtgcaagctggagtaccaggcctgtgtgctgggcaagcagatctctgtgaagtgtgagggccactgcccctgccccagcgacaagcccaccagcaccagcagaaatgtgaagagggcctgcagcgacctggagttccgggaggtggccaaccggctgcgggactggttcaaggccctgcatgaaagtggcagccagaacaagaagaccaagaccctgctgcggcctgagaggagcagatttgacaccagcatcctgcccatctgcaaggacagcctgggctggatgttcaaccggctggacaccaactatgacctgctgctggaccagagcgagctgcggagcatctacctggacaagaatgagcagtgcaccaaggccttcttcaacagctgtgacacctacaaggacagcctcatcagcaacaatgagtggtgctactgcttccagaggcagcaggaccccccctgccagacagagctgagcaacatccagaagaggcagggcgtgaagaagctgctgggccagtacatccccctgtgtgatgaagatggctactacaagcccacccagtgccacggctctgtgggccagtgctggtgtgtggacagatatggaaatgaggtgatgggcagccgcatcaatggagtggccgactgtgccatcgactttgagatcagcggggactttgccagcggggacttccacgagtggacagatgatgaagatgatgaagatgacatcatgaatgatgaagatgaaattgaagatgatgatgaagatgaaggagatgatgatgatggaggagatgaccatgatgtgtacatctag

SEQ ID NO: 171231 - DNA, 1302 bp, synthetic construct
  misc_feature 1..1302: note = Description of Artificial Sequence: Synthetic coding sequence
  source 1..1302: mol_type = other DNA
atgctgaaggtgtctgctgtgctgtgtgtgtgtgccgccgcctggtgcagccagagcctggccgctgctgctgctgtggccgctgctgggggccgcagtgatggcggcaacttcctggatgacaagcagtggctgaccaccatcagccagtatgacaaggaggtgggccagtggaacaagttcagagatgatgactacttccgcacctggagccctgggaagccctttgaccaggccctggaccctgccaaggacccctgcctgaagatgaagtgcagccgccacaaggtgtgcatcgcccaggacagccagacagctgtgtgcatcagccaccggcggctgacccacaggatgaaggaggccggcgtggaccaccggcagtggaggggccccatcctgagcacctgcaagcagtgccctgtggtgtaccccagccctgtgtgtggcagtgatggccacacctacagcttccagtgcaagctggagtaccaggcctgtgtgctgggcaagcagatctctgtgaagtgtgagggccactgcccctgccccagcgacaagcccaccagcaccagcagaaatgtgaagagggcctgcagcgacctggagttccgggaggtggccaaccggctgcgggactggttcaaggccctgcacgagagcggcagccagaacaagaagaccaagaccctgctgcggcctgagaggagcagatttgacaccagcatcctgcccatctgcaaggacagcctgggctggatgttcaaccggctggacaccaactatgacctgctgctggaccagagcgagctgcggagcatctacctggacaagaatgagcagtgcaccaaggccttcttcaacagctgtgacacctacaaggacagcctcatcagcaacaatgagtggtgctactgcttccagaggcagcaggaccccccctgccagacagagctgagcaacatccagaagaggcagggcgtgaagaagctgctgggccagtacatccccctgtgtgatgaagatggctactacaagcccacccagtgccacggctctgtgggccagtgctggtgtgtggacagatatggaaatgaggtgatgggcagccgcatcaacggggtggccgactgtgccatcgactttgagatcagcggggactttgccagcggggacttccacgagtggacagatgatgaagatgatgaagatgacatcatgaatgatgaagatgaaattgaagatgatgatgaagatgaaggagatgatgatgatggaggagatgaccatgatgtgtacatctag

SEQ ID NO: 171232 - DNA, 1158 bp, synthetic construct
  misc_feature 1..1158: note = Description of Artificial Sequence: Synthetic coding sequence
  source 1..1158: mol_type = other DNA
atgatcacccaggaccacatccacatgagcagcggcctgagccaggatgactacttccgcacctggagccctgggaagccctttgaccaggccctggaccctgccaaggacccctgcctgaagatgaagtgcagccgccacaaggtgtgcatcgcccaggacagccagacagctgtgtgcatcagccaccggcggctgacccacaggatgaaggaggccggcgtggaccaccggcagtggaggggccccatcctgagcacctgcaagcagtgccctgtggtgtaccccagccctgtgtgtggcagtgatggccacacctacagcttccagtgcaagctggagtaccaggcctgtgtgctgggcaagcagatctctgtgaagtgtgagggccactgcccctgccccagcgacaagcccaccagcaccagcagaaatgtgaagagggcctgcagcgacctggagttccgggaggtggccaaccggctgcgggactggttcaaggccctgcacgagagcggcagccagaacaagaagaccaagaccctgctgcggcctgagaggagcagatttgacaccagcatcctgcccatctgcaaggacagcctgggctggatgttcaaccggctggacaccaactatgacctgctgctggaccagagcgagctgcggagcatctacctggacaagaatgagcagtgcaccaaggccttcttcaacagctgtgacacctacaaggacagcctcatcagcaacaatgagtggtgctactgcttccagaggcagcaggaccccccctgccagacagagctgagcaacatccagaagaggcagggcgtgaagaagctgctgggccagtacatccccctgtgtgatgaagatggctactacaagcccacccagtgccacggctctgtgggccagtgctggtgtgtggacagatatggaaatgaggtgatgggcagccgcatcaacggggtggccgactgtgccatcgactttgagatcagcggggactttgccagcggggacttccacgagtggacagatgatgaagatgatgaagatgacatcatgaatgatgaagatgaaattgaagatgatgatgaagatgaaggagatgatgatgatggaggagatgaccatgatgtgtacatctag

SEQ ID NO: 171233 - DNA, 1311 bp, synthetic construct; identical to SEQ ID NO: 171230
  misc_feature 1..1311: note = Description of Artificial Sequence: Synthetic coding sequence
  source 1..1311: mol_type = other DNA

SEQ ID NO: 171234 - DNA, 1302 bp, synthetic construct; identical to SEQ ID NO: 171231
  misc_feature 1..1302: note = Description of Artificial Sequence: Synthetic coding sequence
  source 1..1302: mol_type = other DNA

SEQ ID NO: 171235 - DNA, 348 bp, synthetic construct
  misc_feature 1..348: note = Description of Artificial Sequence: Synthetic coding sequence
  source 1..348: mol_type = other DNA
atgctgaaggtgtctgctgtgctgtgtgtgtgtgccgccgcctggtgcagccagagcctggccgctgctgctgctgtggccgctgctgggggccgcagtgatggcggcaacttcctggatgacaagcagtggctgaccaccatcagccagtatgacaaggaggtgggccagtggaacaagttcagagatgaggtggaggatgactacttccgcacctggagccctgggaagccctttgaccaggccctggaccctgccaaggacccctgcctgaagatgaagtgcagccgccacaaggtgtgcatcgcccaggacagccagacagctgtgtgcatcagccacaggtag

SEQ ID NO: 171236 - DNA, 1311 bp, synthetic construct; identical to SEQ ID NO: 171230
  misc_feature 1..1311: note = Description of Artificial Sequence: Synthetic coding sequence
  source 1..1311: mol_type = other DNA

SEQ ID NO: 171237 - DNA, 486 bp, synthetic construct
  misc_feature 1..486: note = Description of Artificial Sequence: Synthetic coding sequence
  source 1..486: mol_type = other DNA
atgctgaaggtgtctgctgtgctgtgtgtgtgtgccgccgcctggtgcagccagagcctggccgctgctgctgctgtggccgctgctgggggccgcagtgatggcggcaacttcctggatgacaagcagtggctgaccaccatcagccagtatgacaaggaggtgggccagtggaacaagttcagagatgatgactacttccgcacctggagccctgggaagccctttgaccaggccctggaccctgccaaggacccctgcctgaagatgaagtgcagccgccacaaggtgtgcatcgcccaggacagccagacagctgtgtgcatcagccaccggcggctgacccacaggatgaaggaggccggcgtggaccaccggcagtggaggggccccatcctgagcacctgcaagcagtgccctgtggtgtaccccagccctgtgtgtggcagtgatggccacacctacagcttccagtgcaagctgtag

SEQ ID NO: 171238 - DNA, 522 bp, synthetic construct
  misc_feature 1..522: note = Description of Artificial Sequence: Synthetic coding sequence
  source 1..522: mol_type = other DNA
atgctgaaggtgtctgctgtgctgtgtgtgtgtgccgccgcctggtgcagccagagcctggccgctgctgctgctgtggccgctgctgggggccgcagtgatggcggcaacttcctggatgacaagcagtggctgaccaccatcagccagtatgacaaggaggtgggccagtggaacaagttcagagatgatgactacttccgcacctggagccctgggaagccctttgaccaggcctgcagcgacctggagttccgggaggtggccaaccggctgcgggactggttcaaggccctgcacgagagcggcagccagaacaagaagaccaagaccctgctgcggcctgagaggagcagatttgacaccagcatcctgcccatctgcaaggacagcctgggctggatgttcaaccggctggacaccaactatgacctgctgctggaccagagcgagctgcggagcatctacctggacaagaatgagcagtgcaccaaggccttcttcaacagctgtgacacctag

SEQ ID NO: 171239 - DNA, 1182 bp, synthetic construct
  misc_feature 1..1182: note = Description of Artificial Sequence: Synthetic coding sequence
  source 1..1182: mol_type = other DNA
atgctgaaggtgtctgctgtgctgtgtgtgtgtgccgccgcctggtgcagccagagcctggccgctgctgctgctgtggccgctgctgggggccgcagtgatggcggcaacttcctggatgacaagcagtggctgaccaccatcagccagtatgacaaggaggtgggccagtggaacaagttcagagatgatgactacttccgcacctggagccctgggaagccctttgaccaggccctggaccctgccaaggacccctgcctgaagatgaagtgcagccgccacaaggtgtgcatcgcccaggacagccagacagctgtgtgcatcagccaccggcggctgacccacaggatgaaggaggccggcgtggaccaccggcagtggaggggccccatcctgagcacctgcaagcagtgccctgtggtgtaccccagccctgtgtgtggcagtgatggccacacctacagcttccagtgcaagctggagtaccaggcctgtgtgctgggcaagcagatctctgtgaagtgtgagggccactgcccctgccccagcgacaagcccaccagcaccagcagaaatgtgaagaggggctttgacaccagcatcctgcccatctgcaaggacagcctgggctggatgttcaaccggctggacaccaactatgacctgctgctggaccagagcgagctgcggagcatctacctggacaagaatgagcagtgcaccaaggccttcttcaacagctgtgacacctacaaggacagcctcatcagcaacaatgagtggtgctactgcttccagaggcagcaggaccccccctgccagacagagctgagcaacatccagaagaggcagggcgtgaagaagctgctgggccagtacatccccctgtgtgatgaagatggctactacaagcccacccagtgccacggctctgtgggccagtgctggtgtgtggacagatatggaaatgaggtgatgggcagccgcatcaacggggtggccgactgtgccatcgactttgagatcagcggggactttgccagcggggacttccacgagtggacagatgatgaagatgatgaagatgacatcatgaatgatgaagatgaaattgaagatgatgatgaagatgaaggagatgatgatgatggaggagatgaccatgatgtgtacatctag

SEQ ID NO: 171240 - DNA, 1302 bp, synthetic construct; identical to SEQ ID NO: 171231
  misc_feature 1..1302: note = Description of Artificial Sequence: Synthetic coding sequence
  source 1..1302: mol_type = other DNA

SEQ ID NO: 171241 - DNA, 1311 bp, synthetic construct; identical to SEQ ID NO: 171230
  misc_feature 1..1311: note = Description of Artificial Sequence: Synthetic coding sequence
  source 1..1311: mol_type = other DNA

SEQ ID NO: 171242 - DNA, 348 bp, synthetic construct; identical to SEQ ID NO: 171235
  misc_feature 1..348: note = Description of Artificial Sequence: Synthetic coding sequence
  source 1..348: mol_type = other DNA

SEQ ID NO: 171243 - DNA, 942 bp, synthetic construct
  misc_feature 1..942: note = Description of Artificial Sequence: Synthetic coding sequence
  source 1..942: mol_type = other DNA
atgctgaaggtgtctgctgtgctgtgtgtgtgtgccgccgcctggtgcagccagagcctggccgctgctgctgctgtggccgctgctgggggccgcagtgatggcggcaacttcctggatgacaagcagtggctgaccaccatcagccagtatgacaaggaggtgggccagtggaacaagttcagagatgatgactacttccgcacctggagccctgggaagccctttgaccaggccctggaccctgccaaggacccctgcctgaagatgaagtgcagccgccacaaggtgtgcatcgcccaggacagccagacagctgtgtgcatcagccaccggcggctgacccacaggatgaaggaggccggcgtggaccaccggcagtggaggggccccatcctgagcacctgcaagcagtgccctgtggtgtaccccagccctgtgtgtggcagtgatggccacacctacagcttccagtgcaagctggagtaccaggcctgtgtgctgggcaagcagatctctgtgaagtgtgagggccactgcccctgccccagcgacaagcccaccagcaccagcagaaatgtgaagagggcctgcagcgacctggagttccgggaggtggccaaccggctgcgggactggttcaaggccctgcacgagagcggcagccagaacaagaagaccaagaccctgctgcggcctgagaggagcagatttgacaccagcatcctgcccatctgcaaggacagcctgggctggatgttcaaccggctggacaccaactatgacctgctgctggaccagagcgagctgcggagcatctacctggacaagaatgagcagtgcaccaaggccttcttcaacagctgtgacacctacaaggacagcctcatcagcaacaatgagtggtgctactgcttccagaggcagcagggcaagaggtag

SEQ ID NO: 171244 - DNA, 1017 bp, synthetic construct
  misc_feature 1..1017: note = Description of Artificial Sequence: Synthetic coding sequence
  source 1..1017: mol_type = other DNA
atgctgaaggtgtctgctgtgctgtgtgtgtgtgccgccgcctggtgcagccagagcctggccgctgctgctgctgtggccgctgctgggggccgcagtgatggcggcaacttcctggatgacaagcagtggctgaccaccatcagccagtatgacaaggaggtgggccagtggaacaagttccgggactgcaagctggagtaccaggcctgtgtgctgggcaagcagatctctgtgaagtgtgagggccactgcccctgccccagcgacaagcccaccagcaccagcagaaatgtgaagagggcctgcagcgacctggagttccgggaggtggccaaccggctgcgggactggttcaaggccctgcatgaaagtggcagccagaacaagaagaccaagaccctgctgcggcctgagaggagcagatttgacaccagcatcctgcccatctgcaaggacagcctgggctggatgttcaaccggctggacaccaactatgacctgctgctggaccagagcgagctgcggagcatctacctggacaagaatgagcagtgcaccaaggccttcttcaacagctgtgacacctacaaggacagcctcatcagcaacaatgagtggtgctactgcttccagaggcagcaggaccccccctgccagacagagctgagcaacatccagaagaggcagggcgtgaagaagctgctgggccagtacatccccctgtgtgatgaagatggctactacaagcccacccagtgccacggctctgtgggccagtgctggtgtgtggacagatatggaaatgaggtgatgggcagccgcatcaatggagtggccgactgtgccatcgactttgagatcagcggggactttgccagcggggacttccacgagtggacagatgatgaagatgatgaagatgacatcatgaatgatgaagatgaaattgaagatgatgatgaagatgaaggagatgatgatgatggaggagatgaccatgatgtgtacatctag

SEQ ID NO: 171245 - DNA, 1023 bp, synthetic construct
  misc_feature 1..1023: note = Description of Artificial Sequence: Synthetic coding sequence
  source 1..1023: mol_type = other DNA
atgatcaacaacggcagcccccagagcctgtccatgaccaggaagagtgacagcggcaccaacagcgagaccatgaaggaggccggcgtggaccaccggcagtggaggggccccatcctgagcacctgcaagcagtgccctgtggtgtaccccagccctgtgtgtggcagtgatggccacacctacagcttccagtgcaagctggagtaccaggcctgtgtgctgggcaagcagatctctgtgaagtgtgagggccactgcccctgccccagcgacaagcccaccagcaccagcagaaatgtgaagagggcctgcagcgacctggagttccgggaggtggccaaccggctgcgggactggttcaaggccctgcatgaaagtggcagccagaacaagaagaccaagaccctgctgcggcctgagaggagcagatttgacaccagcatcctgcccatctgcaaggacagcctgggctggatgttcaaccggctggacaccaactatgacctgctgctggaccagagcgagctgcggagcatctacctggacaagaatgagcagtgcaccaaggccttcttcaacagctgtgacacctacaaggacagcctcatcagcaacaatgagtggtgctactgcttccagaggcagcaggaccccccctgccagacagagctgagcaacatccagaagaggcagggcgtgaagaagctgctgggccagtacatccccctgtgtgatgaagatggctactacaagcccacccagtgccacggctctgtgggccagtgctggtgtgtggacagatatggaaatgaggtgatgggcagccgcatcaatggagtggccgactgtgccatcgactttgagatcagcggggactttgccagcggggacttccacgagtggacagatgatgaagatgatgaagatgacatcatgaatgatgaagatgaaattgaagatgatgatgaagatgaaggagatgatgatgatggaggagatgaccatgatgtgtacatctag

SEQ ID NO: 171246 - DNA, 915 bp, synthetic construct
  misc_feature 1..915: note = Description of Artificial Sequence: Synthetic coding sequence
  source 1..915: mol_type = other DNA
atgaagtgcagccgccacaaggtgtgcatcgcccaggacagccagacagctgtgtgcatcagccaccggcggctgacccacaggatgaaggaggccggcgtggaccaccggcagtggaggggccccatcctgagcacctgcaagcagtgccctgtggtgtaccccagccctgtgtgtggcagtgatggccacacctacagcttccagtgcaagctggagtaccaggcctgtgtgctgggcaagcagatctctgtgaagtgtgagggccactgcccctgccccagcgacaagcccaccagcaccagcagaaatgtgaagaggggctttgacaccagcatcctgcccatctgcaaggacagcctgggctggatgttcaaccggctggacaccaactatgacctgctgctggaccagagcgagctgcggagcatctacctggacaagaatgagcagtgcaccaaggccttcttcaacagctgtgacacctacaaggacagcctcatcagcaacaatgagtggtgctactgcttccagaggcagcaggaccccccctgccagacagagctgagcaacatccagaagaggcagggcgtgaagaagctgctgggccagtacatccccctgtgtgatgaagatggctactacaagcccacccagtgccacggctctgtgggccagtgctggtgtgtggacagatatggaaatgaggtgatgggcagccgcatcaatggagtggccgactgtgccatcgactttgagatcagcggggactttgccagcggggacttccacgagtggacagatgatgaagatgatgaagatgacatcatgaatgatgaagatgaaattgaagatgatgatgaagatgaaggagatgatgatgatggaggagatgaccatgatgtgtacatctag

SEQ ID NO: 171247 - DNA, 951 bp, synthetic construct
  misc_feature 1..951: note = Description of Artificial Sequence: Synthetic coding sequence
  source 1..951: mol_type = other DNA
atgaaggaggccggcgtggaccaccggcagtggaggggccccatcctgagcacctgcaagcagtgccctgtggtgtaccccagccctgtgtgtggcagtgatggccacacctacagcttccagtgcaagctggagtaccaggcctgtgtgctgggcaagcagatctctgtgaagtgtgagggccactgcccctgccccagcgacaagcccaccagcaccagcagaaatgtgaagagggcctgcagcgacctggagttccgggaggtggccaaccggctgcgggactggttcaaggccctgcatgaaagtggcagccagaacaagaagaccaagaccctgctgcggcctgagaggagcagatttgacaccagcatcctgcccatctgcaaggacagcctgggctggatgttcaaccggctggacaccaactatgacctgctgctggaccagagcgagctgcggagcatctacctggacaagaatgagcagtgcaccaaggccttcttcaacagctgtgacacctacaaggacagcctcatcagcaacaatgagtggtgctactgcttccagaggcagcaggaccccccctgccagacagagctgagcaacatccagaagaggcagggcgtgaagaagctgctgggccagtacatccccctgtgtgatgaagatggctactacaagcccacccagtgccacggctctgtgggccagtgctggtgtgtggacagatatggaaatgaggtgatgggcagccgcatcaatggagtggccgactgtgccatcgactttgagatcagcggggactttgccagcggggacttccacgagtggacagatgatgaagatgatgaagatgacatcatgaatgatgaagatgaaattgaagatgatgatgaagatgaaggagatgatgatgatggaggagatgaccatgatgtgtacatctag

SEQ ID NO: 171248 - DNA, 1017 bp, synthetic construct; identical to SEQ ID NO: 171244
  misc_feature 1..1017: note = Description of Artificial Sequence: Synthetic coding sequence
  source 1..1017: mol_type = other DNA

SEQ ID NO: 171249 - DNA, 13740 bp, synthetic construct
  misc_feature 1..13740: note = Description of Artificial Sequence: Synthetic coding sequence
  source 1..13740: mol_type = other DNA
atggagaccaaggaaaatcgctgggtgcctgtgacagtgctgcccggctgtgtgggctgcaggacagtggccgccctggcctcctggacagtgagagatgtgaaggagcgcatctttgctgagaccggcttccctgtgtctgagcagaggctgtggaggggcggccgggagctgagtgactggatcaagatcggggacctgaccagcaagaactgccacctgtttgtgaacctgcagagcaagggcctgaagggcggcggccgcttcggccagaccaccccacccctggtggacttcctgaaggacatcctgcggcgctacccagagggcggccagatcctgaaggagctgatccagaatgcagaagatgctggggccacagaggtgaagttcctgtatgatgagacccagtatggaacagagaccctgtggagcaaggacatggccccctaccagggccctgccctgtatgtgtacaacaatgctgtgttcaccccagaggactggcacggcatccaggagatcgcccggagcaggaagaaggatgaccccctgaaggtgggccgcttcggcatcggcttcaacagcgtgtaccacatcacagatgtgccctgcatcttcagcggggaccagatcggcatgctggacccccaccagaccctgtttggcccccatgaaagtggccagtgctggaacctgaaggatgacagcaaggagatcagcgagctgagtgaccagtttgccccctttgtgggcatcttcggcagcaccaaggagaccttcatcaatggaaacttccctggcaccttcttccgcttccccctgcggctgcagcccagccagctgagcagcaacctgtacaacaagcagaaggtgctggagctgtttgagagcttccgggcagatgctgacacagtgctgctcttcctgaagtctgtgcaggatgtgtccctgtatgtgcgggaggctgatggaacagagaagctggtgttccgggtgaccagcagcgagagcaaggccctgaagcatgagcggcccaacagcatcaagatcctgggcacagccatcagcaactactgcaagaagacccccagcaacaacatcacctgtgtgacctaccacgtgaacatcgtgctggaggaggagagcaccaaggatgcccagaagacctcctggctggtgtgcaacagcgtgggcggccggggcatcagcagcaagctggacagcctggctgatgagctgaagtttgtgcccatcatcggcatcgccatgcccctgagcagcagagatgatgaggccaagggggccaccagtgacttcagcggcaaggccttctgcttcctgcccctgcccccaggagaggagagcagcacaggcctgcctgtgcacatcagcggcttcttcggcctgacagacaacagaagaagcatcaagtggagggagctggaccagtggagggaccctgctgccctgtggaatgagttcctggtgatgaatgtggtgcccaaggcctatgccaccctcatcctggacagcatcaagaggctggagatggagaagagcagtgacttccccctgtctgtggatgtgatctacaagctgtggccagaggccagcaaggtgaaggtgcactggcagcctgtgctggagcccctcttcagcgagctgctgcagaatgctgtgatctacagcatcagctgtgactgggtgcggctggagcaggtgtacttcagcgagctggatgagaacctggagtacaccaagacagtgctgaactacctgcagagcagcggcaagcagatcgccaaggtgcctggaaatgtggatgctgctgtgcagctgacagctgccagcggcaccacccctgtgaggaaggtgaccccagcctgggtgcggcaggtgctgaggaaatgtgcccacctgggctgtgccgaggagaagctgcacctgctggagtttgtgctgagtgaccaggcctacagcgagctgctgggcctggagctgctgcccctgcagaatggaaactttgtgcccttcagcagctctgtgtctgaccaggatgtgatctacatcaccagcgctgagtaccccaggagcctcttccccagcctggagggccgcttcatcctggacaacctgaagccccacctggtggccgccctgaaggaggccgcccagacccggggccggccctgcacccagctgcagctgctgaaccctgagagatttgcccggctcatcaaggaggtgatgaacaccttctggccaggccgggagctgattgtgcagtggtacccctttgatgaaaatagaaaccaccccagcgtgtcctggctgaagatggtgtggaagaacctgtacatccacttcagcgaggacctgaccctgtttgatgagatgcccctcatccccaggaccatcctggaggagggccagacctgtgtggagctgatccggctgcgcatccccagcctggtgatcctggatgatgagagcgaggcccagctgcctgagttcctggccgacatcgtgcagaagctgggcggctttgtgctgaagaagctggatgccagcatccagcaccccctcatcaagaagtacatccacagccccctgcccagcgctgtgctgcagatcatggagaagatgcccctgcagaagctgtgcaaccagatcaccagcctgctgcccacccacaaggatgccctgaggaagttcctggccagcctgacagacagcagcgagaaggagaagaggatcatccaggagctggccatcttcaagaggatcaaccacagcagtgaccagggcatcagcagctacaccaagctgaagggctgcaaggtgctgcaccacacagccaagctgcctgctgacctgcggctgagcatctctgtgattgacagcagtgatgaggccaccatccggctggccaacatgctgaagattgagcagctgaagaccaccagctgcctgaagctggtgctgaaggacattgaaaatgccttctacagccatgaggaggtgacccagctgatgctgtgggtgctggagaacctgagcagcctgaagaatgaaaaccccaacgtgctggagtggctgacccccctgaagttcatccagatcagccaggagcagatggtgtctgctggggagctgtttgatcctgacatcgaggtgctgaaggacctcttctgcaatgaggagggcacctacttcccccccagcgtcttcaccagcccagacatcctgcacagcctgcggcagatcggcctgaagaatgaggccagcctgaaggagaaggatgtggtgcaggtggccaagaagattgaggccctgcaggtgggcgcctgcccagaccaggatgtgctgctgaagaaggccaagaccctgctgctggtgctgaacaagaaccacaccctgctgcagagcagcgagggcaagatgaccctgaagaagatcaagtgggtgcctgcctgcaaggagcggccccccaactacccaggcagcctggtgtggaagggggacctgtgcaacctgtgtgcccccccagacatgtgtgatgtgggccacgccatcctgattggcagcagcctgcccctggtggagagcatccacgtgaacctggagaaggccctgggcatcttcaccaagcccagcctgtctgctgtgctgaagcacttcaagatcgtggtggactggtacagcagcaagaccttcagtgatgaggactactaccagttccagcacatcctgctggagatctacggcttcatgcatgaccacctgaatgaaggcaaggacagcttccgggccctgaagttcccctgggtgtggacaggcaagaagttctgccccctggcccaggccgtcatcaagcccatccatgacctggacctgcagccctacctgcacaacgtgcccaagaccatggccaagttccaccagctgttcaaggtgtgtggcagcattgaggagctgaccagtgaccacatctccatggtgatccagaagatctacctgaagagtgaccaggacctgtctgagcaggagagcaagcagaacctgcacctgatgctgaacatcatccgctggctgtacagcaaccagatcccagccagccccaacacccctgtgcccatccaccacagcaagaaccccagcaagctgatcatgaagcccatccacgagtgctgctactgtgacatcaaggtggatgacctgaatgacctgctggaggacagcgtggagcccatcatcctggtgcatgaggacatccccatgaagacagctgagtggctgaaggtgccctgcctgagcaccaggctcatcaaccctgagaacatgggctttgagcagagcggccagcgggagcccctgactgtgcgcatcaagaacatcctggaggagtaccccagcgtgtctgacatcttcaaggagctgctgcagaatgctgatgatgccaatgccacagagtgcagcttcctgattgacatgagaagaaacatggacatccgggagaacctgctggaccccggcatggccgcctgccacggccctgccctgtggagcttcaacaacagccagttcagtgacagcgactttgtgaacatcacccggctgggggagagcctgaagagaggagaggtggacaaggtgggcaagtttggcctgggcttcaacagcgtgtaccacatcacagacatccccatcatcatgagccgggagttcatgatcatgtttgaccccaacatcaaccacatcagcaagcacatcaaggacaagagcaaccctggcatcaagatcaactggagcaagcagcagaagaggctgaggaagttccccaaccagttcaagcccttcattgatgtgtttggctgccagctgcccctgactgtggaggccccctacagctacaacggcaccctcttccggctgtccttccgcacccagcaggaggccaaggtgtctgaggtgagcagcacctgctacaacacagctgacatctacagcctggtggatgagttcagcctgtgtggccacaggctcatcatcttcacccagagcgtgaagtccatgtacctgaagtacctgaagattgaggagaccaaccccagcctggcccaggacaccgtcatcatcaagaagaagagctgcagcagcaaggccctgaacacccctgtgctgtctgtgctgaaggaggccgccaagctgatgaagacctgcagcagcagcaacaagaagctgcccagtgatgagcccaagagcagctgcatcctgcagatcaccgtggaggagttccaccacgtgttcagaagaattgctgacctgcagagccccctcttccggggcccagatgatgatcctgctgccctgtttgagatggccaagagcggccagagcaagaagcccagtgatgagctgagccagaagacagtggagtgcaccacctggctgctgtgcacctgcatggacaccggggaggccctgaagttcagcctgtctgagagcggccgccgcctgggcctggtgccctgtggggctgtgggcgtgcagctgtctgagatccaggaccagaagtggacagtgaagccccacatcggggaggtgttctgctacctgcccctgcgcatcaagacaggcctgcctgtgcacatcaatggctgctttgctgtgaccagcaacaggaaggagatctggaagacagacaccaagggccgctggaacaccaccttcatgagacatgtgattgtgaaggcctacctgcaggtgctgtctgtgctgcgggacctggccaccagcggggagctgatggactacacctactatgctgtgtggccagaccctgacctggtgcatgatgacttcagcgtcatctgccagggcttctatgaagatattgcccacggcaagggcaaggagctgaccaaggtgttcagtgatggcagcacctgggtgtccatgaagaatgtgcgcttcctggatgacagcatcctgaagagaagagatgtgggcagcgctgccttcaagatcttcctgaagtacctgaagaagacaggcagcaagaacctgtgtgctgtggagctgcccagctctgtgaagctgggctttgaggaggccggctgcaagcagatcctgctggagaacaccttcagcgagaagcagttcttcagcgaggtgttcttccccaacatccaggagattgaggccgagctgcgggaccccctgatgatctttgtgctgaatgagaaggtggatgagttctctggagtgctgcgggtgaccccctgcatcccctgcagcctggagggccaccccctggtgctgcccagccgcctcatccaccctgagggccgggtggccaagctgtttgacatcaaggatggccgcttcccctacggcagcacccaggactacctgaaccccatcatcctgatcaagctggtgcagctgggcatggccaaggatgacatcctgtgggatgacatgctggagagagctgtgtctgtggccgagatcaacaagagtgaccacgtggccgcctgcctgcggagcagcatcctgctgagcctgattgatgagaagctgaagatccgggacccccgggccaaggactttgctgccaagtaccagaccatccgcttcctgcccttcctgaccaagccagctggcttcagcctggactggaagggcaacagcttcaagccagagaccatgtttgctgccacagacctgtacacagctgagcaccaggacatcgtgtgcctgctgcagcccatcctgaatgaaaacagccacagcttccggggctgcggctctgtgtccctggccgtgaaggagttcctgggcctgctgaagaagcccaccgtggacctggtgatcaaccagctgaaggaggtggccaagtctgtggatgatggcatcaccctgtaccaggagaacatcaccaatgcctgctacaagtacctgcacgaggccctgatgcagaatgagatcaccaagatgagcatcatcgacaagctgaagcccttctccttcatcctggtggagaatgcctacgtggacagcgagaaggtgtccttccacctgaactttgaagctgccccctacctgtaccagctgcccaacaagtacaagaacaacttccgggagctgtttgagaccgtgggcgtgcggcagagctgcaccgtggaggactttgccctggtgctggagagcattgaccaggagcggggcaccaagcagatcacagaggagaacttccagctgtgccgccgcatcatcagcgagggcatctggagcctcatccgggagaagaagcaggagttctgtgagaagaactacggcaagatcctgctgcctgacaccaacctgatgctgctgcctgccaagagcctgtgctacaatgactgcccctggatcaaggtgaaggacaccaccgtgaagtactgccacgccgacatcccccgggaggtggccgtgaagctgggcgctgtgcccaagaggcacaaggccctggagagatatgccagcaatgtgtgcttcaccaccctgggcacagaatttggccagaaggagaagctgaccagccgcatcaagagcatcctgaatgcctaccccagcgagaaggagatgctgaaggagctgctgcagaatgctgatgatgccaaggccacagagatctgctttgtgtttgacccccggcagcaccctgtggaccgcatctttgatgacaagtgggcccccctgcagggccctgccctgtgtgtgtacaacaaccagcccttcacagaagatgatgtgcggggcatccagaacctgggcaagggcaccaaggagggcaacccctacaagacaggccagtatggcatcggcttcaacagcgtgtaccacatcacagactgccccagcttcatctctggaaatgacatcctgtgcatctttgacccccacgcccgctatgcccctggggccaccagcatcagccctggccgcatgttccgggacctggatgctgacttccgcacccagttcagtgatgtgctggacctgtacctgggcacccacttcaagctggacaactgcaccatgttccgcttccccctgagaaatgctgagatggccaaggtgtctgagatcagctctgtgcctgccagtgacaggatggtgcagaacctgctggacaagctgcggagtgatggagctgagctgctgatgttcctgaaccacatggagaagatcagcatctgtgaaattgacaagagcactggagccctgaatgtgctgtacagcgtgaagggcaagatcacagatggagaccggctgaagaggaagcagttccacgcctctgtgattgattctgtgaccaagaagaggcagctgaaggacatccctgtgcagcagatcacctacaccatggacacagaagattctgagggcaacctgaccacctggctgatctgcaacagaagtggcttcagctccatggagaaggtgtccaagagcgtcatcagcgcccacaagaaccaggacatcaccctcttcccccggggcggcgtggccgcctgcatcacccacaactacaagaagccccaccgggccttctgcttcctgcccctgagcctggagaccggcctgcccttccacgtgaatggccactttgccctggacagcgcccggaggaacctgtggagagatgacaatggagtgggcgtgcggagtgactggaacaacagcctgatgacagccctgattgccccagcctacgtggagctgctgatccagctgaagaagcgctacttccctggcagtgaccccaccctgtctgtgctgcagaacacccccatccacgtggtgaaggacaccctgaagaagttcctgtccttcttccctgtgaaccggctggacctgcagcctgacctgtactgcctggtgaaggccctgtacaactgcatccacgaggacatgaagaggctgctgcctgtggtgcgggcccccaacattgatggcagtgacctgcacagcgctgtgatcatcacctggatcaacatgagcaccagcaacaagacccggcccttctttgacaacctgctgcaggatgagctgcagcacctgaagaatgctgactacaacatcaccaccaggaagacagtggctgaaaatgtgtaccgcctgaagcacctgctgctggagatcggcttcaacctggtgtacaactgtgatgaaacagccaacctgtaccactgcctgattgatgctgacatccctgtgtcctatgtgaccccagctgacatccgctccttcctgatgaccttcagcagcccagacaccaactgccacatcggcaagctgccctgccgcctgcagcagaccaacctgaagctgttccacagcctgaagctgctggtggactactgcttcaaggatgctgaagaaaatgaaattgaggtggagggcctgcccctgctgatcaccctggacagcgtgctgcagacctttgatgccaagaggcccaagttcctgaccacctaccacgagctgatccccagcaggaaggacctcttcatgaacaccctgtacctgaagtacagcaacatcctgctgaactgcaaggtggccaaggtgtttgacatcagcagctttgctgacctgctgagctctgtgctgccccgggagtacaagaccaagagctgcaccaagtggaaggacaactttgccagcgagagctggctgaagaatgcctggcacttcatcagcgagagcgtgtctgtgaaggaggaccaggaggagaccaagcccacctttgacatcgtggtggacaccctgaaggactgggccctgctgcccggcaccaagttcaccgtgtctgccaaccagctggtggtgcctgaaggagatgtgctgctgcccctgagcctgatgcacatcgctgtgttccccaatgcccagagcgacaaggtgttccacgccctgatgaaggccggctgcatccagctggccctgaacaagatctgcagcaaggacagcgcctttgtgcccctgctgagctgccacacagccaacatcgagagccccaccagcatcctgaaggccctgcactacatggtgcagaccagcaccttccgggcagagaagctggtggagaatgactttgaggccctgctgatgtacttcaactgcaacctgaaccacctgatgagccaggatgacatcaagatcctgaagagcctgccctgctacaagagcatcagcggccgctacgtgtccatcggcaagtttggcacctgctacgtgctgaccaagagcatccccagcgctgaggtggagaagtggacccagagcagcagcagcgccttcctggaggagaagatccacctgaaggagctgtatgaagtcatcggctgtgtgcctgtggatgacctggaggtgtacctgaagcacctgctgcccaagattgagaacctgtcctatgatgccaagctggagcacctgatctacctgaagaaccggctgagcagcgctgaggagctgtctgagatcaaggagcagctgtttgagaagctggagagcctgctgatcatccatgatgccaacagccggctgaagcaggccaagcacttctatgacagaacagtgcgggtgtttgaggtgatgctgcctgagaagctgttcatccccaatgacttcttcaagaagctggagcagctgatcaagcccaagaaccacgtgaccttcatgacctcctgggtggagttcctgagaaatattggcctgaagtacatcctgagccagcagcagctgctgcagtttgccaaggagatctctgtgcgggccaacacagagaactggagcaaggagaccctgcagaacacagtggacatcctgctgcaccacatcttccaggagaggatggacctgctgagcggcaacttcctgaaggagctgagcctcatccccttcctgtgcccagagcgggccccagctgagttcatccgcttccacccccagtaccaggaggtgaatggcaccctgcccctcatcaagttcaatggagcccaggtgaaccccaagttcaagcagtgtgatgtgctgcagctgctgtggaccagctgccccatcctgcctgagaaggccacccccctgagcatcaaggagcaggagggcagtgacctgggcccccaggagcagctggagcaggtgctgaacatgctgaatgtgaacctggacccccccctggacaaggtgatcaacaactgcaggaacatctgcaacatcaccaccctggatgaggagatggtgaagacccgggccaaggtgctgcggagcatctatgagttcctgtctgctgagaagcgggagttccgcttccagctgcggggcgtggcctttgtgatggtggaggatggctggaagctgctgaagccagaggaggtggtgatcaacctggagtatgaaagtgacttcaagccctacctgtacaagctgcccctggagctgggcaccttccaccagctgttcaagcacctgggcacagaggacatcatcagcaccaagcagtatgtggaggtgctgagccgcatcttcaagaacagcgagggcaagcagctggaccccaatgagatgaggacagtgaagagggtggtgtctggcctcttccgcagcctgcagaatgacagcgtgaaggtgcggagtgacctggagaatgtgcgggacctggccctgtacctgcccagccaggacggccgcctggtgaagagcagcatcctggtgtttgatgatgccccccactacaagagccgcatccagggcaacatcggcgtgcagatgctggtggacctgagccagtgctacctgggcaaggaccacggcttccacaccaagctgatcatgctgttcccccagaagctgcggccccggctgctgagcagcatcctggaggagcagctggatgaggagacccccaaggtgtgccagtttggagccctgtgcagcctgcagggccgcctgcagctgctgctgagcagcgagcagttcatcaccggcctcatccgcatcatgaagcatgaaaatgacaatgccttcctggccaatgaggagaaggccatccggctgtgcaaggccctgcgggagggcctgaaggtgtcctgctttgagaagctgcagaccaccctgcgggtgaagggcttcaaccccatcccccacagccgctctgagacctttgccttcctgaagagatttggaaatgctgtgatcctgctgtacatccagcacagcgacagcaaggacatcaacttcctgctggccctggccatgaccctgaagagcgccacagacaacctgatcagtgacaccagctacctgattgccatgctgggctgcaatgacatctaccgcatcggggagaagctggacagcctgggcgtgaagtatgacagcagcgagcccagcaagctggagctgcccatgcctggcacccccatcccagctgagatccactacaccctgctgatggaccccatgaatgtgttctacccaggagaatatgtgggctacctggtggatgctgagggcggggacatctacggcagctaccagcccacctacacctacgccatcatcgtgcaggaggtggagagagaagatgctgacaacagcagcttcctgggcaagatctaccagattgatattggctacagcgagtacaagatcgtgagcagcctggacctgtacaagttcagcaggcctgaggagagcagccagagccgggacagcgcccccagcacccccaccagccccacagagttcctgaccccaggcctgcggagcatccccccactcttcagcggccgggagagccacaagaccagcagcaagcaccagagccccaagaagctgaaggtgaacagcctgcctgagatcctgaaggaggtgacctctgtggtggagcaggcctggaagctgcctgagagcgagaggaagaagatcatccggcggctgtacctgaagtggcacccagacaagaacccagaaaatcatgacatcgccaatgaggtgttcaagcacctgcagaatgagatcaaccggctggagaagcaggccttcctggaccagaatgctgaccgggccagcaggaggaccttcagcaccagcgccagccgcttccagagcgacaagtacagcttccagcgcttctacacctcctggaaccaggaggccaccagccacaagtctgagcggcagcagcagaacaaggagaagtgccccccatctgctggccagacctacagccagcgcttctttgtgccccccaccttcaagtctgtgggcaaccctgtggaggcccggcgctggctgcggcaggcccgggccaacttctctgctgccagaaatgacctgcacaagaatgccaatgagtgggtgtgcttcaagtgctacctgagcaccaagctggccctgattgctgctgactatgctgtgcggggcaagagtgacaaggatgtgaagcccacagccctggcccagaagattgaggagtacagccagcagctggagggcctgaccaatgatgtgcacaccctggaggcctatggagtggacagcctgaagacccgctacccagacctgctgcccttcccccagatccccaatgaccgcttcaccagcgaggtggccatgagggtgatggagtgcacagcctgcatcatcatcaagctggagaacttcatgcagcagaaggtgtag

SEQ ID NO: 171250 - DNA, 13740 bp, synthetic construct; identical to SEQ ID NO: 171249
  misc_feature 1..13740: note = Description of Artificial Sequence: Synthetic coding sequence
  source 1..13740: mol_type = other DNA

SEQ ID NO: 171251 - DNA, 11490 bp, synthetic construct
  misc_feature 1..11490: note = Description of Artificial Sequence: Synthetic coding sequence
  source 1..11490: mol_type = other DNA
atgaacaccttctggccaggccgggagctgattgtgcagtggtacccctttgatgaaaatagaaaccaccccagcgtgtcctggctgaagatggtgtggaagaacctgtacatccacttcagcgaggacctgaccctgtttgatgagatgcccctcatccccaggaccatcctggaggagggccagacctgtgtggagctgatccggctgcgcatccccagcctggtgatcctggatgatgagagcgaggcccagctgcctgagttcctggccgacatcgtgcagaagctgggcggctttgtgctgaagaagctggatgccagcatccagcaccccctcatcaagaagtacatccacagccccctgcccagcgctgtgctgcagatcatggagaagatgcccctgcagaagctgtgcaaccagatcaccagcctgctgcccacccacaaggatgccctgaggaagttcctggccagcctgacagacagcagcgagaaggagaagaggatcatccaggagctggccatcttcaagaggatcaaccacagcagtgaccagggcatcagcagctacaccaagctgaagggctgcaaggtgctgcaccacacagccaagctgcctgctgacctgcggctgagcatctctgtgattgacagcagtgatgaggccaccatccggctggccaacatgctgaagattgagcagctgaagaccaccagctgcctgaagctggtgctgaaggacattgaaaatgccttctacagccatgaggaggtgacccagctgatgctgtgggtgctggagaacctgagcagcctgaagaatgaaaaccccaacgtgctggagtggctgacccccctgaagttcatccagatcagccaggagcagatggtgtctgctggggagctgtttgatcctgacatcgaggtgctgaaggacctcttctgcaatgaggagggcacctacttcccccccagcgtcttcaccagcccagacatcctgcacagcctgcggcagatcggcctgaagaatgaggccagcctgaaggagaaggatgtggtgcaggtggccaagaagattgaggccctgcaggtgggcgcctgcccagaccaggatgtgctgctgaagaaggccaagaccctgctgctggtgctgaacaagaaccacaccctgctgcagagcagcgagggcaagatgaccctgaagaagatcaagtgggtgcctgcctgcaaggagcggccccccaactacccaggcagcctggtgtggaagggggacctgtgcaacctgtgtgcccccccagacatgtgtgatgtgggccacgccatcctgattggcagcagcctgcccctggtggagagcatccacgtgaacctggagaaggccctgggcatcttcaccaagcccagcctgtctgctgtgctgaagcacttcaagatcgtggtggactggtacagcagcaagaccttcagtgatgaggactactaccagttccagcacatcctgctggagatctacggcttcatgcatgaccacctgaatgaaggcaaggacagcttccgggccctgaagttcccctgggtgtggacaggcaagaagttctgccccctggcccaggccgtcatcaagcccatccatgacctggacctgcagccctacctgcacaacgtgcccaagaccatggccaagttccaccagctgttcaaggtgtgtggcagcattgaggagctgaccagtgaccacatctccatggtgatccagaagatctacctgaagagtgaccaggacctgtctgagcaggagagcaagcagaacctgcacctgatgctgaacatcatccgctggctgtacagcaaccagatcccagccagccccaacacccctgtgcccatccaccacagcaagaaccccagcaagctgatcatgaagcccatccacgagtgctgctactgtgacatcaaggtggatgacctgaatgacctgctggaggacagcgtggagcccatcatcctggtgcatgaggacatccccatgaagacagctgagtggctgaaggtgccctgcctgagcaccaggctcatcaaccctgagaacatgggctttgagcagagcggccagcgggagcccctgactgtgcgcatcaagaacatcctggaggagtaccccagcgtgtctgacatcttcaaggagctgctgcagaatgctgatgatgccaatgccacagagtgcagcttcctgattgacatgagaagaaacatggacatccgggagaacctgctggaccccggcatggccgcctgccacggccctgccctgtggagcttcaacaacagccagttcagtgacagcgactttgtgaacatcacccggctgggggagagcctgaagagaggagaggtggacaaggtgggcaagtttggcctgggcttcaacagcgtgtaccacatcacagacatccccatcatcatgagccgggagttcatgatcatgtttgaccccaacatcaaccacatcagcaagcacatcaaggacaagagcaaccctggcatcaagatcaactggagcaagcagcagaagaggctgaggaagttccccaaccagttcaagcccttcattgatgtgtttggctgccagctgcccctgactgtggaggccccctacagctacaacggcaccctcttccggctgtccttccgcacccagcaggaggccaaggtgtctgaggtgagcagcacctgctacaacacagctgacatctacagcctggtggatgagttcagcctgtgtggccacaggctcatcatcttcacccagagcgtgaagtccatgtacctgaagtacctgaagattgaggagaccaaccccagcctggcccaggacaccgtcatcatcaagaagaagagctgcagcagcaaggccctgaacacccctgtgctgtctgtgctgaaggaggccgccaagctgatgaagacctgcagcagcagcaacaagaagctgcccagtgatgagcccaagagcagctgcatcctgcagatcaccgtggaggagttccaccacgtgttcagaagaattgctgacctgcagagccccctcttccggggcccagatgatgatcctgctgccctgtttgagatggccaagagcggccagagcaagaagcccagtgatgagctgagccagaagacagtggagtgcaccacctggctgctgtgcacctgcatggacaccggggaggccctgaagttcagcctgtctgagagcggccgccgcctgggcctggtgccctgtggggctgtgggcgtgcagctgtctgagatccaggaccagaagtggacagtgaagccccacatcggggaggtgttctgctacctgcccctgcgcatcaagacaggcctgcctgtgcacatcaatggctgctttgctgtgaccagcaacaggaaggagatctggaagacagacaccaagggccgctggaacaccaccttcatgagacatgtgattgtgaaggcctacctgcaggtgctgtctgtgctgcgggacctggccaccagcggggagctgatggactacacctactatgctgtgtggccagaccctgacctggtgcatgatgacttcagcgtcatctgccagggcttctatgaagatattgcccacggcaagggcaaggagctgaccaaggtgttcagtgatggcagcacctgggtgtccatgaagaatgtgcgcttcctggatgacagcatcctgaagagaagagatgtgggcagcgctgccttcaagatcttcctgaagtacctgaagaagacaggcagcaagaacctgtgtgctgtggagctgcccagctctgtgaagctgggctttgaggaggccggctgcaagcagatcctgctggagaacaccttcagcgagaagcagttcttcagcgaggtgttcttccccaacatccaggagattgaggccgagctgcgggaccccctgatgatctttgtgctgaatgagaaggtggatgagttctctggagtgctgcgggtgaccccctgcatcccctgcagcctggagggccaccccctggtgctgcccagccgcctcatccaccctgagggccgggtggccaagctgtttgacatcaaggatggccgcttcccctacggcagcacccaggactacctgaaccccatcatcctgatcaagctggtgcagctgggcatggccaaggatgacatcctgtgggatgacatgctggagagagctgtgtctgtggccgagatcaacaagagtgaccacgtggccgcctgcctgcggagcagcatcctgctgagcctgattgatgagaagctgaagatccgggacccccgggccaaggactttgctgccaagtaccagaccatccgcttcctgcccttcctgaccaagccagctggcttcagcctggactggaagggcaacagcttcaagccagagaccatgtttgctgccacagacctgtacacagctgagcaccaggacatcgtgtgcctgctgcagcccatcctgaatgaaaacagccacagcttccggggctgcggctctgtgtccctggccgtgaaggagttcctgggcctgctgaagaagcccaccgtggacctggtgatcaaccagctgaaggaggtggccaagtctgtggatgatggcatcaccctgtaccaggagaacatcaccaatgcctgctacaagtacctgcacgaggccctgatgcagaatgagatcaccaagatgagcatcatcgacaagctgaagcccttctccttcatcctggtggagaatgcctacgtggacagcgagaaggtgtccttccacctgaactttgaagctgccccctacctgtaccagctgcccaacaagtacaagaacaacttccgggagctgtttgagaccgtgggcgtgcggcagagctgcaccgtggaggactttgccctggtgctggagagcattgaccaggagcggggcaccaagcagatcacagaggagaacttccagctgtgccgccgcatcatcagcgagggcatctggagcctcatccgggagaagaagcaggagttctgtgagaagaactacggcaagatcctgctgcctgacaccaacctgatgctgctgcctgccaagagcctgtgctacaatgactgcccctggatcaaggtgaaggacaccaccgtgaagtactgccacgccgacatcccccgggaggtggccgtgaagctgggcgctgtgcccaagaggcacaaggccctggagagatatgccagcaatgtgtgcttcaccaccctgggcacagaatttggccagaaggagaagctgaccagccgcatcaagagcatcctgaatgcctaccccagcgagaaggagatgctgaaggagctgctgcagaatgctgatgatgccaaggccacagagatctgctttgtgtttgacccccggcagcaccctgtggaccgcatctttgatgacaagtgggcccccctgcagggccctgccctgtgtgtgtacaacaaccagcccttcacagaagatgatgtgcggggcatccagaacctgggcaagggcaccaaggagggcaacccctacaagacaggccagtatggcatcggcttcaacagcgtgtaccacatcacagactgccccagcttcatctctggaaatgacatcctgtgcatctttgacccccacgcccgctatgcccctggggccaccagcatcagccctggccgcatgttccgggacctggatgctgacttccgcacccagttcagtgatgtgctggacctgtacctgggcacccacttcaagctggacaactgcaccatgttccgcttccccctgagaaatgctgagatggccaaggtgtctgagatcagctctgtgcctgccagtgacaggatggtgcagaacctgctggacaagctgcggagtgatggagctgagctgctgatgttcctgaaccacatggagaagatcagcatctgtgaaattgacaagagcactggagccctgaatgtgctgtacagcgtgaagggcaagatcacagatggagaccggctgaagaggaagcagttccacgcctctgtgattgattctgtgaccaagaagaggcagctgaaggacatccctgtgcagcagatcacctacaccatggacacagaagattctgagggcaacctgaccacctggctgatctgcaacagaagtggcttcagctccatggagaaggtgtccaagagcgtcatcagcgcccacaagaaccaggacatcaccctcttcccccggggcggcgtggccgcctgcatcacccacaactacaagaagccccaccgggccttctgcttcctgcccctgagcctggagaccggcctgcccttccacgtgaatggccactttgccctggacagcgcccggaggaacctgtggagagatgacaatggagtgggcgtgcggagtgactggaacaacagcctgatgacagccctgattgccccagcctacgtggagctgctgatccagctgaagaagcgctacttccctggcagtgaccccaccctgtctgtgctgcagaacacccccatccacgtggtgaaggacaccctgaagaagttcctgtccttcttccctgtgaaccggctggacctgcagcctgacctgtactgcctggtgaaggccctgtacaactgcatccacgaggacatgaagaggctgctgcctgtggtgcgggcccccaacattgatggcagtgacctgcacagcgctgtgatcatcacctggatcaacatgagcaccagcaacaagacccggcccttctttgacaacctgctgcaggatgagctgcagcacctgaagaatgctgactacaacatcaccaccaggaagacagtggctgaaaatgtgtaccgcctgaagcacctgctgctggagatcggcttcaacctggtgtacaactgtgatgaaacagccaacctgtaccactgcctgattgatgctgacatccctgtgtcctatgtgaccccagctgacatccgctccttcctgatgaccttcagcagcccagacaccaactgccacatcggcaagctgccctgccgcctgcagcagaccaacctgaagctgttccacagcctgaagctgctggtggactactgcttcaaggatgctgaagaaaatgaaattgaggtggagggcctgcccctgctgatcaccctggacagcgtgctgcagacctttgatgccaagaggcccaagttcctgaccacctaccacgagctgatccccagcaggaaggacctcttcatgaacaccctgtacctgaagtacagcaacatcctgctgaactgcaaggtggccaaggtgtttgacatcagcagctttgctgacctgctgagctctgtgctgccccgggagtacaagaccaagagctgcaccaagtggaaggacaactttgccagcgagagctggctgaagaatgcctggcacttcatcagcgagagcgtgtctgtgaaggaggaccaggaggagaccaagcccacctttgacatcgtggtggacaccctgaaggactgggccctgctgcccggcaccaagttcaccgtgtctgccaaccagctggtggtgcctgaaggagatgtgctgctgcccctgagcctgatgcacatcgctgtgttccccaatgcccagagcgacaaggtgttccacgccctgatgaaggccggctgcatccagctggccctgaacaagatctgcagcaaggacagcgcctttgtgcccctgctgagctgccacacagccaacatcgagagccccaccagcatcctgaaggccctgcactacatggtgcagaccagcaccttccgggcagagaagctggtggagaatgactttgaggccctgctgatgtacttcaactgcaacctgaaccacctgatgagccaggatgacatcaagatcctgaagagcctgccctgctacaagagcatcagcggccgctacgtgtccatcggcaagtttggcacctgctacgtgctgaccaagagcatccccagcgctgaggtggagaagtggacccagagcagcagcagcgccttcctggaggagaagatccacctgaaggagctgtatgaagtcatcggctgtgtgcctgtggatgacctggaggtgtacctgaagcacctgctgcccaagattgagaacctgtcctatgatgccaagctggagcacctgatctacctgaagaaccggctgagcagcgctgaggagctgtctgagatcaaggagcagctgtttgagaagctggagagcctgctgatcatccatgatgccaacagccggctgaagcaggccaagcacttctatgacagaacagtgcgggtgtttgaggtgatgctgcctgagaagctgttcatccccaatgacttcttcaagaagctggagcagctgatcaagcccaagaaccacgtgaccttcatgacctcctgggtggagttcctgagaaatattggcctgaagtacatcctgagccagcagcagctgctgcagtttgccaaggagatctctgtgcgggccaacacagagaactggagcaaggagaccctgcagaacacagtggacatcctgctgcaccacatcttccaggagaggatggacctgctgagcggcaacttcctgaaggagctgagcctcatccccttcctgtgcccagagcgggccccagctgagttcatccgcttccacccccagtaccaggaggtgaatggcaccctgcccctcatcaagttcaatggagcccaggtgaaccccaagttcaagcagtgtgatgtgctgcagctgctgtggaccagctgccccatcctgcctgagaaggccacccccctgagcatcaaggagcaggagggcagtgacctgggcccccaggagcagctggagcaggtgctgaacatgctgaatgtgaacctggacccccccctggacaaggtgatcaacaactgcaggaacatctgcaacatcaccaccctggatgaggagatggtgaagacccgggccaaggtgctgcggagcatctatgagttcctgtctgctgagaagcgggagttccgcttccagctgcggggcgtggcctttgtgatggtggaggatggctggaagctgctgaagccagaggaggtggtgatcaacctggagtatgaaagtgacttcaagccctacctgtacaagctgcccctggagctgggcaccttccaccagctgttcaagcacctgggcacagaggacatcatcagcaccaagcagtatgtggaggtgctgagccgcatcttcaagaacagcgagggcaagcagctggaccccaatgagatgaggacagtgaagagggtggtgtctggcctcttccgcagcctgcagaatgacagcgtgaaggtgcggagtgacctggagaatgtgcgggacctggccctgtacctgcccagccaggacggccgcctggtgaagagcagcatcctggtgtttgatgatgccccccactacaagagccgcatccagggcaacatcggcgtgcagatgctggtggacctgagccagtgctacctgggcaaggaccacggcttccacaccaagctgatcatgctgttcccccagaagctgcggccccggctgctgagcagcatcctggaggagcagctggatgaggagacccccaaggtgtgccagtttggagccctgtgcagcctgcagggccgcctgcagctgctgctgagcagcgagcagttcatcaccggcctcatccgcatcatgaagcatgaaaatgacaatgccttcctggccaatgaggagaaggccatccggctgtgcaaggccctgcgggagggcctgaaggtgtcctgctttgagaagctgcagaccaccctgcgggtgaagggcttcaaccccatcccccacagccgctctgagacctttgccttcctgaagagatttggaaatgctgtgatcctgctgtacatccagcacagcgacagcaaggacatcaacttcctgctggccctggccatgaccctgaagagcgccacagacaacctgatcagtgacaccagctacctgattgccatgctgggctgcaatgacatctaccgcatcggggagaagctggacagcctgggcgtgaagtatgacagcagcgagcccagcaagctggagctgcccatgcctggcacccccatcccagctgagatccactacaccctgctgatggaccccatgaatgtgttctacccaggagaatatgtgggctacctggtggatgctgagggcggggacatctacggcagctaccagcccacctacacctacgccatcatcgtgcaggaggtggagagagaagatgctgacaacagcagcttcctgggcaagatctaccagattgatattggctacagcgagtacaagatcgtgagcagcctggacctgtacaagttcagcaggcctgaggagagcagccagagccgggacagcgcccccagcacccccaccagccccacagagttcctgaccccaggcctgcggagcatccccccactcttcagcggccgggagagccacaagaccagcagcaagcaccagagccccaagaagctgaaggtgaacagcctgcctgagatcctgaaggaggtgacctctgtggtggagcaggcctggaagctgcctgagagcgagaggaagaagatcatccggcggctgtacctgaagtggcacccagacaagaacccagaaaatcatgacatcgccaatgaggtgttcaagcacctgcagaatgagatcaaccggctggagaagcaggccttcctggaccagaatgctgaccgggccagcaggaggaccttcagcaccagcgccagccgcttccagagcgacaagtacagcttccagcgcttctacacctcctggaaccaggaggccaccagccacaagtctgagcggcagcagcagaacaaggagaagtgccccccatctgctggccagacctacagccagcgcttctttgtgccccccaccttcaagtctgtgggcaaccctgtggaggcccggcgctggctgcggcaggcccgggccaacttctctgctgccagaaatgacctgcacaagaatgccaatgagtgggtgtgcttcaagtgctacctgagcaccaagctggccctgattgctgctgactatgctgtgcggggcaagagtgacaaggatgtgaagcccacagccctggcccagaagattgaggagtacagccagcagctggagggcctgaccaatgatgtgcacaccctggaggcctatggagtggacagcctgaagacccgctacccagacctgctgcccttcccccagatccccaatgaccgcttcaccagcgaggtggccatgagggtgatggagtgcacagcctgcatcatcatcaagctggagaacttcatgcagcagaaggtgtag

SEQ ID NO: 171252 - DNA, 7332 bp, synthetic construct
  misc_feature 1..7332: note = Description of Artificial Sequence: Synthetic coding sequence
  source 1..7332: mol_type = other DNA
atggctgctgaggagggcgtggccagcgctgccagcgctgggggctcctggggcacagctgccatgggccgggtgctgcccatgctgctggtgcctgtgcctgctgaggccatgggccagctgggcagccgggcccagctgcggacccagcctgaggccctgggcagcctgacagctgctggcagcctgcaggtgctgagcctgaccccaggcagccggggcggcggccgctgctgcctggagggccccttctggcacttcctgtgggaggacagcaggaacagcagcacccccacagagaagcccaagctgctggccctgggagaaaattatgagctgctgatctatgagttcaacctgaaggatggccgctgtgatgccaccatcctgtacagctgcagccgggaggccctgcagaagctgattgatgaccaggacatcagcatcagcctgctgagcctgcgcatcctgtccttccacaacaacaccagcctgctcttcatcaacaagtgtgtgatcctgcacatcatcttccctgagagagatgctgccatccgggtgctgaactgcttcaccctgcccctgcctgcccaggccgtggacatgatcatcgacacccagctgtgccggggcatcctgtttgtgctgagcagcctgggctggatctacatctttgatgtggtggatggcacctacgtggcccacgtggacctggccctgcacaaggaggacatgtgcaatgagcagcagcaggagcccgccaagatcagcagcttcaccagcctgaaggtgtcccaggacctggatgtggccgtgattgtgagcagcagcaacagcgctgtggccctgaacctgaacctgtacttccggcagcaccctggccacctgctgtgtgagcgcatcctggaggacctgcccatccagggccccaagggcgtggatgaagatgatcctgtgaacagcgcctacaacatgaagctggccaagttctccttccagattgaccgctcctggaaggcccagctgagcagcctgaatgagaccatcaagaacagcaagctggaggtgtcctgctgtgccccctggttccaggacatcctgcacctggagagccctgagagcggcaaccacagcacctctgtgcagagctgggccttcatcccccaggacatcatgcacggccagtacaacgtgctgcagaaggaccacgccaagaccagtgaccccggccgctcctggaagatcatgcacatcagcgagcaggaggagcccatcgagctgaagtgtgtgtctgtgacaggcttcaccgccctcttcacctgggaggtggagaggatgggctacaccatcaccctgtgggacctggagacccagggcatgcagtgcttcagcctgggcaccaagtgcatccctgtggacagcagcggggaccagcagctgtgctttgtgctgacagaaaatggcctgagcctcatcctgtttggcctgacccaggaggagttcctgaaccggctgatgatccacggcagcgccagcacagtggacaccctgtgccacctgaatggctggggccgctgcagcatccccatccacgccctggaggccggcatcgagaaccggcagctggacacagtgaacttcttcctgaagagcaaagaaaatctcttcaaccccagcagcaagagctctgtgtctgaccagtttgaccacctgagcagccacctgtacctgagaaatgtggaggagctgatcccagccctggacctgctgtgcagcgccatccgggagagctacagcgagccccagagcaagcacttcagcgagcagctgctgaacctgaccctgtccttcctgaacaaccagatcaaggagctgttcatccacacagaggagctggatgagcacctgcagaagggcgtgaacatcctgaccagctacatcaatgagctgcggaccttcatgatcaagttcccctggaagctgacagatgccattgatgaatatgatgtgcatgaaaatgtgcccaaggtgaaggagagcaacatctggaagaagctgagctttgaggaggtgattgccagcgccatcctgaacaacaagatccctgaggcccagaccttcttcagaattgacagccacagcgcccagaagctggaggagctgattggcatcggcctgaacctggtgtttgacaacctgaagaagaacaacatcaaggaggccagcgagctgctgaagaacatgggctttgatgtgaagggccagctgctgaagatctgcttctacaccaccaacaagaacatccgggacttcctggtggagatcctgaaggagaagaactacttcagcgagaaggagaagaggaccatcgactttgtgcaccaggtggagaagctgtacctgggccacttccaggagaacatgcagatccagagcttcccccgctactggatcaaggagcaggacttcttcaagcacaagtctgtgctggacagcttcctgaagtatgactgcaaggatgagttcaacaagcaggaccacagaattgtgctgaactgggccctgtggtgggaccagctgacccaggagagcatcctgctgccccgcatcagccctgaggagtacaagagctacagccctgaggccctgtggagatacctgacagcccggcatgactggctgaacatcatcctgtggattggagagttccagacccagcacagctatgccagcctgcagcagaacaagtggcccctgctgactgtggatgtgatcaaccagaacaccagctgcaacaactacatgagaaatgagatcctggacaagctggccagaaatggagtcttcctggccagcgagctggaggactttgagtgcttcctgctgcggctgagcagaattggaggagtcatccaggacaccctgcctgtgcagaactacaagaccaaggagggctgggacttccacagccagttcatcctgtactgcctggagcacagcctgcagcacctgctgtatgtgtacctggactgctacaagctgagccctgagaactgccccttcctggagaagaaggagctgcacgaggcccacccctggtttgagttcctggtgcagtgccggcaggtggccagcaacctgacagaccccaagctgatcttccaggccagcctggccaatgcccagatcctgatccccaccaaccaggcctctgtgtcctccatgctgctggagggccacaccctgctggccctggccaccaccatgtacagccctgggggcgtgtcccaggtggtgcagaatgaagaaaatgaaaactgcctgaagaaggtggacccccagctgctgaagatggccctgaccccctaccccaagctgaagacagccctcttcccccagtgcaccccacccagcgtgctgcccagcgacatcaccatctaccacctgatccagagcctgagcccctttgaccccagccggctgtttggctggcagagcgccaacaccctggccatcggagatgcctggagccacctgccccacttcagcagcccagacctggtgaacaagtatgccatcgtggagcggctgaactttgcctactacctgcacaacggccggcccagctttgccttcggcaccttcctggtgcaggagctgatcaagagcaagacccccaagcagctgatccagcaggtgggcaatgaggcctacgtgattggcctgagcagcttccacatccccagcatcggggccgcctgtgtgtgcttcctggagctgctgggcctggacagcctgaagctgcgggtggacatgaaggtggccaacatcatcctgagctacaagtgcagaaatgaagatgcccagtacagcttcatccgggagagcgtggccgagaagctgagcaagctggctgatggagagaagaccaccacagaggagctgctggtgctgctggaggagggcacctggaacagcatccagcagcaggagatcaagaggctgagcagcgagagcagcagccagtgggccctggtggtgcagttctgccgcctgcacaacatgaagctgagcatctcctacctgcgggagtgtgccaaggccaatgactggctgcagttcatcatccacagccagctgcacaactaccaccctgctgaggtgaagagcctcatccagtacttcagccctgtgatccaggaccacctgcggctggcctttgagaacctgcccagcgtgcccaccagcaagatggacagcgaccaggtgtgcaacaagtgcccccaggagctgcagggcagcaagcaggagatgacagacctgtttgagatcctgctgcagtgcagcgaggagccagacagctggcactggctgctggtggaggccgtgaagcagcaggcccccatcctgtctgtgctggccagctgcctgcagggcgccagcgccatcagctgcctgtgtgtgtggatcatcacctctgtggaggacaacgtggccacagaggccatgggccacatccaggacagcacagaggaccacacctggaacctggaggacctgagcgtcatctggaggaccctgctgacccggcagaagagcaagaccctcatccggggcttccagctgttcttcaaggacagccccctgctgctggtgatggagatgtatgagctgtgcatgttcttcaggaactacaaggaggccgaggccaagctgctggagttccagaagagcctggagaccctgaacacagctgccaccaaggtgcaccctgtgatcccagccatgtggctggaggaccaggtgtgcttcctgctgaagctgatgctgcagcagtgcaagacccagtatgagctgggcaagctgctgcagctgtttgtggagcgggagcacctgttcagtgatggcccagatgtgaagaagctgtgcatcctgtgccagatcctgaaggacaccagcatcgccatcaaccacaccatcatcaccagctacagcattgagaacctgcagcacgagtgccgcagcatcctggagcggctgcagacagatggccagtttgccctggcccggcgggtggccgagctggccgagctgcctgtggacaacctggtgatcaaggagatcacccaggagatgcagaccctgaagcacatcgagcagtggagcctgaagcaggccagaattgacttctggaagaagtgccacgagaacttcaagaagaacagcatcagcagcaaggccgccagcagcttcttcagcacccaggcccacgtggcctgtgagcaccccaccggctggagctccatggaggagcggcacctgctgctgaccctggccggccactggctggcccaggaggatgtggtgcccctggacaagctggaggagctggagaagcagatctggctgtgccgcatcacccagcacaccctgggcaggaaccaggaggagacagagccccgcttcagccggcagatcagcaccagcggggagctgagctttgacagcctggccagcgagttctccttcagcaagctggccgccctgaacaccagcaagtacctggagctgaacagcctgcccagcaaggagacctgtgaaaatcggctggactggaaggagcaggagagcctgaacttcctgattggccgcctgctggatgatggctgtgtgcatgaggccagccgggtgtgccgctacttccacttctacaacccagatgtggccctggtgctgcactgccgggccctggccagcggggaggcctccatggaggacctgcaccctgagatccacgccctgctgcagagcgctgagctgctggaggaggaggccccagacatccccctgcggcgggtgcacagcaccagcagcctggacagccagaagtttgtgacagtgcccagcagcaatgaggtggtgaccaacctggaggtgctgaccagcaagtgcctgcacggcaagaactactgccggcaggtgctgtgcctgtatgacctggccaaggagctgggctgcagctacacagatgtggccgcccaggatggagaggccatgctgaggaagatcctggccagccagcagcctgaccgctgcaagagggcccaggccttcatcagcacccagggcctgaagccagacacagtggccgagctggtggccgaggaggtgacccgggagctgctgaccagcagccagggcaccggccacaagcagatgttcaaccccacagaggagagccagaccttcctgcagctgaccaccctgtgccaggacaggaccctggtgggcatgaagctgctggacaagatcagctctgtgccccatggagagctgagctgcaccacagagctgctgatcctggcccaccactgcttcaccctgacctgccacatggagggcatcatccgggtgctgcaggccgcccacatgctgacagacaaccacctggcccccagcgaggagtatggcctggtggtgcggctgctgaccggcatcggccgctacaatgagatgacctacatctttgacctgctgcacaagaagcactactttgaggtgctgatgaggaagaagctggaccccagcggcaccctgaagacagccctgctggactacatcaagcgctgcaggcctggggacagcgagaagcacaacatgattgccctgtgcttctccatgtgccgggagattggagaaaatcatgaagctgctgcccgcatccagctgaagctgattgagagccagccctgggaggacagcctgaaggatggccaccagctgaagcagctgctgctgaaggccctgaccctgatgctggatgctgctgagagctatgccaaggacagctgtgtgcggcaggcccagcactgccagaggctgaccaagctgatcaccctgcagatccacttcctgaacacaggccagaacaccatgctgatcaacctgggccgccacaagctgatggactgcatcctggccctgccccgcttctaccaggccagcatcgtggccgaggcctatgactttgtgcctgactgggccgagatcctgtaccagcaggtgatcctgaagggggacttcaactacctggaggagttcaagcagcagaggctgctgaagagcagcatctttgaggagatcagcaagaagtacaagcagcaccagcccacagacatggtgatggagaacctgaagaagctgctgacctactgtgaagatgtgtacctgtactacaagctggcctatgagcacaagttctatgaaattgtgaatgtgctgctgaaggacccccagacaggctgctgcctgaaggacatgctggccggctag

SEQ ID NO: 171253 - DNA, 6993 bp, synthetic construct
  misc_feature 1..6993: note = Description of Artificial Sequence: Synthetic coding sequence
  source 1..6993: mol_type = other DNA
atggctgctgaggagggcgtggccagcgctgccagcgctgggggctcctggggcacagctgccatgggccgggtgctgcccatgctgctggtgcctgtgcctgctgaggccatgggccagctgggcagccgggcccagctgcggacccagcctgaggccctgggcagcctgacagctgctggcagcctgcaggtgctgagcctgaccccaggcagccggggcggcggccgctgctgcctggagggccccttctggcacttcctgtgggaggacagcaggaacagcagcacccccacagagaagcccaagctgctggccctgggagaaaattatgagctgctgatctatgagttcaacctgaaggatggccgctgtgatgccaccatcctgtacagctgcagccgggaggccctgcagaagctgattgatgaccaggacatcagcatcagcctgctgagcctgcgcatcctgtccttccacaacaacaccagcctgctcttcatcaacaagtgtgtgatcctgcacatcatcttccctgagagagatgctgccatccgggtgctgaactgcttcaccctgcccctgcctgcccaggccgtggacatgatcatcgacacccagctgtgccggggcatcctgtttgtgctgagcagcctgggctggatctacatctttgatgtggtggatggcacctacgtggcccacgtggacctggccctgcacaaggaggacatgtgcaatgagcagcagcaggagcccgccaagatcagcagcttcaccagcctgaaggtgtcccaggacctggatgtggccgtgattgtgagcagcagcaacagcgctgtggccctgaacctgaacctgtacttccggcagcaccctggccacctgctgtgtgagcgcatcctggaggacctgcccatccagggccccaagggcgtggatgaagatgatcctgtgaacagcgcctacaacatgaagctggccaagttctccttccagattgaccgctcctggaaggcccagctgagcagcctgaatgagaccatcaagaacagcaagctggaggtgtcctgctgtgccccctggttccaggacatcctgcacctggagagccctgagagcggcaaccacagcacctctgtgcagagctgggccttcatcccccaggacatcatgcacggccagtacaacgtgctgcagaaggaccacgccaagaccagtgaccccggccgctcctggaagatcatgcacatcagcgagcaggaggagcccatcgagctgaagtgtgtgtctgtgacaggcttcaccgccctcttcacctgggaggtggagaggatgggctacaccatcaccctgtgggacctggagacccagggcatgcagtgcttcagcctgggcaccaagtgcatccctgtggacagcagcggggaccagcagctgtgctttgtgctgacagaaaatggcctgagcctcatcctgtttggcctgacccaggaggagttcctgaaccggctgatgatccacggcagcgccagcacagtggacaccctgtgccacctgaatggctggggccgctgcagcatccccatccacgccctggaggccggcatcgagaaccggcagctggacacagtgaacttcttcctgaagagcaaagaaaatctcttcaaccccagcagcaagagctctgtgtctgaccagtttgaccacctgagcagccacctgtacctgagaaatgtggaggagctgatcccagccctggacctgctgtgcagcgccatccgggagagctacagcgagccccagagcaagcacttcagcgagcagctgctgaacctgaccctgtccttcctgaacaaccagatcaaggagctgttcatccacacagaggagctggatgagcacctgcagaagggcgtgaacatcctgaccagctacatcaatgagctgcggaccttcatgatcaagttcccctggaagctgacagatgccattgatgaatatgatgtgcatgaaaatgtgcccaaggtgaaggagagcaacatctggaagaagctgagctttgaggaggtgattgccagcgccatcctgaacaacaagatccctgaggcccagaccttcttcagaattgacagccacagcgcccagaagctggaggagctgattggcatcggcctgaacctggtgtttgacaacctgaagaagaacaacatcaaggaggccagcgagctgctgaagaacatgggctttgatgtgaagggccagctgctgaagatctgcttctacaccaccaacaagaacatccgggacttcctggtggagatcctgaaggagaagaactacttcagcgagaaggagaagaggaccatcgactttgtgcaccaggtggagaagctgtacctgggccacttccaggagaacatgcagatccagagcttcccccgctactggatcaaggagcaggacttcttcaagcacaagtctgtgctggacagcttcctgaagtatgactgcaaggatgagttcaacaagcaggaccacagaattgtgctgaactgggccctgtggtgggaccagctgacccaggagagcatcctgctgccccgcatcagccctgaggagtacaagagctacagccctgaggccctgtggagatacctgacagcccggcatgactggctgaacatcatcctgtggattggagagttccagacccagcacagctatgccagcctgcagcagaacaagtggcccctgctgactgtggatgtgatcaaccagaacaccagctgcaacaactacatgagaaatgagatcctggacaagctggccagaaatggagtcttcctggccagcgagctggaggactttgagtgcttcctgctgcggctgagcagaattggaggagtcatccaggacaccctgcctgtgcagaactacaagaccaaggagggctgggacttccacagccagttcatcctgtactgcctggagcacagcctgcagcacctgctgtatgtgtacctggactgctacaagctgagccctgagaactgccccttcctggagaagaaggagctgcacgaggcccacccctggtttgagttcctggtgcagtgccggcaggtggccagcaacctgacagaccccaagctgatcttccaggccagcctggccaatgcccagatcctgatccccaccaaccaggcctctgtgtcctccatgctgctggagggccacaccctgctggccctggccaccaccatgtacagccctgggggcgtgtcccaggtggtgcagaatgaagaaaatgaaaactgcctgaagaaggtggacccccagctgctgaagatggccctgaccccctaccccaagctgaagacagccctcttcccccagtgcaccccacccagcgtgctgcccagcgacatcaccatctaccacctgatccagagcctgagcccctttgaccccagccggctgtttggctggcagagcgccaacaccctggccatcggagatgcctggagccacctgccccacttcagcagcccagacctggtgaacaagtatgccatcgtggagcggctgaactttgcctactacctgcacaacggccggcccagctttgccttcggcaccttcctggtgcaggagctgatcaagagcaagacccccaagcagctgatccagcaggtgggcaatgaggcctacgtgattggcctgagcagcttccacatccccagcatcggggccgcctgtgtgtgcttcctggagctgctgggcctggacagcctgaagctgcgggtggacatgaaggtggccaacatcatcctgagctacaagtgcagaaatgaagatgcccagtacagcttcatccgggagagcgtggccgagaagctgagcaagctggctgatggagagaagaccaccacagaggagctgctggtgctgctggaggagggcacctggaacagcatccagcagcaggagatcaagaggctgagcagcgagagcagcagccagtgggccctggtggtgcagttctgccgcctgcacaacatgaagctgagcatctcctacctgcgggagtgtgccaaggccaatgactggctgcagttcatcatccacagccagctgcacaactaccaccctgctgaggtgaagagcctcatccagtacttcagccctgtgatccaggaccacctgcggctggcctttgagaacctgcccagcgtgcccaccagcaagatggacagcgaccaggtgtgcaacaagtgcccccaggagctgcagggcagcaagcaggagatgacagacctgtttgagatcctgctgcagtgcagcgaggagccagacagctggcactggctgctggtggaggccgtgaagcagcaggcccccatcctgtctgtgctggccagctgcctgcagggcgccagcgccatcagctgcctgtgtgtgtggatcatcacctctgtggaggacaacgtggccacagaggccatgggccacatccaggacagcacagaggaccacacctggaacctggaggacctgagcgtcatctggaggaccctgctgacccggcagaagagcaagaccctcatccggggcttccagctgttcttcaaggacagccccctgctgctggtgatggagatgtatgagctgtgcatgttcttcaggaactacaaggaggccgaggccaagctgctggagttccagaagagcctggagaccctgaacacagctgccaccaaggtgcaccctgtgatcccagccatgtggctggaggaccaggtgtgcttcctgctgaagctgatgctgcagcagtgcaagacccagtatgagctgggcaagctgctgcagctgtttgtggagcgggagcacctgttcagtgatggcccagatgtgaagaagctgtgcatcctgtgccagatcctgaaggacaccagcatcgccatcaaccacaccatcatcaccagctacagcattgagaacctgcagcacgagtgccgcagcatcctggagcggctgcagacagatggccagtttgccctggcccggcgggtggccgagctggccgagctgcctgtggacaacctggtgatcaaggagatcacccaggagatgcagaccctgaagcacatcgagcagtggagcctgaagcaggccagaattgacttctggaagaagtgccacgagaacttcaagaagaacagcatcagcagcaaggccgccagcagcttcttcagcacccaggcccacgtggcctgtgagcaccccaccggctggagctccatggaggagcggcacctgctgctgaccctggccggccactggctggcccaggaggatgtggtgcccctggacaagctggaggagctggagaagcagatctggctgtgccgcatcacccagcacaccctgggcaggaaccaggaggagacagagccccgcttcagccggcagatcagcaccagcggggagctgagctttgacagcctggccagcgagttctccttcagcaagctggccgccctgaacaccagcaagtacctggagctgaacagcctgcccagcaaggagacctgtgaaaatcggctggactggaaggagcaggagagcctgaacttcctgattggccgcctgctggatgatggctgtgtgcatgaggccagccgggtgtgccgctacttccacttctacaacccagatgtggccctggtgctgcactgccgggccctggccagcggggaggcctccatggaggacctgcaccctgagatccacgccctgctgcagagcgctgagctgctggaggaggaggccccagacatccccctgcggcgggtgcacagccgccacaagcagatgttcaaccccacagaggagagccagaccttcctgcagctgaccaccctgtgccaggacaggaccctggtgggcatgaagctgctggacaagatcagctctgtgccccacggggagctgagctgcaccacagagctgctgatcctggcccaccactgcttcaccctgacctgccacatggagggcatcatccgggtgctgcaggccgcccacatgctgacagacaaccacctggcccccagcgaggagtatggcctggtggtgcggctgctgactggaattggccgctacaatgagatgacctacatctttgacctgctgcacaagaagcactactttgaggtgctgatgaggaagaagctggaccccagcggcaccctgaagacagccctgctggactacatcaagcgctgcaggcctggggacagcgagaagcacaacatgattgccctgtgcttctccatgtgccgggagatcggggagaaccacgaggccgccgcccgcatccagctgaagctgattgagagccagccctgggaggacagcctgaaggatggccaccagctgaagcagctgctgctgaaggccctgaccctgatgctggatgctgctgagagctatgccaaggacagctgtgtgcggcaggcccagcactgccagaggctgaccaagctgatcaccctgcagatccacttcctgaacacaggccagaacaccatgctgatcaacctgggccgccacaagctgatggactgcatcctggccctgccccgcttctaccaggccagcatcgtggccgaggcctatgactttgtgcctgactgggccgagatcctgtaccagcaggtgatcctgaagggggacttcaactacctggaggagttcaagcagcagaggctgctgaagagcagcatctttgaggagatcagcaagaagtacaagcagcaccagcccacagacatggtgatggagaacctgaagaagctgctgacctactgtgaagatgtgtacctgtactacaagctggcctatgagcacaagttctatgagatcgtgaatgtgctgctgaaggacccccagacaggctgctgcctgaaggacatgctggccggctag

SEQ ID NO: 171254 - DNA, 6240 bp, synthetic construct
  misc_feature 1..6240: note = Description of Artificial Sequence: Synthetic coding sequence
  source 1..6240: mol_type = other DNA
atggctgctgaggagggcgtggccagcgctgccagcgctgggggctcctggggcacagctgccatgggccgggtgctgcccatgctgctggtgcctgtgcctgctgaggccatgggccagctgggcagccgggcccagctgcggacccagcctgaggccctgggcagcctgacagctgctggcagcctgcaggtgctgagcctgaccccaggcagccggggcggcggccgctgctgcctggagggccccttctggcacttcctgtgggaggacagcaggaacagcagcacccccacagagaagcccaagctgctggccctgggagaaaattatgagctgctgatctatgagttcaacctgaaggatggccgctgtgatgccaccatcctgtacagctgcagccgggaggccctgcagaagctgattgatgaccaggacatcagcatcagcctgctgagcctgcgcatcctgtccttccacaacaacaccagcctgctcttcatcaacaagtgtgtgatcctgcacatcatcttccctgagagagatgctgccatccgggtgctgaactgcttcaccctgcccctgcctgcccaggccgtggacatgatcatcgacacccagctgtgccggggcatcctgtttgtgctgagcagcctgggctggatctacatctttgatgtggtggatggcacctacgtggcccacgtggacctggccctgcacaaggaggacatgtgcaatgagcagcagcaggagcccgccaagatcagcagcttcaccagcctgaaggtgtcccaggacctggatgtggccgtgattgtgagcagcagcaacagcgctgtggccctgaacctgaacctgtacttccggcagcaccctggccacctgctgtgtgagcgcatcctggaggacctgcccatccagggccccaagggcgtggatgaagatgatcctgtgaacagcgcctacaacatgaagctggccaagttctccttccagattgaccgctcctggaaggcccagctgagcagcctgaatgagaccatcaagaacagcaagctggaggtgtcctgctgtgccccctggttccaggacatcctgcacctggagagccctgagagcggcaaccacagcacctctgtgcagagctgggccttcatcccccaggacatcatgcacggccagtacaacgtgctgcagaaggaccacgccaagaccagtgaccccggccgctcctggaagatcatgcacatcagcgagcaggaggagcccatcgagctgaagtgtgtgtctgtgacaggcttcaccgccctcttcacctgggaggtggagaggatgggctacaccatcaccctgtgggacctggagacccagggcatgcagtgcttcagcctgggcaccaagtgcatccctgtggacagcagcggggaccagcagctgtgctttgtgctgacagaaaatggcctgagcctcatcctgtttggcctgacccaggaggagttcctgaaccggctgatgatccacggcagcgccagcacagtggacaccctgtgccacctgaatggctggggccgctgcagcatccccatccacgccctggaggccggcatcgagaaccggcagctggacacagtgaacttcttcctgaagagcaaagaaaatctcttcaaccccagcagcaagagctctgtgtctgaccagtttgaccacctgagcagccacctgtacctgagaaatgtggaggagctgatcccagccctggacctgctgtgcagcgccatccgggagagctacagcgagccccagagcaagcacttcagcgagcagctgctgaacctgaccctgtccttcctgaacaaccagatcaaggagctgttcatccacacagaggagctggatgagcacctgcagaagggcgtgaacatcctgaccagctacatcaatgagctgcggaccttcatgatcaagttcccctggaagctgacagatgccattgatgaatatgatgtgcatgaaaatgtgcccaaggtgaaggagagcaacatctggaagaagctgagctttgaggaggtgattgccagcgccatcctgaacaacaagatccctgaggcccagaccttcttcagaattgacagccacagcgcccagaagctggaggagctgattggcatcggcctgaacctggtgtttgacaacctgaagaagaacaacatcaaggaggccagcgagctgctgaagaacatgggctttgatgtgaagggccagctgctgaagatctgcttctacaccaccaacaagaacatccgggacttcctggtggagatcctgaaggagaagaactacttcagcgagaaggagaagaggaccatcgactttgtgcaccaggtggagaagctgtacctgggccacttccaggagaacatgcagatccagagcttcccccgctactggatcaaggagcaggacttcttcaagcacaagtctgtgctggacagcttcctgaagtatgactgcaaggatgagttcaacaagcaggaccacagaattgtgctgaactgggccctgtggtgggaccagctgacccaggagagcatcctgctgccccgcatcagccctgaggagtacaagagctacagccctgaggccctgtggagatacctgacagcccggcatgactggctgaacatcatcctgtggattggagagttccagacccagcacagctatgccagcctgcagcagaacaagtggcccctgctgactgtggatgtgatcaaccagaacaccagctgcaacaactacatgagaaatgagatcctggacaagctggccagaaatggagtcttcctggccagcgagctggaggactttgagtgcttcctgctgcggctgagcagaattggaggagtcatccaggacaccctgcctgtgcagaactacaagaccaaggagggctgggacttccacagccagttcatcctgtactgcctggagcacagcctgcagcacctgctgtatgtgtacctggactgctacaagctgagccctgagaactgccccttcctggagaagaaggagctgcacgaggcccacccctggtttgagttcctggtgcagtgccggcaggtggccagcaacctgacagaccccaagctgatcttccaggccagcctggccaatgcccagatcctgatccccaccaaccaggcctctgtgtcctccatgctgctggagggccacaccctgctggccctggccaccaccatgtacagccctgggggcgtgtcccaggtggtgcagaatgaagaaaatgaaaactgcctgaagaaggtggacccccagctgctgaagatggccctgaccccctaccccaagctgaagacagccctcttcccccagtgcaccccacccagcgtgctgcccagcgacatcaccatctaccacctgatccagagcctgagcccctttgaccccagccggctgtttggctggcagagcgccaacaccctggccatcggagatgcctggagccacctgccccacttcagcagcccagacctggtgaacaagtatgccatcgtggagcggctgaactttgcctactacctgcacaacggccggcccagctttgccttcggcaccttcctggtgcaggagctgatcaagagcaagacccccaagcagctgatccagcaggtgggcaatgaggcctacgtgattggcctgagcagcttccacatccccagcatcggggccgcctgtgtgtgcttcctggagctgctgggcctggacagcctgaagctgcgggtggacatgaaggtggccaacatcatcctgagctacaagtgcagaaatgaagatgcccagtacagcttcatccgggagagcgtggccgagaagctgagcaagctggctgatggagagaagaccaccacagaggagctgctggtgctgctggaggagggcacctggaacagcatccagcagcaggagatcaagaggctgagcagcgagagcagcagccagtgggccctggtggtgcagttctgccgcctgcacaacatgaagctgagcatctcctacctgcgggagtgtgccaaggccaatgactggctgcagttcatcatccacagccagctgcacaactaccaccctgctgaggtgaagagcctcatccagtacttcagccctgtgatccaggaccacctgcggctggcctttgagaacctgcccagcgtgcccaccagcaagatggacagcgaccaggtgtgcaacaagtgcccccaggagctgcagggcagcaagcaggagatgacagacctgtttgagatcctgctgcagtgcagcgaggagccagacagctggcactggctgctggtggaggccgtgaagcagcaggcccccatcctgtctgtgctggccagctgcctgcagggcgccagcgccatcagctgcctgtgtgtgtggatcatcacctctgtggaggacaacgtggccacagaggccatgggccacatccaggacagcacagaggaccacacctggaacctggaggacctgagcgtcatctggaggaccctgctgacccggcagaagagcaagaccctcatccggggcttccagctgttcttcaaggacagccccctgctgctggtgatggagatgtatgagctgtgcatgttcttcaggaactacaaggaggccgaggccaagctgctggagttccagaagagcctggagaccctgaacacagctgccaccaaggtgcaccctgtgatcccagccatgtggctggaggaccaggtgtgcttcctgctgaagctgatgctgcagcagtgcaagacccagtatgagctgggcaagctgctgcagctgtttgtggagcgggagcacctgttcagtgatggcccagatgtgaagaagctgtgcatcctgtgccagatcctgaaggacaccagcatcgccatcaaccacaccatcatcaccagctacagcattgagaacctgcagcacgagtgccgcagcatcctggagcggctgcagacagatggccagtttgccctggcccggcgggtggccgagctggccgagctgcctgtggacaacctggtgatcaaggagatcacccaggagatgcagaccctgaagcacatcgagcagtggagcctgaagcaggccagaattgacttctggaagaagtgccacgagaacttcaagaagaacagcatcagcagcaaggccgccagcagcttcttcagcacccaggcccacgtggcctgtgagcaccccaccggctggagctccatggaggagcggcacctgctgctgaccctggccggccactggctggcccaggaggatgtggtgcccctggacaagctggaggagctggagaagcagatctggctgtgccgcatcacccagcacaccctgggcaggaaccaggaggagacagagccccgcttcagccggcagatcagcaccagcggggagctgagctttgacagcctggccagcgagttctccttcagcaagctggccgccctgaacaccagcaagtacctggagctgaacagcctgcccagcaaggagacctgtgaaaatcggctggactggaaggagcaggagagcctgaacttcctgattggccgcctgctggatgatggctgtgtgcatgaggccagccgggtgtgccgctacttccacttctacaacccagatgtggccctggtgctgcactgccgggccctggccagcggggaggcctccatggaggacctgcaccctgagatccacgccctgctgcagagcgctgagctgctggaggaggaggccccagacatccccctgcggcgggtgcacagcaccagcagcctggacagccagaagtttgtgacagtgcccagcagcaatgaggtggtgaccaacctggaggtgctgaccagcaagtgcctgcacggcaagaactactgccggcaggtgctgtgcctgtatgacctggccaaggagctgggctgcagctacacagatgtggccgcccaggatggagaggccatgctgaggaagatcctggccagccagcagcctgaccgctgcaagagggcccaggccttcatcagcacccagggcctgaagccagacacagtggccgagctggtggccgaggaggtgacccgggagctgctgaccagcagccagggcaccggggccctgcccccaggggacagccagcccctgtag

SEQ ID NO: 171255 - DNA, 2001 bp, synthetic construct
  misc_feature 1..2001: note = Description of Artificial Sequence: Synthetic coding sequence
  source 1..2001: mol_type = other DNA
atggagcaggagccccagaatggagagcctgctgagatcaagatcatccgggaggcctacaagaaggccttcctgtttgtgaacaagggcctgaacacagatgagctgggccagaaggaggaggccaagaactactacaagcagggcatcggccacctgctgcggggcatcagcatcagcagcaaggagagcgagcacactggacctggctgggagagcgcccggcagatgcagcagaagatgaaggagaccctgcagaatgtgaggacccggctggagatcctggagaagggcctggccaccagcctgcagaatgacctgcaggaggtgcccaagctgtacccagagttcccccccaaggacatgtgtgagaagctgcctgagccccagagcttcagcagcgccccccagcacgccgaggtgaatggaaacaccagcaccccatctgctggagctgtggccgccccagccagcctgagcctgcccagccagagctgcccagctgaggcccccccagcctacaccccccaggccgctgagggccactacacagtgtcctatggaacagattctggagagttcagctctgtgggggaggagttctacagaaaccacagccagcccccacccctggagaccctgggcctggatgctgatgagctgatcctgatccccaacggggtgcagatcttctttgtgaacccagctggggaggtgtctgcccccagctacccaggctacctgcgcatcgtgcgcttcctggacaacagcctggacacagtgctgaacagacctcctggcttcctgcaggtgtgtgactggctgtaccccctggtgcctgacaggagccctgtgctgaagtgcacagctggggcctacatgtttcctgacaccatgctgcaggccgccggctgctttgtgggcgtggtgctgagcagcgagctgcctgaagatgaccgggagctgtttgaggacctgctgcggcagatgtctgacctgcggctgcaggccaactggaacagagctgaggaggagaatgagttccagatccctggccgcacccggcccagcagtgaccagctgaaggaggccagcggcacagatgtgaagcagctggaccagggcaacaaggatgtgcgccacaagggcaagaggggcaagagggccaaggacaccagcagcgaggaggtgaacctgagccacatcgtgccctgtgagcctgtgcctgaggagaagcccaaggagctgcctgagtggagcgagaaggtggcccacaacatcctgagcggggcctcctgggtgtcctggggcctggtgaagggagctgagatcaccgggaaggccatccagaagggggccagcaagctgcgggagcgcatccagcctgaggagaagcctgtggaggtgtccccagctgtgaccaagggcctgtacatcgccaagcaggccaccggcggggccgccaaggtgtcccagttcctggtggatggagtgtgcaccgtggccaactgtgtgggcaaggagctggccccccacgtgaagaagcacggcagcaagctggtgcctgagagcctgaagaaggacaaggatggcaagagccccctggatggagccatggtggtggccgccagctctgtgcagggcttcagcacagtgtggcagggcctggagtgtgccgccaagtgcatcgtgaacaacgtgtctgctgagaccgtgcagacagtgcgctacaagtatggctacaatgctggggaggccacccaccacgctgtggacagcgctgtgaatgtgggcgtgacagcctacaacatcaacaacatcggcatcaaggccatggtgaagaagacagccacccagacaggccacaccctgctggaggactaccagatcgtggacaacagccagcgggagaaccaggagggcgccgccaacgtgaatgtgcggggggagaaggatgagcagaccaaggaggtgaaggaggccaagaagaaggacaagtag

SEQ ID NO: 171256 - DNA, 2001 bp, synthetic construct; identical to SEQ ID NO: 171255
  misc_feature 1..2001: note = Description of Artificial Sequence: Synthetic coding sequence
  source 1..2001: mol_type = other DNA

SEQ ID NO: 171257 - DNA, 2001 bp, synthetic construct; identical to SEQ ID NO: 171255
  misc_feature 1..2001: note = Description of Artificial Sequence: Synthetic coding sequence
  source 1..2001: mol_type = other DNA

SEQ ID NO: 171258 - DNA, 2001 bp, synthetic construct; identical to SEQ ID NO: 171255
  misc_feature 1..2001: note = Description of Artificial Sequence: Synthetic coding sequence
  source 1..2001: mol_type = other DNA

SEQ ID NO: 171259 - DNA, 846 bp, synthetic construct
  misc_feature 1..846: note = Description of Artificial Sequence: Synthetic coding sequence
  source 1..846: mol_type = other DNA
atgggagagatcaaggtgtccccagactacaactggttccggggcaccgtgcccctgaagaagatcatcgtggatgatgatgacagcaagatctggagcctgtatgatgctggccccaggagcatccgctgccccctcatcttcctgccccctgtgtctggaacagcagatgtgttcttccggcagatcctggccctgaccggctggggctacagagtgattgctgtgcacctgtttggagccagcctgggcggcttcctggcccagaagtttgctgagtacacccacaagagcccccgggtgcacagcctcatcctgtgcaacagcttcagtgacaccagcatcttcaaccagacctggacagccaacagcttctggctgatgcctgccttcatgctgaagaagatcgtgctgggcaacttcagcagcggccctgtggaccccatgatggctgatgccatcgacttcatggtggaccggctggagagcctgggccagagcgagctggccagccggctgaccctgaactgccagaacagctatgtggagccccacaagatccgggacatccctgtgaccatcatggatgtgtttgaccagagcgccctgagcacagaggccaaggaggagatgtacaagctgtacccaaatgcccggcgggcccacctgaagacaggaggcaacttcccctacctgtgccgctctgctgaggtgaacctgtatgtgcagatccacctgctgcagttccacggcaccaagtatgctgccatcgaccccagcatggtgtctgctgaggagctggaggtgcagaagggcagcctgggcatcagccaggaggagcagtag

SEQ ID NO: 171260 - DNA, 927 bp, synthetic construct
  misc_feature 1..927: note = Description of Artificial Sequence: Synthetic coding sequence
  source 1..927: mol_type = other DNA
atgggagagatcaaggtgtccccagactacaactggttccggggcaccgtgcccctgaagaagatcatcgtggatgatgatgacagcaagatctggagcctgtatgatgctggccccaggagcatccgctgccccctcatcttcctgccccctgtgtctggaacagcagatgtgttcttccggcagatcctggccctgaccggctggggctacagagtcatcgccctgcagtaccctgtgtactgggaccacctggagttctgtgatggcttcaggaagctgctggaccacctgcagctggacaaggtgcacctgtttggagccagcctgggcggcttcctggcccagaagtttgctgagtacacccacaagagcccccgggtgcacagcctcatcctgtgcaacagcttcagtgacaccagcatcttcaaccagacctggacagccaacagcttctggctgatgcctgccttcatgctgaagaagatcgtgctgggcaacttcagcagcggccctgtggaccccatgatggctgatgccatcgacttcatggtggaccggctggagagcctgggccagagcgagctggccagccggctgaccctgaactgccagaacagctatgtggagccccacaagatccgggacatccctgtgaccatcatggatgtgtttgaccagagcgccctgagcacagaggccaaggaggagatgtacaagctgtacccaaatgcccggcgggcccacctgaagacaggaggcaacttcccctacctgtgccgctctgctgaggtgaacctgtatgtgcagatccacctgctgcagttccacggcaccaagtatgctgccatcgaccccagcatggtgtctgctgaggagctggaggtgcagaagggcagcctgggcatcagccaggaggagcagtag

SEQ ID NO: 171261 - DNA, 927 bp, synthetic construct; identical to SEQ ID NO: 171260
  misc_feature 1..927: note = Description of Artificial Sequence: Synthetic coding sequence
  source 1..927: mol_type = other DNA

SEQ ID NO: 171262 - DNA, 2388 bp, synthetic construct
  misc_feature 1..2388: note = Description of Artificial Sequence: Synthetic coding sequence
  source 1..2388: mol_type = other DNA
atggctgtgctgctgctgctgctgcgggccctgcggcggggccctggccctggcccccggcccctgtggggccctggccctgcctggagccctggcttccctgcccggcccggccggggccggccctacatggccagccggcccccaggggacctggccgaggccggcggccgggccctgcagagcctgcagctgcggctgctgacccccacctttgagggcatcaatggcctgctgctgaagcagcacctggtgcagaaccctgtgcggctgtggcagctgctgggcggcaccttctacttcaacaccagccggctgaagcagaagaacaaggagaaggacaagagcaagggcaaggccccagaagaagatgaggaggagaggagaagaagagaaagagatgaccagatgtaccgggagcggctgcggaccctgctggtgattgctgtggtgatgagcctgctgaatgccctgagcaccagcggcggcagcatctcctggaatgactttgtgcatgagatgctggccaagggggaggtgcagagggtgcaggtggtgcctgagagtgatgtggtggaggtgtacctgcaccctggagctgtggtgtttggccggccccggctggccctgatgtacaggatgcaggtggccaacatcgacaagtttgaggagaagctgcgggctgctgaagatgagctgaacatcgaggccaaggaccgcatccctgtgtcctacaagaggacaggcttctttggaaatgccctgtacagcgtgggcatgacagctgtgggcctggccatcctgtggtacgtgttccggctggccggcatgacaggccgggagggcggcttcagcgccttcaaccagctgaagatggcccgcttcaccatcgtggatggcaagatgggcaagggcgtgtccttcaaggatgtggccggcatgcatgaggccaagctggaggtgcgggagtttgtggactacctgaagagccctgagcgcttcctgcagctgggcgccaaggtgcccaagggggccctgctgctgggccccccaggctgcggcaagaccctgctggccaaggctgtggccacagaggcccaggtgcccttcctggccatggccggccctgagtttgtggaggtgattggaggcctgggcgccgcccgggtgcgcagcctcttcaaggaggcccgggcccgggccccctgcatcgtgtacattgatgaaattgatgctgtgggcaagaagaggagcaccaccatgagcggcttcagcaacacagaggaggagcagaccctgaaccagctgctggtggagatggatggcatgggcaccacagaccacgtgattgtgctggccagcaccaacagagctgacatcctggatggagccctgatgaggcctggccgcctggacagacatgtgttcatcgacctgcccaccctgcaggagcggcgggagatctttgagcagcacctgaagagcctgaagctgacccagagcagcaccttctacagccagaggctggccgagctgaccccaggcttctctggagctgacatcgccaacatctgcaatgaggccgccctgcacgccgcccgggagggccacacctctgtgcacaccctgaactttgaatatgctgtggagcgggtgctggccggcacagccaagaagagcaagatcctgagcaaggaggagcagaaggtggtggccttccacgagagcggccacgccctggtgggctggatgctggagcacacagaggccgtgatgaaggtgtccatcacccccaggaccaatgctgccctgggctttgcccagatgctgccccgggaccagcacctgttcaccaaggagcagctgtttgagaggatgtgcatggccctgggcggccgggccagcgaggccctgtccttcaatgaggtgaccagcggggcccaggatgacctgaggaaggtgaccagaattgcctacagcatggtgaagcagtttggcatggcccctggcatcggccccatctccttccctgaggcccaggagggcctgatgggcatcggccggcggcccttcagccagggcctgcagcagatgatggaccacgaggcccggctgctggtggccaaggcctaccgccacacagagaaggtgctgcaggacaacctggacaagctgcaggccctggccaatgccctgctggagaaggaggtgatcaactatgaagatattgaggccctgattggccccccaccccacggccccaagaagatgattgccccccagcgctggattgatgcccagcgggagaagcaggacctgggggaggaggagacagaggagacccagcagccccccctgggcggggaggagcccacctggcccaagtag

SEQ ID NO: 171263 - DNA, 672 bp, synthetic construct
  misc_feature 1..672: note = Description of Artificial Sequence: Synthetic coding sequence
  source 1..672: mol_type = other DNA
atgaggctgcgctgcacccggcggggccgggacaccctgccctgcaccctgagcaccagcagcaccccctggagcgccagcagccaggtgccccgggcccagctgggcaaggctgtgggcagctgccggggcgtgggcagctgctgtgcccggcactgcaagacccacctggccagcctgcggcagccctgtggggagaggactggagctgcctgtgtgctgctgatctacttccgggtgaccatctacttctacgtggagattgagaagctgctgatcatcgtggccaagcaggagggcctgagcggcaaccacaagcctgtggagaggaagtacatgacctacctgagcgcccaggaccacgagctgatccaggtggtgcagaatggccacctgcagatgtgtgggaagtcagaaacaggaaatgaggccagccctggcctgcccaagagggcccggagctgccccaggaagaacaggaagtggctgcgcttcatgagccgggccaccccctggtgggccggctgctggagcaccaggagagatgagggcctgcacaaccccagcaccaatgctgccctgggctttgcccaggccccccagaggcctgcccccctgcacgagcagctgtttgagaggatgtgcatggccctgggcggccgggccagctag

SEQ ID NO: 171264 - DNA, 618 bp, synthetic construct
  misc_feature 1..618: note = Description of Artificial Sequence: Synthetic coding sequence
  source 1..618: mol_type = other DNA
ctgggcccccaggcctgcaccgtggtgcccaggagcaaatgttttgacctggagatggtgagcagccgctgggagcccctgctgctgctgacagaggtgaccagcgccaatgaggtgtgggtgaccagcaacagcacagccctggtgtttgtgtctgacaacgtgcgggaggagctggaggaggtgcaggacctgctgtgcaggaccctgcccctgcctgtgcagctgtccttccctgaggaggccctggatgtggcccgggtggcccacgtgtttgtgagccccttctgcttctctgctggcagcgaggagaggagaagaagagaaagagatgaccagatgtaccgggagcggctgcggaccctgctggtgattgctgtggtgatgagcctgctgaatgccctgagcaccagcggcggcagcatctcctggaatgactttgtgcatgagatgctggccaagggggaggtgcagagggtgcaggtggtgcctgagagtgatgtggtggaggtgtacctgcaccctggagctgtggtgtttggccggccccggctggccctgatgtacaggatgcaggtggccaacatcgacaagtttgaggagaagctgcgggcctag

SEQ ID NO: 171265 - DNA, 1470 bp, synthetic construct
  misc_feature 1..1470: note = Description of Artificial Sequence: Synthetic coding sequence
  source 1..1470: mol_type = other DNA
atggctgtgctgctgctgctgctgcgggccctgcggcggggccctggccctggcccccggcccctgtggggccctggccctgcctggagccctggcttccctgcccggcccggccggggccggccctacatggccagccggcccccaggggacctggccgaggccggcggccgggccctgcagagcctgcagctgcggctgctgacccccacctttgagggcatcaatggcctgctgctgaagcagcacctggtgcagaaccctgtgcggctgtggcagctgctgggcggcaccttctacttcaacaccagccggctgaagcagaagaacaaggagaaggacaagagcaagggcaaggccccagaagaagatgaggaggagaggagaagaagagaaagagatgaccagatgtaccgggagcggctgcggaccctgctggtgattgctgtggtgatgagcctgctgaatgccctgagcaccagcggcggcagcatctcctggaatgactttgtgcatgagatgctggccaagggggaggtgcagagggtgcaggtggtgcctgagagtgatgtggtggaggtgtacctgcaccctggagctgtggtgtttggccggccccggctggccctgatgtacaggatgcaggtggccaacatcgacaagtttgaggagaagctgcgggctgctgaagatgagctgaacatcgaggccaaggaccgcatccctgtgtcctacaagaggacaggcttctttggaaatgccctgtacagcgtgggcatgacagctgtgggcctggccatcctgtggtacgtgttccggctggccggcatgacaggccgggagggcggcttcagcgccttcaaccagctgaagatggcccgcttcaccatcgtggatggcaagatgggcaagggcgtgtccttcaaggatgtggccggcatgcatgaggccaagctggaggtgcgggagtttgtggactacctgaagagccctgagcgcttcctgcagctgggcgccaaggtgcccaagggggccctgctgctgggccccccaggctgcggcaagaccctgctggccaaggctgtggccacagaggcccaggtgcccttcctggccatggccggccctgagtttgtggaggtgattggaggcctgggcgccgcccgggtgcgcagcctcttcaaggaggcccgggcccgggccccctgcatcgtgtacattgatgaaattgatgctgtgggcaagaagaggagcaccaccatgagcggcttcagcaacacagaggaggagcagaccctgaaccagctgctggtggagatggatggagccagcctggaccagctgcccagccagggcaccatgaggaagctgcggggcaagaccccagcctgcagctgcctgacagagcccaccggcagccggcgggccatggagggccacagcctgtgctggggctgcctgctgcactag

SEQ ID NO: 171266 - DNA, 1851 bp, synthetic construct
  misc_feature 1..1851: note = Description of Artificial Sequence: Synthetic coding sequence
  source 1..1851: mol_type = other DNA
atgaacagccctgggggccggggcaagaagaagggcagcggcggggccagcaaccctgtgcccccccggcccccaccaccctgcctggccccagcccctcctgctgctggccctgcccctcctcctgagagcccccacaagaggaacctgtactacttctcctaccccctgtttgtgggctttgccctgctgcggctggtggccttccacctgggcctgctgtttgtgtggctgtgccagcgcttcagccgggccctgatggccgccaagaggagcagtggagctgccccagccccagccagcgccagcgccccagcccctgtgcctggaggagaggccgagcgggtgcgggtcttccacaagcaggcctttgagtacatcagcatcgccctgagaattgatgaagatgagaaggccggccagaaggagcaggccgtggagtggtacaagaagggcatcgaggagctggagaagggcattgctgtgattgtgacaggccagggcgagcagtgtgagcgggcccggcggctgcaggccaagatgatgaccaacctggtgatggccaaggaccggctgcagctgctggagaagatgcagcctgtgctgcccttcagcaagagccagacagatgtgtacaatgacagcaccaacctggcctgcagaaatggccacctgcagagcgagagcggggctgtgcccaagaggaaggaccccctgacccacaccagcaacagcctgcccaggagcaagacagtgatgaagacaggcagcgctggcctgagcggccaccaccgggcccccagctacagcggcctgtccatggtgtctggagtgaagcagggcagcggccctgcccccaccacccacaagggcacccccaagaccaacagaaccaacaagcccagcacccccaccacagccaccaggaagaagaaggacctgaagaacttcagaaatgtggacagcaacctggccaacctgatcatgaatgagatcgtggacaatggaacagctgtgaagtttgatgacattgctggccaggacctggccaagcaggccctgcaggagatcgtcatcctgcccagcctgcggcctgagctgttcaccggcctgcgggccccagcccggggcctgctgctgtttggacctcctggaaatggcaagaccatgctggccaaggctgtggccgctgagagcaatgccaccttcttcaacatctctgctgccagcctgaccagcaaatatgtgggggagggggagaagctggtgcgggccctgtttgctgtggcccgggagctgcagcccagcatcatcttcattgatgaggtggacagcctgctgtgtgagcggcgggagggggagcatgatgccagccggcggctgaagacagagttcctgattgaatttgatggagtgcagagcgctggagatgacagagtgctggtgatgggcgccaccaaccggccccaggagctggatgaagctgtgctgcggcgcttcatcaagagggtgtatgtgtccctgcccaatgaggagacccggctgctgctgctgaagaacctgctgtgcaagcagggcagccccctgacccagaaggagctggcccagctggccaggatgacagatggctacagcggcagtgacctgacagccctggccaaggatgctgccctgggccccatccgggagctgaagccagagcaggtgaagaacatgtctgccagcgagatgaggaacatccggctgagtgacttcacagagagcctgaagaagatcaagaggtctgtgagcccccagaccctggaggcctacatccgctggaacaaggactttggagacaccaccgtgtag

SEQ ID NO: 171267 - DNA, 1755 bp, synthetic construct
  misc_feature 1..1755: note = Description of Artificial Sequence: Synthetic coding sequence
  source 1..1755: mol_type = other DNA
atgaacagccctgggggccggggcaagaagaagggcagcggcggggccagcaaccctgtgcccccccggcccccaccaccctgcctggccccagcccctcctgctgctggccctgcccctcctcctgagagcccccacaagaggaacctgtactacttctcctaccccctgtttgtgggctttgccctgctgcggctggtggccttccacctgggcctgctgtttgtgtggctgtgccagcgcttcagccgggccctgatggccgccaagaggagcagtggagctgccccagccccagccagcgccagcgccccagcccctgtgcctggaggagaggccgagcgggtgcgggtcttccacaagcaggcctttgagtacatcagcatcgccctgagaattgatgaagatgagaaggccggccagaaggagcaggccgtggagtggtacaagaagggcatcgaggagctggagaagggcattgctgtgattgtgacaggccagggcgagcagtgtgagcgggcccggcggctgcaggccaagatgatgaccaacctggtgatggccaaggaccggctgcagctgctggagagcggggctgtgcccaagaggaaggaccccctgacccacaccagcaacagcctgcccaggagcaagacagtgatgaagacaggcagcgctggcctgagcggccaccaccgggcccccagctacagcggcctgtccatggtgtctggagtgaagcagggcagcggccctgcccccaccacccacaagggcacccccaagaccaacagaaccaacaagcccagcacccccaccacagccaccaggaagaagaaggacctgaagaacttcagaaatgtggacagcaacctggccaacctgatcatgaatgagatcgtggacaatggaacagctgtgaagtttgatgacattgctggccaggacctggccaagcaggccctgcaggagatcgtcatcctgcccagcctgcggcctgagctgttcaccggcctgcgggccccagcccggggcctgctgctgtttggacctcctggaaatggcaagaccatgctggccaaggctgtggccgctgagagcaatgccaccttcttcaacatctctgctgccagcctgaccagcaaatatgtgggggagggggagaagctggtgcgggccctgtttgctgtggcccgggagctgcagcccagcatcatcttcattgatgaggtggacagcctgctgtgtgagcggcgggagggggagcatgatgccagccggcggctgaagacagagttcctgattgaatttgatggagtgcagagcgctggagatgacagagtgctggtgatgggcgccaccaaccggccccaggagctggatgaagctgtgctgcggcgcttcatcaagagggtgtatgtgtccctgcccaatgaggagacccggctgctgctgctgaagaacctgctgtgcaagcagggcagccccctgacccagaaggagctggcccagctggccaggatgacagatggctacagcggcagtgacctgacagccctggccaaggatgctgccctgggccccatccgggagctgaagccagagcaggtgaagaacatgtctgccagcgagatgaggaacatccggctgagtgacttcacagagagcctgaagaagatcaagaggtctgtgagcccccagaccctggaggcctacatccgctggaacaaggactttggagacaccaccgtgtag

SEQ ID NO: 171268 - DNA, 26394 bp, synthetic construct
  misc_feature 1..26394: note = Description of Artificial Sequence: Synthetic coding sequence
  source 1..26394: mol_type = other DNA
atggccaccagcagaggagccagccgctgcccccgggacatcgccaacgtgatgcagaggctgcaggatgagcaggagatcgtgcagaagaggaccttcaccaagtggatcaacagccacctggccaagaggaagccacccatggtggtggatgacctgtttgaggacatgaaggatggagtgaagctgctggccctgctggaggtgctgagcggccagaagctgccctgtgagcagggccgcaggatgaagagaattcatgctgtggccaacatcggcacagccctgaagttcctggagggcaggaagatcaagctggtgaacatcaacagcacagacattgctgatggccggcccagcatcgtgctgggcctgatgtggaccatcatcctgtacttccagatcgaggagctgaccagcaacctgccccagctgcagagcctgagcagcagcgccagctctgtggacagcatcgtgtcctctgagacccccagcccccccagcaagaggaaggtgaccaccaagatccagggcaatgccaagaaggccctgctgaagtgggtgcagtacacagctgggaagcagacaggcatcgaggtgaaggactttgggaagtcctggaggtctggagtggccttccacagcgtcatccacgccatccggcctgagctggtggacctggagaccgtgaagggccgcagcaaccgggagaacctggaggatgccttcaccatcgccgagacagagctgggcatcccccggctgctggaccctgaagatgtggatgtggacaagccagatgagaagagcatcatgacctacgtggcccagttcctgaagcactacccagacatccacaatgccagcacagatggccaggaggatgatgagatcctgcccggcttccccagctttgccaacagcgtgcagaacttcaagagagaagatagagtcatcttcaaggagatgaaggtgtggattgagcagtttgagcgggacctgacccgggcccagatggtggagagcaacctgcaggacaagtaccagagcttcaagcacttccgggtgcagtatgagatgaagaggaagcagatcgagcacctgatccagcccctgcacagagatggcaagctgagcctggaccaggccctggtgaagcagagctgggacagagtgaccagccggctgtttgactggcacatccagctggacaagagcctgcctgcccccctgggcaccatcggggcctggctgtacagagctgaggtggccctgcgggaggagatcaccgtgcagcaggtgcatgaggagacagccaacaccatccagaggaagctggagcagcacaaggacctgctgcagaacacagatgcccacaagagggccttccacgagatctaccgcaccaggtctgtgaatggcatccctgtgcccccagaccagctggaggacatggccgagcgcttccactttgtgagcagcaccagcgagctgcacctgatgaagatggagttcctggagctgaagtaccgcctgctgagcctgctggtgctggccgagagcaagctgaagtcctggatcatcaagtatggccggcgggagagcgtggagcagctgctgcagaactacgtgtccttcatcgagaacagcaagttctttgagcagtatgaggtgacctaccagatcctgaagcagacagctgagatgtatgtgaaggcagatggctctgtggaggaggctgaaaatgtgatgaagttcatgaatgagaccacagcccagtggaggaacctgtctgtggaggtgcgctctgtgcgctccatgctggaggaggtgatcagcaactgggacagatatggcaacacagtggccagcctgcaggcctggctggaggatgctgagaagatgctgaaccagagtgaaaatgccaagaaggacttcttcaggaacctgccccactggatccagcagcacacagccatgaatgatgctggcaacttcctgattgagacctgtgatgagatggtgtcccgggacctgaagcagcagctgctgctgctgaatggccgctggagggagctgttcatggaggtgaagcagtatgcccaggctgatgagatggacaggatgaagaaggagtacacagactgtgtggtgaccctgagcgcctttgccacagaggcccacaagaagctgtctgagcccctggaggtgtccttcatgaatgtgaagctgctgatccaggacctggaggacatcgagcagagggtgcctgtgatggatgcccagtacaagatcatcaccaagacagcccacctgatcaccaaggagagcccccaggaggagggcaaggagatgtttgccaccatgagcaagctgaaggagcagctgaccaaggtgaaggagtgctacagccccctgctgtatgagagccagcagctgctgatccccctggaggagctggagaagcagatgaccagcttctatgacagcctgggcaagatcaatgagatcatcaccgtgctggagcgggaggcccagagcagcgccctcttcaagcagaagcaccaggagctgctggcctgccaggagaactgcaagaagaccctgaccctcatcgagaagggcagccagagcgtgcagaagtttgtgaccctgagcaatgtgctgaagcactttgaccagacccggctgcagaggcagattgctgacatccacgtggccttccagagcatggtgaagaagacaggagactggaagaagcacgtggagaccaacagccggctgatgaagaagtttgaggagagcagagctgagctggagaaggtgctgagaattgcccaggagggcctggaggagaagggggaccctgaggagctgctgcggcggcacacagagttcttcagccagctggaccagagggtgctgaatgccttcctgaaggcctgtgatgagctgacagacatcctgcctgagcaggagcagcagggcctgcaggaggccgtgaggaagctgcacaagcagtggaaggacctgcagggcgaggccccctaccacctgctgcacctgaagattgatgtggagaagaaccgcttcctggcctctgtggaggagtgcaggacagagctggaccgggagaccaagctgatgccccaggagggcagcgagaagatcatcaaggagcacagggtcttcttcagtgacaagggcccccaccacctgtgtgagaagaggctgcagctgattgaggagctgtgtgtgaagctgcctgtgcgggaccctgtgcgggacaccccaggcacctgccacgtgaccctgaaggagctgcgggccgccatcgacagcacctacaggaagctgatggaggaccctgacaagtggaaggactacaccagccgcttcagcgagttcagctcctggatcagcaccaatgagacccagctgaagggcatcaagggggaggccatcgacacagccaaccacggggaggtgaagagagctgtggaggagatcagaaatggagtgaccaagagaggagagaccctgtcctggctgaagagccggctgaaggtgctgacagaggtgtccagtgaaaatgaggcccagaagcagggagatgagctggccaagctgagcagcagcttcaaggccctggtgaccctgctgtctgaggtggagaagatgctgagcaactttggagactgtgtgcagtacaaggagatcgtgaagaacagcctggaggagctgatcagcggcagcaaggaggtgcaggagcaggccgagaagatcctggacacagagaacctgtttgaggcccagcagctgctgctgcaccaccagcagaagaccaagaggatcagcgccaagaagagagatgtgcagcagcagatcgcccaggcccagcagggcgagggcggcctgcctgaccggggccacgaggagctgaggaagctggagagcaccctggatggcctggagaggagccgggagcggcaggagcggcgcatccaggtgaccctgaggaagtgggagagatttgagaccaacaaggagaccgtggtgcgctacctgttccagacaggcagcagccatgagcgcttcctgtccttcagcagcctggagagcctgagcagcgagctggagcagaccaaggagttcagcaagaggacagagagcattgctgtgcaggccgagaacctggtgaaggaggccagcgagatccccctgggcccccagaacaagcagctgctgcagcagcaggccaagagcatcaaggagcaggtgaagaagctggaggacaccctggaggaggacatcaagaccatggagatggtgaagaccaagtgggaccacttcggcagcaactttgagaccctgtctgtgtggatcacagagaaggagaaggagctgaatgccctggagaccagcagcagcgccatggacatgcagatcagccagatcaaggtgaccatccaggagattgagagcaagctgagcagcatcgtgggcctggaggaggaggcccagagctttgcccagtttgtgaccaccggggagagcgcccgcatcaaggccaagctgacccagatccgccgctacggggaggagctgcgggagcacgcccagtgcctggagggcaccatcctgggccacctgagccagcagcagaagtttgaggagaacctgaggaagatccagcagagcgtgtctgaatttgaggacaagctggccgtgcccatcaagatctgcagcagcgccacagagacctacaaggtgctgcaggagcacatggacctgtgccaggccctggagagcctgagcagcgccatcacagccttcagcgccagcgccaggaaggtggtgaacagagacagctgtgtgcaggaggccgccgccctgcagcagcagtatgaggacatcctgcggcgggccaaggagcggcagacagccctggagaacctgctggcccactggcagaggctggagaaggagctgagcagcttcctgacctggctggagcggggggaggccaaggccagcagccctgagatggacatctctgctgacagagtgaaggtggagggggagctgcagctgatccaggccctgcagaatgaggtggtgtcccaggccagcttctacagcaagctgctgcagctgaaggagagcctcttctctgtggccagcaaggatgatgtgaagatgatgaagctgcacctggagcagctggatgagcgctggagggacctgccccagatcatcaacaagaggatcaacttcctgcagagcgtggtggccgagcaccagcagtttgatgagctgctgctgtccttctctgtgtggatcaagctgttcctgtctgagctgcagaccaccagcgagatcagcatcatggaccaccaggtggccctgaccaggcacaaggaccacgccgctgaggtggagagcaagaagggggagctgcagagcctgcagggccacctggccaagctgggcagcctgggccgggcagaggacctgcacctgctgcagggcaaggccgaggactgcttccagctgtttgaggaggccagccaggtggtggagcggcggcagctggccctgagccacctggccgagttcctgcagagccacgccagcctgagcggcatcctgcggcagctgcggcagacagtggaggccaccaacagcatgaacaagaatgaaagtgacctgattgagaaggacctgaatgatgccctgcagaatgccaaggccctggagagcgctgctgtgtccctggatggcatcctgagcaaggcccagtaccacctgaagattggcagcagcgagcagaggaccagctgccgggccacagctgaccagctgtgtggggaggtggagcgcatccagaacctgctgggcaccaagcagagcgaggctgatgccctggccgtgctgaagaaggccttccaggaccagaaggaggagctgctgaagagcattgaagatattgaggagaggacagacaaggagcggctgaaggagcccacccggcaggccctgcagcagaggctgcgggtcttcaaccagctggaggatgagctgaacagccatgaacatgagctgtgctggctgaaggacaaggccaagcagatcgcccagaaggatgtggcctttgcccctgaggtggaccgggagatcaaccggctggaggtgacctgggatgacaccaagaggctcatccacgagaaccagggccagtgctgcggcctgattgacctgatgagggagtaccagaacctgaagtctgctgtgtccaaggtgctggagaatgccagctctgtgattgtgaccaggaccaccatcaaggaccaggaggacctgaagtgggccttcagcaagcatgaaacagccaagaacaagatgaactacaagcagaaggacctggacaacttcaccagcaagggcaagcacctgctgtctgagctgaagaagatccacagcagtgacttcagcctggtgaagacagacatggagagcacagtggacaagtggctggatgtgtctgagaagctggaggagaacatggaccggctgcgggtgtccctgagcatctgggatgatgtgctgagcaccagagatgaaattgagggctggagcaacaactgtgtgccccagatggccgagaacatcagcaacctggacaaccacctgcgggcagaggagctgctgaaggagtttgagagcgaggtgaagaacaaggccctgcggctggaggagctgcacagcaaggtgaatgacctgaaggagctgaccaagaacctggagaccccaccagacctgcagttcattgaagctgacctgatgcagaagctggagcacgccaaggagatcacagaggtggccaagggcaccctgaaggacttcaccgcccagagcacccaggtggagaagttcatcaatgacatcaccacctggttcaccaaggtggaggagagcctgatgaactgtgcccagaatgagacctgtgaggccctgaagaaggtgaaggacatccagaaggagctgcagagccagcagagcaacatcagcagcacccaggagaacctgaacagcctgtgcaggaagtaccacagcgctgagctggagagcctgggccgggccatgacaggcctcatcaagaagcatgaagctgtgtcccagctgtgcagcaagacccaggccagcctgcaggagagcctggagaagcacttcagcgagagcatgcaggagttccaggagtggttcctgggcgccaaggccgccgccaaggagagcagtgacagaactggagacagcaaggtgctggaggccaagctgcatgacctgcagaacatcctggacagcgtgtctgatggccagagcaagctggatgctgtgacccaggagggccagaccctgtatgcccacctgagcaagcagatcgtgagcagcatccaggagcagatcaccaaggccaatgaggagttccaggccttcctgaagcagtgcctgaaggacaagcaggccctgcaggactgtgccagcgagctgggcagctttgaggaccagcacaggaagctgaacctgtggatccacgagatggaggagcgcttcaacacagagaacctgggggagagcaagcagcacatccctgagaagaagaatgaggtgcacaaggtggagatgttcctgggggagctgctggccgcccgggagagcctggacaagctgagccagaggggccagctgctgtctgaggagggccatggagctggccaggagggccgcctgtgcagccagctgctgaccagccaccagaacctgctgaggatgaccaaggagaagctgcggagctgccaggtggccctgcaggagcacgaggccctggaggaggccctgcagagcatgtggttctgggtgaaggccatccaggaccggctggcctgtgccgagagcaccctgggcagcaaggacaccctggagaagaggctgagccagatccaggacatcctgctgatgaagggggagggggaggtgaagctgaacatggccatcggcaaaggagagcaggccctgcggagcagcaacaaggagggccagagggtcatccagacccagctggagaccctgaaggaggtgtgggccgacatcatgagcagctctgtgcacgcccagagcaccctggagagcgtcatcagccagtggaatgactatgtggagaggaagaaccagctggagcagtggatggagagcgtggaccagaagattgagcaccccctgcagccccagcccggcctgaaggagaagtttgtgctgctggaccacctgcagagcatcctgtctgaggccgaggaccacacccgggccctgcacaggctcatcgccaagagccgggagctgtatgagaagacagaagatgagagcttcaaggacacagcccaggaggagctgaagacccagttcaatgacatcatgacagtggccaaggagaagatgaggaaggtggaggagatcgtgaaggaccacctgatgtacctggatgctgtgcatgagttcacagactggctgcacagcgccaaggaggagctgcaccgctggagcgacatgtctggggacagcagcgccacccagaagaagctgagcaagatcaaggagctgattgacagccgggagatcggggccagccggctgagccgggtggagagcctggcccctgaggtgaagcagaacaccacagccagcggctgtgagctgatgcacacagagatgcaggccctgcgggctgactggaagcagtgggaggacagcgtcttccagacccagagctgcctggagaacctggtgtcccagatggccctgtctgagcaggagttcagcggccaggtggcccagctggagcaggccctggagcagttcagcgccctgctgaagacctgggcccagcagctgaccctgctggagggcaagaacacagatgaggagatcgtggagtgctggcacaagggccaggagatcctggatgccctgcagaaggccgagcccaggacagaggacctgaagagccagctgaatgagctgtgccgcttcagccgggacctgagcacctacagcggcaaggtgtctggcctcatcaaggagtacaactgcctgtgcctgcaggccagcaagggctgccagaacaaggagcagatcctgcagcagcgcttcaggaaggccttccgggacttccagcagtggctggtgaatgccaagatcaccacagccaagtgctttgacatcccccagaacatcagcgaggtgtccaccagcctgcagaagatccaggagttcctgtctgagagtgaaaatggccagcacaagctgaacatgatgctgagcaaaggagagctgctgagcaccctgctgaccaaggagaaggccaagggcatccaggccaaggtgacagctgccaaggaggactggaagaacttccacagcaacctgcaccagaaggagagcgccctggagaacctgaagatccagatgaaggactttgaggtgtctgctgagcccatccaggactggctgagcaagacagagaagatggtgcatgagagcagcaaccggctgtatgacctgcctgccaagaggcgggagcagcagaagctgcagagcgtgctggaggagatccactgctatgagccccagctgaaccggctgaaggagaaggcccagcagctgtgggagggccaggccgccagcaagagcttccgccaccgggtgtcccagctgagcagccagtacctggccctgagcaacctgaccaaggagaaggtgtcccggctggaccgcatcgtggccgagcacaaccagttcagcctgggcatcaaggagctgcaggactggatgacagatgccatccacatgctggacagctactgccaccccaccagtgacaagtctgtgctggacagcaggaccctgaagctggaggccctgctgtctgtgaagcaggagaaggagatccagatgaagatgattgtgaccagaggagagagcgtgctgcagaacaccagccctgagggcatccccaccatccagcagcagctgcagagcgtgaaggacatgtgggccagcctgctgtctgctggcatccgctgcaagagccagctggagggcgccctgagcaagtggaccagctaccaggatggagtgcggcagttcagcggctggatggacagcatggaggccaacctgaatgaaagtgagcggcagcacgccgagctgcgggacaagaccaccatgctgggcaaggccaagctgctgaatgaggaggtgctgagctacagcagcctgctggagaccatcgaggtgaagggggccggcatgacagagcactacgtgacccagctggagctgcaggacctgcaggagcgctaccgggccatccaggagcgggccaaggaggccgtgaccaagtctgagaagctggtgcggctgcaccaggagtaccagagggacctgaaggcctttgaggtgtggctgggccaggagcaggagaagctggaccagtacagcgtgctggagggagatgcccacacccatgagaccaccctgcgggacctgcaggagctgcaggtgcactgtgccgagggccaggccctgctgaacagcgtgctgcacaccagagaagatgtgatccccagcggcatcccccaggccgaggaccgggccctggagagcctgcggcaggactggcaggcctaccagcaccggctgtctgagaccaggacccagttcaacaacgtggtgaacaagctgcggctgatggagcagaagttccagcaggtggatgagtggctgaagacagctgaggagaaggtgagccccaggacccggcggcagagcaacagagccaccaaggagatccagctgcaccagatgaagaagtggcatgaggaggtgacagcctacagagatgaggtggaggaggtgggcgcccgggcccaggagatcctggatgagagccacgtgaacagcaggatgggctgccaggccacccagctgaccagccgctaccaggccctgctgctgcaggtgctggagcagatcaagttcctggaggaggagatccagagcctggaggagagcgagagcagcctgagcagctacagcgactggtacggcagcacccacaagaacttcaagaatgtggccaccaagattgacaaggtggacacagtgatgatgggcaagaagctgaagaccctggaggtgctgctgaaggacatggagaagggccacagcctgctgaagagcgcccgggagaagggggagagagctgtgaagtacctggaggagggggaggccgagcggctgaggaaggagatccatgaccacatggagcagctgaaggagctgaccagcacagtgaggaaggagcacatgaccctggagaagggcctgcacctggccaaggagttcagtgacaagtgcaaggccctgacccagtggattgctgagtaccaggagatcctgcacgtgcctgaggagcccaagatggagctgtatgagaagaaggcccagctgagcaagtacaagagcctgcagcagacagtgctgagccatgagcccagcgtgaagtctgtgcgggagaagggggaggccctgctggagctggtgcaggatgtgaccctgaaggacaagattgaccagctgcagagcgactaccaggacctgtgcagcatcggcaaggagcacgtgttcagcctggaggccaaggtgaaggaccacgaggactacaacagcgagctgcaggaggtggagaagtggctgctgcagatgagcggccgcctggtggccccagacctgctggagaccagcagcctggagaccatcacccagcagctggcccaccacaaggccatgatggaggagattgctggctttgaagatcggctgaacaacctgcagatgaagggggacaccctgattggccagtgtgccgaccacctgcaggccaagctgaagcagaatgtgcacgcccacctgcagggcaccaaggacagctacagcgccatctgcagcacagcccagaggatgtaccagagcctggagcacgagctgcagaagcacgtgtcccggcaggacaccctgcagcagtgccaggcctggctgtctgctgtgcagcctgacctggagcccagcccccagccccccctgagcagagctgaggccatcaagcaggtgaagcacttccgggccctgcaggagcaggcccggacctacctggacctgctgtgcagcatgtgtgacctgagcaatgcctctgtgaagaccacagccaaggacatccagcagacagagcagaccatcgagcagaagctggtgcaggcccagaacctgacccagggctgggaggagatcaagcacctgaagtctgagctgtggatctacctgcaggatgctgaccagcagctgcagaacatgaagaggaggcacagcgagctggagctgaacatcgcccagaacatggtgtcccaggtgaaggactttgtgaagaagctgcagagcaagcaggcctctgtgaacaccatcatcgagaaggtgaacaagctgaccaagaaggaggagagccctgagcacaaggagatcaaccacctgaatgaccagtggctggacctgtgccggcagagcaacaacctgtgcctgcagcgggaggaggacctgcagaggacccgggactaccatgactgcatgaatgtggtggaggtgttcctggagaagttcaccacagagtgggacaacctggcccggagtgatgctgagagcacagctgtgcacctggaggccctgaagaagctggccctggccctgcaggagaggaaatatgccatcgaggacctgaaggaccagaagcagaagatgattgagcacctgaacctggatgacaaggagctggtgaaggagcagaccagccacctggagcagcgctggttccagctggaggacctgatcaagaggaagatccaggtgtctgtgaccaacctggaggagctgaatgtggtgcagagccgcttccaggagctgatggagtgggccgaggagcagcagcccaacattgctgaggccctgaagcagagccccccaccagacatggcccagaacctgctgatggaccacctggccatctgcagcgagctggaggccaagcagatgctgctgaagagcctcatcaaggatgctgacagagtgatggctgacctgggcctgaatgaaaggcaggtgatccagaaggccctgagtgatgcccagagccacgtgaactgcctgagtgacctggtgggccagaggaggaagtacctgaacaaggccctgtctgagaagacccagttcctgatggctgtgttccaggccaccagccagatccagcagcacgagaggaagatcatgttccgggagcacatctgcctgctgcctgatgatgtgtccaagcaggtgaagacctgcaagagcgcccaggccagcctgaagacctaccagaatgaggtgacaggcctgtgggcccagggccgggagctgatgaaggaggtgacagagcaggagaagtctgaggtgctgggcaagctgcaggagctgcagagcgtgtatgattctgtgctgcagaagtgcagccaccggctgcaggagctggagaagaacctggtgtccaggaagcacttcaaggaggactttgacaaggcctgccactggctgaagcaggccgacatcgtgaccttccctgagatcaacctgatgaatgaaagcagcgagctgcacacccagctggccaagtaccagaacatcctggagcagagcccagaatatgagaacctgctgctgaccctgcagaggacaggccagaccatcctgcccagcctgaatgaggtggaccacagctacctgtctgagaagctgaatgccctgccccggcagttcaacgtgattgtggccctggccaaggacaagttctacaaggtgcaggaggccatcctggccaggaaggagtatgccagcctcatcgagctgaccacccagagcctgtctgagctggaggcccagttcctgaggatgagcaaggtgcccacagacctggccgtggaggaggccctgagcctgcaggacggctgccgggccatcctggatgaggtggccggcctgggggaggccgtggatgagctgaaccagaagaaggagggcttccgcagcacaggccagccctggcagcctgacaagatgctgcacctggtgaccctgtaccaccggctgaagaggcagacagagcagagggtgtccctgctggaggacaccaccagcgcctaccaggagcacgagaagatgtgccagcagctggagcggcagctgaagtctgtgaaggaggagcagagcaaggtgaatgaggagaccctgcctgctgaggagaagctgaagatgtaccacagcctggccggcagcctgcaggacagcggcatcgtgctgaagagggtgaccatccacctggaggacctggccccccacctggaccccctggcctatgagaaggcccggcaccagatccagagctggcagggcgagctgaagctgctgaccagcgccatcggggagaccgtgacagaatgtgagagcaggatggtgcagagcattgacttccagacagagatgagccgcagcctggactggctgcggcgggtgaaggccgagctgagcggccctgtgtacctggacctgaacctgcaggacatccaggaggagatcaggaagatccagatccaccaggaggaggtgcagagcagcctgcgcatcatgaatgccctgagccacaaggagaaggagaagttcaccaaggccaaggagctgatctctgctgacctggagcacagcctggccgagctgtctgagctggatggagacatccaggaggccctgcggacccggcaggccaccctgacagagatctacagccagtgccagcgctactaccaggtgttccaggccgccaatgactggctggaggatgcccaggagctgctgcagctggccggaaatggcctggatgtggagagcgctgaggagaacctgaagagccacatggagttcttcagcacagaggaccagttccacagcaacctggaggagctgcacagcctggtggccaccctggaccccctcatcaagcccaccgggaaggaggacctggagcagaaggtggccagcctggagctgcggagccagaggatgagccgggacagcggggcccaggtggacctgctgcagcgctgcacagcccagtggcatgactaccagaaggcccgggaggaggtgattgagctgatgaatgacacagagaagaagctgtctgagttcagcctgctgaagaccagcagcagccatgaggccgaggagaagctgtctgagcacaaggccctggtgtctgtggtgaacagcttccacgagaagatcgtggccctggaggagaaggccagccagctggagaagacaggaaatgatgccagcaaggccaccctgagccgctccatgaccaccgtgtggcagcgctggacccggctgcgggctgtggcccaggaccaggagaagatcctggaggatgctgtggatgagtggacaggcttcaacaacaaggtgaagaaggccacagagatgattgaccagctgcaggacaagctgcccggcagcagcgctgagaaggccagcaaggccgagctgctgaccctgctggagtaccatgacacctttgtgctggagctggagcagcagcagagcgccctgggcatgctgcggcagcagaccctgtccatgctgcaggatggagctgcccccaccccaggagaggagccccccctgatgcaggagatcacagccatgcaggaccgctgcctgaacatgcaggagaaggtgaagaccaacgggaagctggtgaagcaggagctgaaggaccgggagatggtggagacccagatcaacagcgtgaagtgctgggtgcaggagaccaaggagtacctgggcaaccccaccattgaaattgatgcccagctggaggagctgcagatcctgctgacagaggccaccaaccaccggcagaacatcgagaagatggccgaggagcagaaggagaagtacctgggcctgtacaccatcctgcccagcgagctgagcctgcagctggccgaggtggccctggacctgaagatccgggaccagatccaggacaagatcaaggaggtggagcagagcaaggccaccagccaggagctgagccggcagatccagaagctggccaaggacctgaccaccatcctgaccaagctgaaggccaagacagacaacgtggtgcaggccaagacagaccagaaggtgctgggggaggagctggatggctgcaacagcaagctgatggagctggatgctgctgtgcagaagttcctggagcagaatggccagctgggcaagcccctggccaagaagattggcaagctgacagagctgcaccagcagaccatccggcaggccgagaaccggctgagcaagctgaaccaggccgccagccacctggaggagtacaatgagatgctggagctgatcctgaagtggattgagaaggccaaggtgctggcccacggcaccatcgcctggaacagcgccagccagctgcgggagcagtacatcctgcaccagaccctgctggaggagagcaaggagattgattctgagctggaggccatgacagagaagctgcagtacctgacctctgtgtactgcacagagaagatgagccagcaggtggccgagctgggccgggagacagaggagctgcggcagatgatcaagatccggctgcagaacctgcaggatgctgccaaggacatgaagaagtttgaagctgagctgaagaagctgcaggccgccctggagcaggcccaggccaccctgaccagccctgaggtgggccgcctgagcctgaaggagcagctgagccaccggcagcacctgctgtctgagatggagagcctgaagcccaaggtgcaggccgtgcagctgtgccagagcgccctgcgcatcccagaagatgtggtggccagcctgcccctgtgccacgccgccctgcggctgcaggaggaggccagccggctgcagcacacagccatccagcagtgcaacatcatgcaggccgctgtggtgcagtatgagcagtatgagcaggagatgaagcacctgcagcagctgattgagggcgcccaccgggagattgaggacaagcctgtggccaccagcaacatccaggagctgcaggcccagatcagcagacatgaggagctggcccagaagatcaagggctaccaggagcagatcgccagcctgaacagcaagtgcaagatgctgaccatgaaggccaagcacgccaccatgctgctgactgtgacagaggtggagggcctggccgagggcacagaggacctggatggagagctgctgcccacccccagcgcccaccccagcgtggtgatgatgacagctggccgctgccacaccctgctgagccctgtgacagaggagagcggggaggagggcaccaacagcgagatcagcagccccccagcctgccgcagccccagccctgtggccaacacagatgcctctgtgaaccaggacatcgcctactaccaggccctgtctgctgagcggctgcagacagatgctgccaagatccaccccagcaccagcgccagccaggagttctatgagcccggcctggagcccagcgccacagccaagctgggggacctgcagaggtcctgggagaccctgaagaatgtcatcagcgagaagcagaggaccctgtatgaggccctggagcggcagcagaagtaccaggacagcctgcagagcatcagcaccaagatggaggccatcgagctgaagctgtctgagagccctgagcccggccgcagccctgagagccagatggccgagcaccaggccctgatggatgagatcctgatgctgcaggatgagatcaatgagctgcagagcagcctggccgaggagctggtgtctgagagctgtgaggccgaccctgctgagcagctggccctgcagagcaccctgactgtgctggccgagaggatgagcaccatccgcatgaaggccagcggcaagaggcagctgctggaggagaagctgaatgaccagctggaggagcagaggcaggagcaggccctgcagcgctaccgctgtgaggctgatgagctggacagctggctgctgagcaccaaggccaccctggacacagccctgagcccccccaaggagcccatggacatggaggcccagctgatggactgccagaacatgctggtggagattgagcagaaggtggtggccctgtctgagctgtctgtgcacaatgaaaacctgctgctggagggcaaggcccacaccaaggatgaggccgagcagctggccggcaagctgcggcggctgaagggcagcctgctggagctgcagagggccctgcatgacaagcagctgaacatgcagggcacagcccaggagaaggaggagagtgatgtggacctgacagccacccagagccctggggtgcaggagtggctggcccaggcccggaccacctggacccagcagaggcagagcagcctgcagcagcagaaggagctggagcaggagctggccgagcagaagagcctgctgcggtctgtggccagcagaggagaggagatcctgatccagcacagcgctgctgagaccagcggagatgctggggagaagccagatgtgctgagccaggagctgggcatggagggggagaagagcagcgctgaggaccagatgaggatgaagtgggagagcctgcaccaggagttcagcaccaagcagaagctgctgcagaatgtgctggagcaggagcaggagcaggtgctgtacagccggcccaaccggctgctgagcggcgtgcccctgtacaagggagatgtgcccacccaggacaagtctgctgtgaccagcctgctggatggcctgaaccaggcctttgaggaggtgagcagccagagcggcggggccaagaggcagagcatccacctggagcagaagctgtatgatggagtgtctgccaccagcacctggctggatgatgtggaggagcggctgtttgtggccacagccctgctgcctgaggagacagagacctgcctcttcaaccaggagatcctggccaaggacatcaaggagatgtctgaggagatggacaagaacaagaacctcttcagccaggccttcccagaaaatggagacaacagagatgtgattgaggacaccctgggctgcctgctgggccgcctgagcctgctggacagcgtggtgaaccagcgctgccaccagatgaaggagcggctgcagcagatcctgaacttccagaatgacctgaaggtgctcttcaccagcctggccgacaacaagtacatcatcctgcagaagctggccaacgtgtttgagcagcctgtggccgagcagatcgaggccatccagcaggccgaggatggcctgaaggagtttgatgctggcatcatcgagctgaagagaagaggagacaagctgcaggtggagcagcccagcatgcaggagctgagcaagctgcaggacatgtatgatgagctgatgatgatcatcggcagcagaagaagtggcctgaaccagaacctgaccctgaagagccagtatgagcgggccctgcaggacctggccgacctgctggagaccggccaggagaagatggccggggaccagaagatcatcgtgagcagcaaggaggagatccagcagctgctggacaagcacaaggagtacttccagggcctggagagccacatgatcctgacagagaccctcttcaggaagatcatcagctttgctgtgcagaaggagacccagttccacacagagctgatggcccaggccagcgctgtgctgaagagggcccacaagaggggcgtggagctggagtacatcctggagacctggagccacctggatgaggaccagcaggagctgagccggcagctggaggtggtggagagcagcatccccagcgtgggcctggtggaggagaatgaagatcggctgattgaccgcatcaccctgtaccagcacctgaagagcagcctgaatgagtaccagcccaagctgtaccaggtgctggatgatggcaagaggctgctgatcagcatcagctgcagcgacctggagagccagctgaaccagctgggggagtgctggctgagcaacaccaacaagatgagcaaggagctgcaccggctggagaccatcctgaagcactggacccgctaccagagcgagagcgctgacctgatccactggctgcagagcgccaaggaccggctggagttctggacccagcagagcgtgacagtgccccaggagctggagatggtgcgggaccacctgaatgccttcctggagttcagcaaggaggtggatgcccagagcagcctgaagagctctgtgctgagcacaggcaaccagctgctgcggctgaagaaggtggacacagccaccctgcggtctgagctgagcagaattgacagccagtggacagacctgctgaccaacatcccagctgtgcaggagaagctgcaccagctgcagatggacaagctgcccagcagacatgccatcagcgaggtgatgtcctggatcagcctgatggagaatgtcatccagaaggatgaggacaacatcaagaacagcatcggctacaaggccatccacgagtacctgcagaagtacaagggcttcaagattgacatcaactgcaagcagctgactgtggactttgtgaaccagagcgtgctgcagatcagcagccaggatgtggagagcaagagaagtgacaagacagactttgctgagcagctgggcgccatgaacaagtcctggcagatcctgcagggcctggtgacagagaagatccagctgctggagggcctgctggagagctggagcgaatatgagaacaacgtgcagtgcctgaagacctggtttgagacccaggagaagaggctgaagcagcagcacagaattggagaccaggcctctgtgcagaatgccctgaaggactgccaggacctggaggacctgatcaaggccaaggagaaggaggtggagaagattgagcagaatggcctggccctgatccagaacaagaaggaggatgtgagcagcatcgtgatgagcaccctgcgggagctgggccagacctgggccaacctggaccacatggtgggccagctgaagatcctgctgaagtctgtgctggaccagtggagcagccacaaggtggcctttgacaagatcaacagctacctgatggaggcccgctacagcctgagccgcttccggctgctgaccggcagcctggaggccgtgcaggtgcaggtggacaacctgcagaacctgcaggatgacctggagaagcaggagaggagcctgcagaagtttggcagcatcaccaaccagctgctgaaggagtgccacccccctgtgacagagaccctgaccaacaccctgaaggaggtgaacatgcgctggaacaacctgctggaggagattgctgagcagctgcagagcagcaaggccctgctgcagctgtggcagcgctacaaggactacagcaagcagtgtgccagcacagtgcagcagcaggaggacaggaccaatgagctgctgaaggccgccaccaacaaggacattgctgatgatgaggtggccacctggatccaggactgcaatgacctgctgaagggcctgggcaccgtgaaggacagcctcttcttcctgcacgagctgggggagcagctgaagcagcaggtggatgccagcgctgccagcgccatccagagcgaccagctgagcctgagccagcacctgtgtgccctggagcaggccctgtgcaagcagcagaccagcctgcaggccggcgtgctggactatgagacctttgccaagagcctggaggccctggaggcctggatcgtggaggccgaggagatcctgcagggccaggaccccagccacagcagtgacctgagcaccatccaggagaggatggaggagctgaagggccagatgctgaagttcagctccatggccccagacctggaccggctgaatgagctgggctaccgcctgcccctgaatgacaaggagatcaagaggatgcagaacctgaacagacactggagcctcatcagcagccagaccacagagcgcttcagcaagctgcagagcttcctgctgcagcaccagaccttcctggagaagtgtgagacctggatggagttcctggtgcagacagagcagaagctggccgtggagatcagcggcaactaccagcacctgctggagcagcagagggcccacgagctgttccaggccgagatgttcagccggcagcagatcctgcacagcatcatcattgatggccagaggctgctggagcagggccaggtggatgacagagatgagttcaacctgaagctgaccctgctgagcaaccagtggcagggcgtcatcagaagagcccagcagaggcggggcatcatcgacagccagatccggcagtggcagcgctaccgggagatggccgagaagctgaggaagtggctggtggaggtgtcctacctgcccatgagcggcctgggctctgtgcccatccccctgcagcaggcccggaccctgtttgatgaggtgcagttcaaggagaaggtgttcctgcggcagcagggcagctacatcctgactgtggaggccggcaagcagctgctgctgtctgctgacagcggggctgaggccgccctgcaggccgagctggccgagatccaggagaagtggaagagcgcctccatgaggctggaggagcagaagaagaagctggccttcctgctgaaggactgggagaagtgtgagaagggcattgctgacagcctggagaagctgcggaccttcaagaagaagctgagccagagcctgcctgaccaccacgaggagctgcatgctgagcagatgcgctgcaaggagctggagaatgctgtgggctcctggacagatgacctgacccagctgagcctgctgaaggacaccctgagcgcctacatctctgcagatgacatcagcatcctgaatgaaagagtggagctgctgcagaggcagtgggaggagctgtgccaccagctgagcctgcggcggcagcagattggagagcggctgaatgagtgggccgtgttcagcgagaagaacaaggagctgtgtgagtggctgacccagatggagagcaaggtgtcccagaatggagacatcctgattgaggagatgattgagaagctgaagaaggactaccaggaggagatcgccatcgcccaggagaacaagatccagctgcagcagatgggagagcggctggccaaggccagccatgagagcaaggccagcgagattgagtacaagctgggcaaggtgaatgaccgctggcagcacctgctggacctgattgctgcccgggtgaagaagctgaaggagaccctggtggccgtgcagcagctggacaagaacatgagcagcctgcggacctggctggcccacatcgagagcgagctggccaagcccatcgtgtatgacagctgcaacagcgaggagatccagaggaagctgaatgagcagcaggagctgcagagggacatcgagaagcacagcactggagtggcctctgtgctgaacctgtgtgaggtgctgctgcatgactgtgatgcctgtgccacagatgctgaatgtgacagcatccagcaggccaccaggaacctggaccggcgctggaggaacatctgtgccatgtccatggagcggcggctgaagattgaggagacctggaggctgtggcagaagttcctggatgactacagcagatttgaggactggctgaagagcagcgagaggacagctgccttccccagcagcagcggggtcatctacacagtggccaaggaggagctgaagaagtttgaggccttccagaggcaggtgcatgaatgtctgacccagctggagctgatcaacaagcagtaccgccgcctggccagagaaaatagaacagacagcgcctgcagcctgaagcagatggtgcatgagggcaaccagcgctgggacaacctgcagaagagggtgaccagcatcctgcggcggctgaagcacttcatcggccagcgggaggagtttgaaacagcccgggacagcatcctggtgtggctgacagagatggacctgcagctgaccaacatcgagcacttctctgaatgtgatgtgcaggccaagatcaagcagctgaaggccttccagcaggagatcagcctgaaccacaacaagattgagcagatcatcgcccagggcgagcagctgattgagaagtctgagcccctggatgctgccatcatcgaggaggagctggatgagctgcggcgctactgccaggaggtgtttggccgggtggagcgctaccacaagaagctgatccggctgcccctgcctgatgatgaacatgacctgagtgaccgggagctggagctggaggacagcgctgccctgagtgacctgcactggcatgacagatctgctgacagcctgctgagcccccagcccagcagcaacctgagcctgagcctggcccagcccctgcggtctgagaggagcggccgggacaccccagcctctgtggacagcatccccctggagtgggaccatgactatgacctgagccgggacctggagagcgccatgagccgggccctgcccagtgaagatgaggagggccaggatgacaaggacttctacctgcggggagctgtgggcctgagcggggaccacagcgccctggagagccagatccggcagctgggcaaggccctggatgacagccgcttccagatccagcagacagagaacatcatccgcagcaagacccccaccggccctgagctggacaccagctacaagggctacatgaagctgctgggagaatgtagcagcagcattgacagcgtgaagaggctggagcacaagctgaaggaggaggaggagagcctgcccggctttgtgaacctgcacagcacagagacccagacagctggggtcatcgaccgctgggagctgctgcaggcccaggccctgagcaaggagctgaggatgaagcagaacctgcagaagtggcagcagttcaacagcgacctgaacagcatctgggcctggctgggggacacagaggaggagctggagcagctgcagaggctggagctgagcacagacatccagaccatcgagctgcagatcaagaagctgaaggagctgcagaaggctgtggaccacaggaaggccatcatcctgagcatcaacctgtgcagccctgagttcacccaggccgacagcaaggagagccgggacctgcaggaccggctgagccagatgaatggccgctgggacagagtgtgcagcctgctggaggagtggaggggcctgctgcaggatgccctgatgcagtgccagggcttccacgagatgagccacggcctgctgctgatgctggagaacatcgacaggaggaagaatgagatcgtgcccatcgacagcaacctggatgctgagatcctgcaggaccaccacaagcagctgatgcagatcaagcatgagctgctggagagccagctgcgggtggccagcctgcaggacatgagctgccagctgctggtgaatgctgagggcacagactgcctggaggccaaggagaaggtgcacgtgattggcaaccggctgaagctgctgctgaaggaggtgagccgccacatcaaggagctggagaagctgctggatgtgagcagcagccagcaggacctgagctcctggagcagcgcagatgagctggacaccagcggctctgtgagccccaccagcggccgcagcacccccaaccggcagaagaccccccggggcaagtgcagcctgagccagcccggccccagcgtgagcagcccccacagccgcagcaccaagggcggcagtgacagcagcctgtctgagcccggccctggccgcagcggccggggcttcctgttccgggtgctgcgggccgccctgcccctgcagctgctgctgctgctgctgattggcctggcctgcctggtgcccatgtctgaggaggactacagctgtgccctgagcaacaactttgcccgctccttccaccccatgctgcgctacaccaacggccccccacccctgtag

SEQ ID NO: 171269 - DNA, 25230 bp, synthetic construct
  misc_feature 1..25230: note = Description of Artificial Sequence: Synthetic coding sequence
  source 1..25230: mol_type = other DNA
atggccaccagcagaggagccagccgctgcccccgggacatcgccaacgtgatgcagaggctgcaggatgagcaggagatcgtgcagaagaggaccttcaccaagtggatcaacagccacctggccaagaggaagccacccatggtggtggatgacctgtttgaggacatgaaggatggagtgaagctgctggccctgctggaggtgctgagcggccagaagctgccctgtgagcagggccgcaggatgaagagaattcatgctgtggccaacatcggcacagccctgaagttcctggagggcaggaagatcaagctggtgaacatcaacagcacagacattgctgatggccggcccagcatcgtgctgggcctgatgtggaccatcatcctgtacttccagatcgaggagctgaccagcaacctgccccagctgcagagcctgagcagcagcgccagctctgtggacagcatcgtgtcctctgagacccccagcccccccagcaagaggaaggtgaccaccaagatccagggcaatgccaagaaggccctgctgaagtgggtgcagtacacagctgggaagcagacaggcatcgaggtgaaggactttgggaagtcctggaggtctggagtggccttccacagcgtcatccacgccatccggcctgagctggtggacctggagaccgtgaagggccgcagcaaccgggagaacctggaggatgccttcaccatcgccgagacagagctgggcatcccccggctgctggaccctgaagatgtggatgtggacaagccagatgagaagagcatcatgacctacgtggcccagttcctgaagcactacccagacatccacaatgccagcacagatggccaggaggatgatgagatcctgcccggcttccccagctttgccaacagcgtgcagaacttcaagagagaagatagagtcatcttcaaggagatgaaggtgtggattgagcagtttgagcgggacctgacccgggcccagatggtggagagcaacctgcaggacaagtaccagagcttcaagcacttccgggtgcagtatgagatgaagaggaagcagatcgagcacctgatccagcccctgcacagagatggcaagctgagcctggaccaggccctggtgaagcagagctgggacagagtgaccagccggctgtttgactggcacatccagctggacaagagcctgcctgcccccctgggcaccatcggggcctggctgtacagagctgaggtggccctgcgggaggagatcaccgtgcagcaggtgcatgaggagacagccaacaccatccagaggaagctggagcagcacaagaggaagctgagaaatgtgattgacctgctgcagaacacagatgcccacaagagggccttccacgagatctaccgcaccaggtctgtgaatggcatccctgtgcccccagaccagctggaggacatggccgagcgcttccactttgtgagcagcaccagcgagctgcacctgatgaagatggagttcctggagctgaagtaccgcctgctgagcctgctggtgctggccgagagcaagctgaagtcctggatcatcaagtatggaagaagagagagcgtggagcagctgctgcagaactacgtgtccttcatcgagaacagcaagttctttgagcagtatgaggtgacctaccagatcctgaagcagacagctgagatgtatgtgaaggcagatggctctgtggaggaggccgagaatgtgatgaagttcatgaatgagaccacagcccagtggaggaacctgtctgtggaggtgcgctctgtgcgctccatgctggaggaggtgatcagcaactgggacagatatggcaacacagtggccagcctgcaggcctggctggaggatgctgagaagatgctgaaccagagtgaaaatgccaagaaggacttcttcaggaacctgccccactggatccagcagcacacagccatgaatgatgctggcaacttcctgattgagacctgtgatgagatggtgtcccgggacctgaagcagcagctgctgctgctgaatggccgctggagggagctgttcatggaggtgaagcagtatgcccaggctgatgagatggacaggatgaagaaggagtacacagactgtgtggtgaccctgagcgcctttgccacagaggcccacaagaagctgtctgagcccctggaggtgtccttcatgaatgtgaagctgctgatccaggacctggaggacatcgagcagagggtgcctgtgatggatgcccagtacaagatcatcaccaagacagcccacctgatcaccaaggagagcccccaggaggagggcaaggagatgtttgccaccatgagcaagctgaaggagcagctgaccaaggtgaaggagtgctacagccccctgctgtatgagagccagcagctgctgatccccctggaggagctggagaagcagatgaccagcttctatgacagcctgggcaagatcaatgagatcatcaccgtgctggagcgggaggcccagagcagcgccctcttcaagcagaagcaccagctgcgcatcctgaagtgcaagtggtgcaacagcagccagaagatgaccctgtgcctggtgctgggctccatgatctccatgctgagcacagccaagatcaccatcgccggctacaagtctgaggtggaggtgtctgagctgctggcctgccaggagaactgcaagaagaccctgaccctcatcgagaagggcagccagagcgtgcagaagtttgtgaccctgagcaatgtgctgaagcactttgaccagacccggctgcagacagactgccgctacagctgctgcttctctgtgatgaggaagcagcaccacatcatgattgtgttccacatcaagtccatggtgaagaagacaggagactggaagaagcacgtggagaccaacagccggctgatgaagaagtttgaggagagcagagctgagctggagaaggtgctgagaattgcccaggagggcctggaggagaagggggaccctgaggagctgctgcggcggcacacagagttcttcagccagctggaccagagggtgctgaatgccttcctgaaggcctgtgatgagctgacagacatcctgcctgagcaggagcagcagggcctgcaggaggccgtgaggaagctgcacaagcagtggaaggacctgcagggcgaggccccctaccacctgctgcacctgaagattgatgtggagaagaaccgcttcctggcctctgtggaggagtgcaggacagagctggaccgggagaccaagctgatgccccaggagggcagcgagaagatcatcaaggagcacagggtcttcttcagtgacaagggcccccaccacctgtgtgagaagaggctgcagctgattgaggagctgtgtgtgaagctgcctgtgcgggaccctgtgcgggacaccccaggcacctgccacgtgaccctgaaggagctgcgggccgccatcgacagcacctacaggaagctgatggaggaccctgacaagtggaaggactacaccagccgcttcagcgagttcagctcctggatcagcaccaatgagacccagctgaagggcatcaagggggaggccatcgacacagccaaccacggggaggtgaagagagctgtggaggagatcagaaatggagtgaccaagagaggagagaccctgtcctggctgaagagccggctgaaggtgctgacagaggtgtccagtgaaaatgaggcccagaagcagggagatgagctggccaagctgagcagcagcttcaaggccctggtgaccctgctgtctgaggtggagaagatgctgagcaactttggagactgtgtgcagtacaaggagatcgtgaagaacagcctggaggagctgatcagcggcagcaaggaggtgcaggagcaggccgagaagatcctggacacagagaacctgtttgaggcccagcagctgctgctgcaccaccagcagaagaccaagaggatcagcgccaagaagagagatgtgcagcagcagatcgcccaggcccagcagggcgagggcggcctgcctgaccggggccacgaggagctgaggaagctggagagcaccctggatggcctggagaggagccgggagcggcaggagcggcgcatccaggtgaccctgaggaagtgggagagatttgagaccaacaaggagaccgtggtgcgctacctgttccagacaggcagcagccatgagcgcttcctgtccttcagcagcctggagagcctgagcagcgagctggagcagaccaaggagttcagcaagaggacagagagcattgctgtgcaggccgagaacctggtgaaggaggccagcgagatccccctgggcccccagaacaagcagctgctgcagcagcaggccaagagcatcaaggagcaggtgaagaagctggaggacaccctggaggaggagtatgtgattgacaacaagaccatggagatggtgaagaccaagtgggaccacttcggcagcaactttgagaccctgtctgtgtggatcacagagaaggagaaggagctgaatgccctggagaccagcagcagcgccatggacatgcagatcagccagatcaaggtgaccatccaggagattgagagcaagctgagcagcatcgtgggcctggaggaggaggcccagagctttgcccagtttgtgaccaccggggagagcgcccgcatcaaggccaagctgacccagatccgccgctacggggaggagctgcgggagcacgcccagtgcctggagggcaccatcctgggccacctgagccagcagcagaagtttgaggagaacctgaggaagatccagcagagcgtgtctgaatttgaggacaagctggccgtgcccatcaagatctgcagcagcgccacagagacctacaaggtgctgcaggagcacatggacctgtgccaggccctggagagcctgagcagcgccatcacagccttcagcgccagcgccaggaaggtggtgaacagagacagctgtgtgcaggaggccgccgccctgcagcagcagtatgaggacatcctgcggcgggccaaggagcggcagacagccctggagaacctgctggcccactggcagaggctggagaaggagctgagcagcttcctgacctggctggagcggggggaggccaaggccagcagccctgagatggacatctctgctgacagagtgaaggtggaggccagcaaggatgatgtgaagatgatgaagctgcacctggagcagctggatgagcgctggagggacctgccccagatcatcaacaagaggatcaacttcctgcagagcgtggtggccgagcaccagcagtttgatgagctgctgctgtccttctctgtgtggatcaagctgttcctgtctgagctgcagaccaccagcgagatcagcatcatggaccaccaggtggccctgaccaggcacaaggaccatgctgctgaggtggagagcaagaagggggagctgcagagcctgcagggccacctggccaagctgggcagcctgggccgggcagaggacctgcacctgctgcagggcaaggccgaggactgcttccagctgtttgaggaggccagccaggtggtggagcggcggcagctggccctgagccacctggccgagttcctgcagagccacgccagcctgagcggcatcctgcggcagctgcggcagacagtggaggccaccaacagcatgaacaagaatgaaagtgacctgattgagaaggacctgaatgatgccctgcagaatgccaaggccctggagagcgctgctgtgtccctggatggcatcctgagcaaggcccagtaccacctgaagattggcagcagcgagcagaggaccagctgccgggccacagctgaccagctgtgtggggaggtggagcgcatccagaacctgctgggcaccaagcagagcgaggctgatgccctggccgtgctgaagaaggccttccaggaccagaaggaggagctgctgaagagcattgaggacatcgaggagaggacagacaaggagcggctgaaggagcccacccggcaggccctgcagcagaggctgcgggtcttcaaccagctggaggatgagctgaacagccatgagcacgagctgtgctggctgaaggacaaggccaagcagatcgcccagaaggatgtggcctttgcccctgaggtggaccgggagatcaaccggctggaggtgacctgggatgacaccaagaggctcatccacgagaaccagggccagtgctgcggcctgattgacctgatgagggagtaccagaacctgaagtctgctgtgtccaaggtgctggagaatgccagcagcgtcatcgtgaccaggaccaccatcaaggaccaggaggacctgaagtgggccttcagcaagcatgaaacagccaagaacaagatgaactacaagcagaaggacctggacaacttcaccagcaagggcaagcacctgctgtctgagctgaagaagatccacagcagtgacttcagcctggtgaagacagacatggagagcacagtggacaagtggctggatgtgtctgagaagctggaggagaacatggaccggctgcgggtgtccctgagcatctgggatgatgtgctgagcaccagagatgaaattgagggctggagcaacaactgtgtgccccagatggccgagaacatcagcaacctggacaaccacctgcgggcagaggagctgctgaaggagtttgaaagtgaggtgaagaacaaggccctgcggctggaggagctgcacagcaaggtgaatgacctgaaggagctgaccaagaacctggagaccccaccagacctgcagttcatcgaggccgacctgatgcagaagctggagcacgccaaggagatcacagaggtggccaagggcaccctgaaggacttcaccgcccagagcacccaggtggagaagttcatcaatgacatcaccacctggttcaccaaggtggaggagagcctgatgaactgtgcccagaatgagacctgtgaggccctgaagaaggtgaaggacatccagaaggagctgcagagccagcagagcaacatcagcagcacccaggagaacctgaacagcctgtgcaggaagtaccacagcgctgagctggagagcctgggccgggccatgacaggcctcatcaagaagcatgaggccgtgtcccagctgtgcagcaagacccaggccagcctgcaggagagcctggagaagcacttcagcgaggagagcatgcaggagttccaggagtggttcctgggcgccaaggccgccgccaaggagagcagtgacagaactggagacagcaaggtgctggaggccaagctgcatgacctgcagcagaacatcctggacagcgtgtctgatggccagagcaagctggatgctgtgacccaggagggccagaccctgtatgcccacctgagcaagcagatcgtgagcagcatccaggagcagatcaccaaggccaatgaggagttccaggccttcctgaagcagtgcctgaaggacaagcaggccctgcaggactgtgccagcgagctgggcagctttgaggaccagcacaggaagctgaacctgtggattcatgagatggaggagcgcttcaacacagagaacctgggggagagcaagcagcacatccctgagaagaagaatgaggtgcacaaggtggagatgttcctgggggagctgctggccgcccgggagagcctggacaagctgagccagaggggccagctgctgtctgaggagggccacggggccggccaggagggccgcctgtgcagccagctgctgaccagccaccagaacctgctgaggatgaccaaggagaagctgcggagctgccaggtggccctgcaggagcacgaggccctggaggaggccctgcagagcatgtggttctgggtgaaggccatccaggaccggctggcctgtgccgagagcaccctgggcagcaaggacaccctggagaagaggctgagccagatccaggacatcctgctgatgaagggggagggggaggtgaagctgaacatggccatcggcaagggggagcaggccctgcggagcagcaacaaggagggccagagggtcatccagacccagctggagaccctgaaggaggtgtgggccgacatcatgagcagctctgtgcacgcccagagcaccctggagagcgtcatcagccagtggaatgactatgtggagaggaagaaccagctggagcagtggatggagagcgtggaccagaagattgagcaccccctgcagccccagcccggcctgaaggagaagtttgtgctgctggaccacctgcagagcatcctgtctgaggccgaggaccacacccgggccctgcaccggctgattgccaagagccgggagctgtatgagaagacagaagatgagagcttcaaggacacagcccaggaggagctgaagacccagttcaatgacatcatgacagtggccaaggagaagatgaggaaggtggaggagatcgtgaaggaccacctgatgtacctggatgctgtgcatgagttcacagactggctgcacagcgccaaggaggagctgcaccgctggagcgacatgtctggggacagcagcgccacccagaagaagctgagcaagatcaaggagctgattgacagccgggagattggagccagccggctgagccgggtggagagcctggcccctgaggtgaagcagaacaccacagccagcggctgtgagctgatgcacacagagatgcaggccctgcgggctgactggaagcagtgggaggacagcgtcttccagacccagagctgcctggagaacctggtgtcccagatggccctgtctgagcaggagttcagcggccaggtggcccagctggagcaggccctggagcagttcagcgccctgctgaagacctgggcccagcagctgaccctgctggagggcaagaacacagatgaggagatcgtggagtgctggcacaagggccaggagatcctggatgccctgcagaaggccgagcccaggacagaggacctgaagagccagctgaatgagctgtgccgcttcagccgggacctgagcacctacagcggcaaggtgtctggcctcatcaaggagtacaactgcctgtgcctgcaggccagcaagggctgccagaacaaggagcagatcctgcagcagcgcttcaggaaggccttccgggacttccagcagtggctggtgaatgccaagatcaccacagccaagtgctttgacatcccccagaacatcagcgaggtgtccaccagcctgcagaagatccaggagttcctgtctgagagtgaaaatggccagcacaagctgaacatgatgctgagcaagggggagctgctgagcaccctgctgaccaaggagaaggccaagggcatccaggccaaggtgacagctgccaaggaggactggaagaacttccacagcaacctgcaccagaaggagagcgccctggagaacctgaagatccagatgaaggactttgaggtgtctgctgagcccatccaggactggctgagcaagacagagaagatggtgcatgagagcagcaaccggctgtatgacctgcctgccaagagaagagagcagcagaagctgcagagcgtgctggaggagatccactgctatgagccccagctgaaccggctgaaggagaaggcccagcagctgtgggagggccaggccgccagcaagagcttccgccaccgggtgtcccagctgagcagccagtacctggccctgagcaacctgaccaaggagaaggtgtcccggctggacagaattgtggccgagcacaaccagttcagcctgggcatcaaggagctgcaggactggatgacagatgccatccacatgctggacagctactgccaccccaccagtgacaagtctgtgctggacagcaggaccctgaagctggaggccctgctgtctgtgaagcaggagaaggagatccagatgaagatgattgtgaccagaggagagagcgtgctgcagaacaccagccctgagggcatccccaccatccagcagcagctgcagagcgtgaaggacatgtgggccagcctgctgtctgctggcatccgctgcaagagggtgcggctgccctgtgcctacatcgccctgaagctgcgggtgcaccagcacgccgagctgcgggacaagaccaccatgctgggcaaggccaaggaggccgtgaccaagtctgagaagctggtgcggctgcaccaggagtaccagagggacctgaaggcctttgaggtgtggctgggccaggagcaggagaagctggaccagtacagcgtgctggagggagatgcccacacccatgagaccaccctgcgggacctgcaggagctgcaggtgcactgtgccgagggccaggccctgctgaacagcgtgctgcacacccgggaggatgtgatccccagcggcatcccccaggctgaagatcgggccctggagagcctgcggcaggactggcaggcctaccagcaccggctgtctgagaccaggacccagttcaacaacgtggtgaacaagctgcggctgatggagcagaagttccagcaggtggatgagtggctgaagacagctgaggagaaggtgagccccaggacccggcggcagagcaacagagccaccaaggagatccagctgcaccagatgaagaagtggcatgaggaggtgacagcctacagagatgaggtggaggaggtgggcgcccgggcccaggagatcctggatgagagccacgtgaacagcaggatgggctgccaggccacccagctgaccagccgctaccaggccctgctgctgcaggtgctggagcagatcaagttcctggaggaggagatccagagcctggaggagagcgagagcagcctgagcagctacagcgactggtacggcagcacccacaagaacttcaagaatgtggccaccaagattgacaaggtggacacagtgatgatgggcaagaagctgaagaccctggaggtgctgctgaaggacatggagaagggccacagcctgctgaagagcgcccgggagaagggggagagagctgtgaagtacctggaggagggggaggccgagcggctgaggaaggagatccatgaccacatggagcagctgaaggagctgaccagcacagtgaggaaggagcacatgaccctggagaagagcctgcagcagacagtgctgagccatgagcccagcgtgaagtctgtgcgggagaagggggaggccctgctggagctggtgcaggatgtgaccctgaaggacaagattgaccagctgcagagcgactaccaggacctgtgcagcatcggcaaggagcacgtgttcagcctggaggccaaggtgaaggaccacgaggactacaacagcgagctgcaggaggtggagaagtggctgctgcagatgagcggccgcctggtggccccagacctgctggagaccagcagcctggagaccatcacccagcagctggcccaccacaagatgtaccagagcctggagcacgagctgcagaagcacgtgtcccggcaggacaccctgcagcagtgccaggcctggctgtctgctgtgcagcctgacctggagcccagcccccagccccccctgagcagagctgaggccatcaagcaggtgaagcacttccgggccctgcaggagcaggcccggacctacctggacctgctgtgcagcatgtgtgacctgagcaatgcctctgtgaagaccacagccaaggacatccagcagacagagcagaccatcgagcagaagctggtgcaggcccagaacctgacccagggctgggaggagatcaagcacctgaagtctgagctgtggatctacctgcaggatgctgaccagcagctgcagaacatgaagagaagacacagcgagctggagctgaacatcgcccagaacatggtgtcccaggtgaaggactttgtgaagaagctgcagagcaagcaggcctctgtgaacaccatcatcgagaaggtgaacaagctgaccaagaaggaggagagccctgagcacaaggagatcaaccacctgaatgaccagtggctggacctgtgccggcagagcaacaacctgtgcctgcagcgggaggaggacctgcagaggacccgggactaccatgactgcatgaatgtggtggaggtgttcctggagaagttcaccacagagtgggacaacctggcccggagtgatgctgagagcacagctgtgcacctggaggccctgaagaagctggccctggccctgcaggagaggaaatatgccatcgaggacctgaaggaccagaagcagaagatgattgagcacctgaacctggatgacaaggagctggtgaaggagcagaccagccacctggagcagcgctggttccagctggaggacctgatcaagaggaagatccaggtgtctgtgaccaacctggaggagctgaatgtggtgcagagccgcttccaggagctgatggagtgggccgaggagcagcagcccaacattgctgaggccctgaagcagagccccccaccagacatggcccagaacctgctgatggaccacctggccatctgcagcgagctggaggccaagcagatgctgctgaagagcctcatcaaggatgctgacagagtgatggctgacctgggcctgaatgaaaggcaggtgatccagaaggccctgagtgatgcccagagccacgtgaactgcctgagtgacctggtgggccagaggaggaagaagcacttcaaggaggactttgacaaggcctgccactggctgaagcaggccgacatcgtgaccttccctgagatcaacctgatgaatgaatcttctgagctgcacacccagctggccaagtaccagaacatcctggagcagagcccagaatatgagaacctgctgctgaccctgcagaggacaggccagaccatcctgcccagcctgaatgaggtggaccacagctacctgtctgagaagctgaatgccctgccccggcagttcaacgtcatcgtggccctggccaaggacaagttctacaaggtgcaggaggccatcctggccaggaaggagtatgccagcctgattgagctgaccacccagagcctgtctgagctggaggcccagttcctgaggatgagcaaggtgcccacagacctggccgtggaggaggccctgagcctgcaggacggctgccgggccatcctggatgaggtggccggcctgggggaggccgtggatgagctgaaccagaagaaggagggcttccgcagcacaggccagccctggcagcctgacaagatgctgcacctggtgaccctgtaccaccggctgaagaggcagacagagcagagggtgtccctgctggaggacaccaccagcgcctaccaggagcacgagaagatgtgccagcagctggagcggcagctgaagtctgtgaaggaggagcagagcaaggtgaatgaggagaccctgcctgctgaggagaagctgaagatgtaccacagcctggccggcagcctgcaggacagcggcatcgtgctgaagagggtgaccatccacctggaggacctggccccccacctggaccccctggcctatgagaaggcccggcaccagatccagagctggcagggcgagctgaagctgctgaccagcgccatcggggagaccgtgacagaatgtgagagcaggatggtgcagagcattgacttccagacagagatgagccgcagcctggactggctgcggcgggtgaaggccgagctgagcggccctgtgtacctggacctgaacctgcaggacatccaggaggagatcaggaagatccagatccaccaggaggaggtgcagagcagcctgcgcatcatgaatgccctgagccacaaggagaaggagaagttcaccaaggccaaggagctgatctctgctgacctggagcacagcctggccgagctgtctgagctggatggagacatccaggaggccctgcggacccggcaggccaccctgacagagatctacagccagtgccagcgctactaccaggtgttccaggccgccaatgactggctggaggatgcccaggagctgctgcagctggccggaaatggcctggatgtggagagcgctgaggagaacctgaagagccacatggagttcttcagcacagaggaccagttccacagcaacctggaggagctgcacagcctggtggccaccctggaccccctcatcaagcccaccgggaaggaggacctggagcagaaggtggccagcctggagctgcggagccagaggatgagccgggacagcggggcccaggccctggtgtctgtggtgaacagcttccacgagaagatcgtggccctggaggagaaggccagccagctggagaagacaggaaatgatgccagcaaggccaccctgagccgctccatgaccaccgtgtggcagcgctggacccggctgcgggctgtggcccaggaccaggagaagatcctggaggatgctgtggatgagtggacaggcttcaacaacaaggtgaagaaggccacagagatgattgaccagctgcaggacaagctgcccggcagcagcgctgagaaggccagcaaggccgagctgctgaccctgctggagtaccatgacacctttgtgctggagctggagcagcagcagagcgccctgggcatgctgcggcagcagaccctgtccatgctgcaggatggagctgcccccaccccaggagaggagccccccctgatgcaggagatcacagccatgcaggaccgctgcctgaagatggtggagacccagatcaacagcgtgaagtgctgggtgcaggagaccaaggagtacctgggcaaccccaccatcgagattgatgcccagctggaggagctgcagatcctgctgacagaggccaccaaccaccggcagaacatcgagaagatggccgaggagcagaaggagaagtacctgggcctgtacaccatcctgcccagcgagctgagcctgcagctggccgaggtggccctggacctgaagatccgggaccagatccaggacaagatcaaggaggtggagcagagcaaggccaccagccaggagctgagccggcagatccagaagctggccaaggacctgaccaccatcctgaccaagctgaaggccaagacagacaacgtggtgcaggccaagacagaccagaaggccgccagccacctggaggagtacaatgagatgctggagctgatcctgaagtggattgagaaggccaaggtgctggcccacggcaccatcgcctggaacagcgccagccagctgcgggagcagtacatcctgcaccagaccctgctggaggagagcaaggagattgattctgagctggaggccatgacagagaagctgcagtacctgacctctgtgtactgcacagagaagatgagccagcaggtggccgagctgggccgggagacagaggagctgcggcagatgatcaagatccggctgcagaacctgcaggatgctgccaaggacatgaagaagtttgaagctgagctgaagaagctgcaggccgccctggagcaggcccaggccaccctgaccagccctgaggtgggccgcctgagcctgaaggagcagctgagccaccggcagcacctgctgtctgagatggagagcctgaagcccaaggtgcaggccgtgcagctgtgccagagcgccctgcgcatcccagaagatgtggtggccagcctgcccctgtgccacgccgccctgcggctgcaggaggaggccagccggctgcagcacacagccatccagcagtgcaacatcatgcaggaggccgtggtgcagtatgagcagtatgagcaggagatgaagcacctgcagcagctgattgagggcgcccaccgggagattgaggacaagcctgtggccaccagcaacatccaggagctgcaggcccagatcagcagacatgaggagctggcccagaagatcaagggctaccaggagcagatcgccagcctgaacagcaagtgcaagatgctgaccatgaaggccaagcacgccaccatgctgctgactgtgacagaggtggagggcctggccgagggcacagaggacctggatggagagctgctgcccacccccagcgcccaccccagcgtggtgatgatgacagctggccgctgccacaccctgctgagccctgtgacagaggagagcggggaggagggcaccaacagcgagatcagcagccccccagcctgccgcagccccagccctgtggccaacacagatgcctctgtgaaccaggacatcgcctactaccaggccctgtctgctgagcggctgcagacagatgctgccaagatccaccccagcaccagcgccagccaggagttctatgagcccggcctggagcccagcgccacagccaagctgggggacctgcagaggtcctgggagaccctgaagaatgtcatcagcgagaagcagaggaccctgtatgaggccctggagcggcagcagaagtaccaggacagcctgcagagcatcagcaccaagatggaggccatcgagctgaagctgtctgagagccctgagcccggccgcagccctgagagccagatggccgagcaccaggccctgatggatgagatcctgatgctgcaggatgagatcaatgagctgcagagcagcctggccgaggagctggtgtctgagagctgtgaggccgaccctgctgagcagctggccctgcagagcaccctgactgtgctggccgagaggatgagcaccatccgcatgaaggccagcggcaagaggcagctgctggaggagaagctgaatgaccagctggaggagcagaggcaggagcaggccctgcagcgctaccgctgtgaggctgatgagctggacagctggctgctgagcaccaaggccaccctggacacagccctgagcccccccaaggagcccatggacatggaggcccagctgatggactgccagaacatgctggtggagattgagcagaaggtggtggccctgtctgagctgtctgtgcacaatgaaaacctgctgctggagggcaaggcccacaccaaggatgaggccgagcagctggccggcaagctgcggcggctgaagggcagcctgctggagctgcagagggccctgcatgacaagcagctgaacatgcagggcacagcccaggagaaggaggagagtgatgtggacctgacagccacccagagccctggggtgcaggagtggctggcccaggcccggaccacctggacccagcagaggcagagcagcctgcagcagcagaaggagctggagcaggagctggccgagcagaagagcctgctgcggtctgtggccagcagaggagaggagatcctgatccagcacagcgctgctgagaccagcggagatgctggggagaagccagatgtgctgagccaggagctgggcatggagggggagaagagcagcgctgaggaccagatgaggatgaagtgggagagcctgcaccaggagttcagcaccaagcagaagctgctgcagaatgtgctggagcaggagcaggagcaggtgctgtacagccggcccaaccggctgctgagcggcgtgcccctgtacaagggagatgtgcccacccaggacaagtctgctgtgaccagcctgctggatggcctgaaccaggcctttgaggaggtgagcagccagagcggcggggccaagaggcagagcatccacctggagcagaagctgtatgatggagtgtctgccaccagcacctggctggatgatgtggaggagcggctgtttgtggccacagccctgctgcctgaggagacagagacctgcctcttcaaccaggagatcctggccaaggacatcaaggagatgtctgaggagatggacaagaacaagaacctcttcagccaggccttcccagaaaatggagacaacagagatgtgattgaggacaccctgggctgcctgctgggccgcctgagcctgctggacagcgtggtgaaccagcgctgccaccagatgaaggagcggctgcagcagatcctgaacttccagaatgacctgaaggtgctcttcaccagcctggccgacaacaagtacatcatcctgcagaagctggccaacgtgtttgagcagcctgtggccgagcagatcgaggccatccagcaggccgaggatggcctgaaggagtttgatgctggcatcatcgagctgaagagaagaggagacaagctgcaggtggagcagcccagcatgcaggagctgagcaagctgcaggacatgtatgatgagctgatgatgatcatcggcagcagaagaagtggcctgaaccagaacctgaccctgaagagccagtatgagcgggccctgcaggacctggccgacctgctggagaccggccaggagaagatggccggggaccagaagatcatcgtgagcagcaaggaggagatccagcagctgctggacaagcacaaggagtacttccagggcctggagagccacatgatcctgacagagaccctcttcaggaagatcatcagctttgctgtgcagaaggagacccagttccacacagagctgatggcccaggccagcgctgtgctgaagagggcccacaagaggggcgtggagctggagtacatcctggagacctggagccacctggatgaggaccagcaggagctgagccggcagctggaggtggtggagagcagcatccccagcgtgggcctggtggaggagaatgaagatcggctgattgaccgcatcaccctgtaccagcacctgaagagcagcctgaatgagtaccagcccaagctgtaccaggtgctggatgatggcaagaggctgctgatcagcatcagctgcagcgacctggagagccagctgaaccagctgggggagtgctggctgagcaacaccaacaagatgagcaaggagctgcaccggctggagaccatcctgaagcactggacccgctaccagagcgagagcgctgacctgatccactggctgcagagcgccaaggaccggctggagttctggacccagcagagcgtgacagtgccccaggagctggagatggtgcgggaccacctgaatgccttcctggagttcagcaaggaggtggatgcccagagcagcctgaagagctctgtgctgagcacaggcaaccagctgctgcggctgaagaaggtggacacagccaccctgcggtctgagctgagcagaattgacagccagtggacagacctgctgaccaacatcccagctgtgcaggagaagctgcaccagctgcagatggacaagctgcccagcagacatgccatcagcgaggtgatgtcctggatcagcctgatggagaatgtcatccagaaggatgaggacaacatcaagaacagcatcggctacaaggccatccacgagtacctgcagaagtacaagggcttcaagattgacatcaactgcaagcagctgactgtggactttgtgaaccagagcgtgctgcagatcagcagccaggatgtggagagcaagagaagtgacaagacagactttgctgagcagctgggcgccatgaacaagtcctggcagatcctgcagggcctggtgacagagaagatccagctgctggagggcctgctggagagctggagcgaatatgagaacaacgtgcagtgcctgaagacctggtttgagacccaggagaagaggctgaagcagcagcacagaattggagaccaggcctctgtgcagaatgccctgaaggactgccaggacctggaggacctgatcaaggccaaggagaaggaggtggagaagattgagcagaatggcctggccctgatccagaacaagaaggaggatgtgagcagcatcgtgatgagcaccctgcgggagctgggccagacctgggccaacctggaccacatggtgggccagctgaagatcctgctgaagtctgtgctggaccagtggagcagccacaaggtggcctttgacaagatcaacagctacctgatggaggcccgctacagcctgagccgcttccggctgctgaccggcagcctggaggccgtgcaggtgcaggtggacaacctgcagaacctgcaggatgacctggagaagcaggagaggagcctgcagaagtttggcagcatcaccaaccagctgctgaaggagtgccacccccctgtgacagagaccctgaccaacaccctgaaggaggtgaacatgcgctggaacaacctgctggaggagattgctgagcagctgcagagcagcaaggccctgctgcagctgtggcagcgctacaaggactacagcaagcagtgtgccagcacagtgcagcagcaggaggacaggaccaatgagctgctgaaggccgccaccaacaaggacattgctgatgatgaggtggccacctggatccaggactgcaatgacctgctgaagggcctgggcaccgtgaaggacagcctcttcttcctgcacgagctgggggagcagctgaagcagcaggtggatgccagcgctgccagcgccatccagagcgaccagctgagcctgagccagcacctgtgtgccctggagcaggccctgtgcaagcagcagaccagcctgcaggccggcgtgctggactatgagacctttgccaagagcctggaggccctggaggcctggatcgtggaggccgaggagatcctgcagggccaggaccccagccacagcagtgacctgagcaccatccaggagaggatggaggagctgaagggccagatgctgaagttcagctccatggccccagacctggaccggctgaatgagctgggctaccgcctgcccctgaatgacaaggagatcaagaggatgcagaacctgaacagacactggagcctcatcagcagccagaccacagagcgcttcagcaagctgcagagcttcctgctgcagcaccagaccttcctggagaagtgtgagacctggatggagttcctggtgcagacagagcagaagctggccgtggagatcagcggcaactaccagcacctgctggagcagcagagggcccacgagctgttccaggccgagatgttcagccggcagcagatcctgcacagcatcatcattgatggccagaggctgctggagcagggccaggtggatgacagagatgagttcaacctgaagctgaccctgctgagcaaccagtggcagggcgtcatcagaagagcccagcagaggcggggcatcatcgacagccagatccggcagtggcagcgctaccgggagatggccgagaagctgaggaagtggctggtggaggtgtcctacctgcccatgagcggcctgggctctgtgcccatccccctgcagcaggcccggaccctgtttgatgaggtgcagttcaaggagaaggtgttcctgcggcagcagggcagctacatcctgactgtggaggccggcaagcagctgctgctgtctgctgacagcggggctgaggccgccctgcaggccgagctggccgagatccaggagaagtggaagagcgcctccatgaggctggaggagcagaagaagaagctggccttcctgctgaaggactgggagaagtgtgagaagggcattgctgacagcctggagaagctgcggaccttcaagaagaagctgagccagagcctgcctgaccaccacgaggagctgcatgctgagcagatgcgctgcaaggagctggagaatgctgtgggctcctggacagatgacctgacccagctgagcctgctgaaggacaccctgagcgcctacatctctgcagatgacatcagcatcctgaatgaaagagtggagctgctgcagaggcagtgggaggagctgtgccaccagctgagcctgcggcggcagcagattggagagcggctgaatgagtgggccgtgttcagcgagaagaacaaggagctgtgtgagtggctgacccagatggagagcaaggtgtcccagaatggagacatcctgattgaggagatgattgagaagctgaagaaggactaccaggaggagatcgccatcgcccaggagaacaagatccagctgcagcagatgggagagcggctggccaaggccagccatgagagcaaggccagcgagattgagtacaagctgggcaaggtgaatgaccgctggcagcacctgctggacctgattgctgcccgggtgaagaagctgaaggagaccctggtggccgtgcagcagctggacaagaacatgagcagcctgcggacctggctggcccacatcgagagcgagctggccaagcccatcgtgtatgacagctgcaacagcgaggagatccagaggaagctgaatgagcagcaggagctgcagagggacatcgagaagcacagcactggagtggcctctgtgctgaacctgtgtgaggtgctgctgcatgactgtgatgcctgtgccacagatgctgaatgtgacagcatccagcaggccaccaggaacctggaccggcgctggaggaacatctgtgccatgtccatggagcggcggctgaagattgaggagacctggaggctgtggcagaagttcctggatgactacagcagatttgaggactggctgaagagcagcgagaggacagctgccttccccagcagcagcggggtcatctacacagtggccaaggaggagctgaagaagtttgaggccttccagaggcaggtgcatgaatgtctgacccagctggagctgatcaacaagcagtaccgccgcctggccagagaaaatagaacagacagcgcctgcagcctgaagcagatggtgcatgagggcaaccagcgctgggacaacctgcagaagagggtgaccagcatcctgcggcggctgaagcacttcatcggccagcgggaggagtttgaaacagcccgggacagcatcctggtgtggctgacagagatggacctgcagctgaccaacatcgagcacttctctgaatgtgatgtgcaggccaagatcaagcagctgaaggccttccagcaggagatcagcctgaaccacaacaagattgagcagatcatcgcccagggcgagcagctgattgagaagtctgagcccctggatgctgccatcatcgaggaggagctggatgagctgcggcgctactgccaggaggtgtttggccgggtggagcgctaccacaagaagctgatccggctgcccctgcctgatgatgaacatgacctgagtgaccgggagctggagctggaggacagcgctgccctgagtgacctgcactggcatgacagatctgctgacagcctgctgagcccccagcccagcagcaacctgagcctgagcctggcccagcccctgcggtctgagaggagcggccgggacaccccagcctctgtggacagcatccccctggagtgggaccatgactatgacctgagccgggacctggagagcgccatgagccgggccctgcccagtgaagatgaggagggccaggatgacaaggacttctacctgcggggagctgtgggcctgagcggggaccacagcgccctggagagccagatccggcagctgggcaaggccctggatgacagccgcttccagatccagcagacagagaacatcatccgcagcaagacccccaccggccctgagctggacaccagctacaagggctacatgaagctgctgggagaatgtagcagcagcattgacagcgtgaagaggctggagcacaagctgaaggaggaggaggagagcctgcccggctttgtgaacctgcacagcacagagacccagacagctggggtcatcgaccgctgggagctgctgcaggcccaggccctgagcaaggagctgaggatgaagcagaacctgcagaagtggcagcagttcaacagcgacctgaacagcatctgggcctggctgggggacacagaggaggagctggagcagctgcagaggctggagctgagcacagacatccagaccatcgagctgcagatcaagaagctgaaggagctgcagaaggctgtggaccacaggaaggccatcatcctgagcatcaacctgtgcagccctgagttcacccaggccgacagcaaggagagccgggacctgcaggaccggctgagccagatgaatggccgctgggacagagtgtgcagcctgctggaggagtggaggggcctgctgcaggatgccctgatgcagtgccagggcttccacgagatgagccacggcctgctgctgatgctggagaacatcgacaggaggaagaatgagatcgtgcccatcgacagcaacctggatgctgagatcctgcaggaccaccacaagcagctgatgcagatcaagcatgagctgctggagagccagctgcgggtggccagcctgcaggacatgagctgccagctgctggtgaatgctgagggcacagactgcctggaggccaaggagaaggtgcacgtgattggcaaccggctgaagctgctgctgaaggaggtgagccgccacatcaaggagctggagaagctgctggatgtgagcagcagccagcaggacctgagctcctggagcagcgcagatgagctggacaccagcggctctgtgagccccaccagcggccgcagcacccccaaccggcagaagaccccccggggcaagtgcagcctgagccagcccggccccagcgtgagcagcccccacagccgcagcaccaagggcggcagtgacagcagcctgtctgagcccggccctggccgcagcggccggggcttcctgttccgggtgctgcgggccgccctgcccctgcagctgctgctgctgctgctgattggcctggcctgcctggtgcccatgtctgaggaggactacagctgtgccctgagcaacaactttgcccgctccttccaccccatgctgcgctacaccaacggccccccacccctgtag

SEQ ID NO: 171270 - DNA, 9966 bp, synthetic construct
  misc_feature 1..9966: note = Description of Artificial Sequence: Synthetic coding sequence
  source 1..9966: mol_type = other DNA
atggagctggatgctgctgtgcagaagttcctggagcagaatggccagctgggcaagcccctggccaagaagattggcaagctgacagagctgcaccagcagaccatccggcaggccgagaaccggctgagcaagctgaaccaggccgccagccacctggaggagtacaatgagatgctggagctgatcctgaagtggattgagaaggccaaggtgctggcccacggcaccatcgcctggaacagcgccagccagctgcgggagcagtacatcctgcaccagaccctgctggaggagagcaaggagattgattctgagctggaggccatgacagagaagctgcagtacctgacctctgtgtactgcacagagaagatgagccagcaggtggccgagctgggccgggagacagaggagctgcggcagatgatcaagatccggctgcagaacctgcaggatgctgccaaggacatgaagaagtttgaagctgagctgaagaagctgcaggccgccctggagcaggcccaggccaccctgaccagccctgaggtgggccgcctgagcctgaaggagcagctgagccaccggcagcacctgctgtctgagatggagagcctgaagcccaaggtgcaggccgtgcagctgtgccagagcgccctgcgcatcccagaagatgtggtggccagcctgcccctgtgccacgccgccctgcggctgcaggaggaggccagccggctgcagcacacagccatccagcagtgcaacatcatgcaggccgctgtggtgcagtatgagcagtatgagcaggagatgaagcacctgcagcagctgattgagggcgcccaccgggagattgaggacaagcctgtggccaccagcaacatccaggagctgcaggcccagatcagcagacatgaggagctggcccagaagatcaagggctaccaggagcagatcgccagcctgaacagcaagtgcaagatgctgaccatgaaggccaagcacgccaccatgctgctgactgtgacagaggtggagggcctggccgagggcacagaggacctggatggagagctgctgcccacccccagcgcccaccccagcgtggtgatgatgacagctggccgctgccacaccctgctgagccctgtgacagaggagagcggggaggagggcaccaacagcgagatcagcagccccccagcctgccgcagccccagccctgtggccaacacagatgcctctgtgaaccaggacatcgcctactaccaggccctgtctgctgagcggctgcagacagatgctgccaagatccaccccagcaccagcgccagccaggagttctatgagcccggcctggagcccagcgccacagccaagctgggggacctgcagaggtcctgggagaccctgaagaatgtcatcagcgagaagcagaggaccctgtatgaggccctggagcggcagcagaagtaccaggacagcctgcagagcatcagcaccaagatggaggccatcgagctgaagctgtctgagagccctgagcccggccgcagccctgagagccagatggccgagcaccaggccctgatggatgagatcctgatgctgcaggatgagatcaatgagctgcagagcagcctggccgaggagctggtgtctgagagctgtgaggccgaccctgctgagcagctggccctgcagagcaccctgactgtgctggccgagaggatgagcaccatccgcatgaaggccagcggcaagaggcagctgctggaggagaagctgaatgaccagctggaggagcagaggcaggagcaggccctgcagcgctaccgctgtgaggctgatgagctggacagctggctgctgagcaccaaggccaccctggacacagccctgagcccccccaaggagcccatggacatggaggcccagctgatggactgccagaacatgctggtggagattgagcagaaggtggtggccctgtctgagctgtctgtgcacaatgaaaacctgctgctggagggcaaggcccacaccaaggatgaggccgagcagctggccggcaagctgcggcggctgaagggcagcctgctggagctgcagagggccctgcatgacaagcagctgaacatgcagggcacagcccaggagaaggaggagagtgatgtggacctgacagccacccagagccctggggtgcaggagtggctggcccaggcccggaccacctggacccagcagaggcagagcagcctgcagcagcagaaggagctggagcaggagctggccgagcagaagagcctgctgcggtctgtggccagcagaggagaggagatcctgatccagcacagcgctgctgagaccagcggagatgctggggagaagccagatgtgctgagccaggagctgggcatggagggggagaagagcagcgctgaggaccagatgaggatgaagtgggagagcctgcaccaggagttcagcaccaagcagaagctgctgcagaatgtgctggagcaggagcaggagcaggtgctgtacagccggcccaaccggctgctgagcggcgtgcccctgtacaagggagatgtgcccacccaggacaagtctgctgtgaccagcctgctggatggcctgaaccaggcctttgaggaggtgagcagccagagcggcggggccaagaggcagagcatccacctggagcagaagctgtatgatggagtgtctgccaccagcacctggctggatgatgtggaggagcggctgtttgtggccacagccctgctgcctgaggagacagagacctgcctcttcaaccaggagatcctggccaaggacatcaaggagatgtctgaggagatggacaagaacaagaacctcttcagccaggccttcccagaaaatggagacaacagagatgtgattgaggacaccctgggctgcctgctgggccgcctgagcctgctggacagcgtggtgaaccagcgctgccaccagatgaaggagcggctgcagcagatcctgaacttccagaatgacctgaaggtgctcttcaccagcctggccgacaacaagtacatcatcctgcagaagctggccaacgtgtttgagcagcctgtggccgagcagatcgaggccatccagcaggccgaggatggcctgaaggagtttgatgctggcatcatcgagctgaagagaagaggagacaagctgcaggtggagcagcccagcatgcaggagctgagcaagctgcaggacatgtatgatgagctgatgatgatcatcggcagcagaagaagtggcctgaaccagaacctgaccctgaagagccagtatgagcgggccctgcaggacctggccgacctgctggagaccggccaggagaagatggccggggaccagaagatcatcgtgagcagcaaggaggagatccagcagctgctggacaagcacaaggagtacttccagggcctggagagccacatgatcctgacagagaccctcttcaggaagatcatcagctttgctgtgcagaaggagacccagttccacacagagctgatggcccaggccagcgctgtgctgaagagggcccacaagaggggcgtggagctggagtacatcctggagacctggagccacctggatgaggaccagcaggagctgagccggcagctggaggtggtggagagcagcatccccagcgtgggcctggtggaggagaatgaagatcggctgattgaccgcatcaccctgtaccagcacctgaagagcagcctgaatgagtaccagcccaagctgtaccaggtgctggatgatggcaagaggctgctgatcagcatcagctgcagcgacctggagagccagctgaaccagctgggggagtgctggctgagcaacaccaacaagatgagcaaggagctgcaccggctggagaccatcctgaagcactggacccgctaccagagcgagagcgctgacctgatccactggctgcagagcgccaaggaccggctggagttctggacccagcagagcgtgacagtgccccaggagctggagatggtgcgggaccacctgaatgccttcctggagttcagcaaggaggtggatgcccagagcagcctgaagagctctgtgctgagcacaggcaaccagctgctgcggctgaagaaggtggacacagccaccctgcggtctgagctgagcagaattgacagccagtggacagacctgctgaccaacatcccagctgtgcaggagaagctgcaccagctgcagatggacaagctgcccagcagacatgccatcagcgaggtgatgtcctggatcagcctgatggagaatgtcatccagaaggatgaggacaacatcaagaacagcatcggctacaaggccatccacgagtacctgcagaagtacaagggcttcaagattgacatcaactgcaagcagctgactgtggactttgtgaaccagagcgtgctgcagatcagcagccaggatgtggagagcaagagaagtgacaagacagactttgctgagcagctgggcgccatgaacaagtcctggcagatcctgcagggcctggtgacagagaagatccagctgctggagggcctgctggagagctggagcgaatatgagaacaacgtgcagtgcctgaagacctggtttgagacccaggagaagaggctgaagcagcagcacagaattggagaccaggcctctgtgcagaatgccctgaaggactgccaggacctggaggacctgatcaaggccaaggagaaggaggtggagaagattgagcagaatggcctggccctgatccagaacaagaaggaggatgtgagcagcatcgtgatgagcaccctgcgggagctgggccagacctgggccaacctggaccacatggtgggccagctgaagatcctgctgaagtctgtgctggaccagtggagcagccacaaggtggcctttgacaagatcaacagctacctgatggaggcccgctacagcctgagccgcttccggctgctgaccggcagcctggaggccgtgcaggtgcaggtggacaacctgcagaacctgcaggatgacctggagaagcaggagaggagcctgcagaagtttggcagcatcaccaaccagctgctgaaggagtgccacccccctgtgacagagaccctgaccaacaccctgaaggaggtgaacatgcgctggaacaacctgctggaggagattgctgagcagctgcagagcagcaaggccctgctgcagctgtggcagcgctacaaggactacagcaagcagtgtgccagcacagtgcagcagcaggaggacaggaccaatgagctgctgaaggccgccaccaacaaggacattgctgatgatgaggtggccacctggatccaggactgcaatgacctgctgaagggcctgggcaccgtgaaggacagcctcttcttcctgcacgagctgggggagcagctgaagcagcaggtggatgccagcgctgccagcgccatccagagcgaccagctgagcctgagccagcacctgtgtgccctggagcaggccctgtgcaagcagcagaccagcctgcaggccggcgtgctggactatgagacctttgccaagagcctggaggccctggaggcctggatcgtggaggccgaggagatcctgcagggccaggaccccagccacagcagtgacctgagcaccatccaggagaggatggaggagctgaagggccagatgctgaagttcagctccatggccccagacctggaccggctgaatgagctgggctaccgcctgcccctgaatgacaaggagatcaagaggatgcagaacctgaacagacactggagcctcatcagcagccagaccacagagcgcttcagcaagctgcagagcttcctgctgcagcaccagaccttcctggagaagtgtgagacctggatggagttcctggtgcagacagagcagaagctggccgtggagatcagcggcaactaccagcacctgctggagcagcagagggcccacgagctgttccaggccgagatgttcagccggcagcagatcctgcacagcatcatcattgatggccagaggctgctggagcagggccaggtggatgacagagatgagttcaacctgaagctgaccctgctgagcaaccagtggcagggcgtcatcagaagagcccagcagaggcggggcatcatcgacagccagatccggcagtggcagcgctaccgggagatggccgagaagctgaggaagtggctggtggaggtgtcctacctgcccatgagcggcctgggctctgtgcccatccccctgcagcaggcccggaccctgtttgatgaggtgcagttcaaggagaaggtgttcctgcggcagcagggcagctacatcctgactgtggaggccggcaagcagctgctgctgtctgctgacagcggggctgaggccgccctgcaggccgagctggccgagatccaggagaagtggaagagcgcctccatgaggctggaggagcagaagaagaagctggccttcctgctgaaggactgggagaagtgtgagaagggcattgctgacagcctggagaagctgcggaccttcaagaagaagctgagccagagcctgcctgaccaccacgaggagctgcatgctgagcagatgcgctgcaaggagctggagaatgctgtgggctcctggacagatgacctgacccagctgagcctgctgaaggacaccctgagcgcctacatctctgcagatgacatcagcatcctgaatgaaagagtggagctgctgcagaggcagtgggaggagctgtgccaccagctgagcctgcggcggcagcagattggagagcggctgaatgagtgggccgtgttcagcgagaagaacaaggagctgtgtgagtggctgacccagatggagagcaaggtgtcccagaatggagacatcctgattgaggagatgattgagaagctgaagaaggactaccaggaggagatcgccatcgcccaggagaacaagatccagctgcagcagatgggagagcggctggccaaggccagccatgagagcaaggccagcgagattgagtacaagctgggcaaggtgaatgaccgctggcagcacctgctggacctgattgctgcccgggtgaagaagctgaaggagaccctggtggccgtgcagcagctggacaagaacatgagcagcctgcggacctggctggcccacatcgagagcgagctggccaagcccatcgtgtatgacagctgcaacagcgaggagatccagaggaagctgaatgagcagcaggagctgcagagggacatcgagaagcacagcactggagtggcctctgtgctgaacctgtgtgaggtgctgctgcatgactgtgatgcctgtgccacagatgctgaatgtgacagcatccagcaggccaccaggaacctggaccggcgctggaggaacatctgtgccatgtccatggagcggcggctgaagattgaggagacctggaggctgtggcagaagttcctggatgactacagcagatttgaggactggctgaagagcagcgagaggacagctgccttccccagcagcagcggggtcatctacacagtggccaaggaggagctgaagaagtttgaggccttccagaggcaggtgcatgaatgtctgacccagctggagctgatcaacaagcagtaccgccgcctggccagagaaaatagaacagacagcgcctgcagcctgaagcagatggtgcatgagggcaaccagcgctgggacaacctgcagaagagggtgaccagcatcctgcggcggctgaagcacttcatcggccagcgggaggagtttgaaacagcccgggacagcatcctggtgtggctgacagagatggacctgcagctgaccaacatcgagcacttctctgaatgtgatgtgcaggccaagatcaagcagctgaaggccttccagcaggagatcagcctgaaccacaacaagattgagcagatcatcgcccagggcgagcagctgattgagaagtctgagcccctggatgctgccatcatcgaggaggagctggatgagctgcggcgctactgccaggaggtgtttggccgggtggagcgctaccacaagaagctgatccggctgcccctgcctgatgatgaacatgacctgagtgaccgggagctggagctggaggacagcgctgccctgagtgacctgcactggcatgacagatctgctgacagcctgctgagcccccagcccagcagcaacctgagcctgagcctggcccagcccctgcggtctgagaggagcggccgggacaccccagcctctgtggacagcatccccctggagtgggaccatgactatgacctgagccgggacctggagagcgccatgagccgggccctgcccagtgaagatgaggagggccaggatgacaaggacttctacctgcggggagctgtgggcctgagcggggaccacagcgccctggagagccagatccggcagctgggcaaggccctggatgacagccgcttccagatccagcagacagagaacatcatccgcagcaagacccccaccggccctgagctggacaccagctacaagggctacatgaagctgctgggagaatgtagcagcagcattgacagcgtgaagaggctggagcacaagctgaaggaggaggaggagagcctgcccggctttgtgaacctgcacagcacagagacccagacagctggggtcatcgaccgctgggagctgctgcaggcccaggccctgagcaaggagctgaggatgaagcagaacctgcagaagtggcagcagttcaacagcgacctgaacagcatctgggcctggctgggggacacagaggaggagctggagcagctgcagaggctggagctgagcacagacatccagaccatcgagctgcagatcaagaagctgaaggagctgcagaaggctgtggaccacaggaaggccatcatcctgagcatcaacctgtgcagccctgagttcacccaggccgacagcaaggagagccgggacctgcaggaccggctgagccagatgaatggccgctgggacagagtgtgcagcctgctggaggagtggaggggcctgctgcaggatgccctgatgcagtgccagggcttccacgagatgagccacggcctgctgctgatgctggagaacatcgacaggaggaagaatgagatcgtgcccatcgacagcaacctggatgctgagatcctgcaggaccaccacaagcagctgatgcagatcaagcatgagctgctggagagccagctgcgggtggccagcctgcaggacatgagctgccagctgctggtgaatgctgagggcacagactgcctggaggccaaggagaaggtgcacgtgattggcaaccggctgaagctgctgctgaaggaggtgagccgccacatcaaggagctggagaagctgctggatgtgagcagcagccagcaggacctgagctcctggagcagcgcagatgagctggacaccagcggctctgtgagccccaccagcggccgcagcacccccaaccggcagaagaccccccggggcaagtgcagcctgagccagcccggccccagcgtgagcagcccccacagccgcagcaccaagggcggcagtgacagcagcctgtctgagcccggccctggccgcagcggccggggcttcctgttccgggtgctgcgggccgccctgcccctgcagctgctgctgctgctgctgattggcctggcctgcctggtgcccatgtctgaggaggactacagctgtgccctgagcaacaactttgcccgctccttccaccccatgctgcgctacaccaacggccccccacccctgtag

SEQ ID NO: 171271 - DNA, 2934 bp, synthetic construct
  misc_feature 1..2934: note = Description of Artificial Sequence: Synthetic coding sequence
  source 1..2934: mol_type = other DNA
atggtggtggccgaggacctgagcgccctgaggatggccgaggacagctgtgtggatgctgacctgcctgactgcaactgtgatgtgacccggcagagggtgaagaagctgaaggagaccctggtggccgtgcagcagctggacaagaacatgagcagcctgcggacctggctggcccacattgaaagtgagctggccaagcccatcgtgtatgacagctgcaacagcgaggagatccagaggaagctgaatgagcagcaggagctgcagagggacatcgagaagcacagcactggagtggcctctgtgctgaacctgtgtgaggtgctgctgcatgactgtgatgcctgtgccacagatgctgaatgtgacagcatccagcaggccaccaggaacctggaccggcgctggaggaacatctgtgccatgtccatggagcggcggctgaagattgaggagacctggaggctgtggcagaagttcctggatgactacagcagatttgaggactggctgaagagcagcgagaggacagctgccttccccagcagcagtggagtcatctacacagtggccaaggaggagctgaagaagtttgaggccttccagaggcaggtgcatgagtgcctgacccagctggagctgatcaacaagcagtacagaaggctggcccgggagaacagaacagattctgcctgcagcctgaagcagatggtgcatgagggcaaccagcgctgggacaacctgcagaagagggtgaccagcatcctgcggcggctgaagcacttcatcggccagcgggaggagtttgaaacagcccgggacagcatcctggtgtggctgacagagatggacctgcagctgaccaacatcgagcacttctctgaatgtgatgtgcaggccaagatcaagcagctgaaggccttccagcaggagatcagcctgaaccacaacaagattgagcagatcatcgcccagggcgagcagctgattgagaagtctgagcccctggatgctgccatcatcgaggaggagctggatgagctgcggcgctactgccaggaggtgtttggccgggtggagcgctaccacaagaagctgatccggctgcccctgcctgatgatgaacatgacctgagtgaccgggagctggagctggaggacagcgctgccctgagtgacctgcactggcatgacagatctgctgacagcctgctgagcccccagcccagcagcaacctgagcctgagcctggcccagcccctgcggtctgagaggagcggccgggacaccccagcctctgtggacagcatccccctggagtgggaccatgactatgacctgagccgggacctggagagcgccatgagccgggccctgcccagtgaagatgaggagggccaggatgacaaggacttctacctgcggggagctgtgggcctgagtgatgtgatgatccctgagagccctgaggcctacgtgaagctgacagaaaatgccatcaagaacaccagcggggaccacagcgccctggagagccagatccggcagctgggcaaggccctggatgacagccgcttccagatccagcagacagagaacatcatccgcagcaagacccccaccggccctgagctggacaccagctacaagggctacatgaagctgctgggagaatgtagcagcagcattgacagcgtgaagaggctggagcacaagctgaaggaggaggaggagagcctgcccggctttgtgaacctgcacagcacagagacccagacagctggggtcatcgaccgctgggagctgctgcaggcccaggccctgagcaaggagctgaggatgaagcagaacctgcagaagtggcagcagttcaacagcgacctgaacagcatctgggcctggctgggggacacagaggaggagctggagcagctgcagaggctggagctgagcacagacatccagaccatcgagctgcagatcaagaagctgaaggagctgcagaaggctgtggaccacaggaaggccatcatcctgagcatcaacctgtgcagccctgagttcacccaggccgacagcaaggagagccgggacctgcaggaccggctgagccagatgaatggccgctgggacagagtgtgcagcctgctggaggagtggaggggcctgctgcaggatgccctgatgcagtgccagggcttccacgagatgagccacggcctgctgctgatgctggagaacatcgacaggaggaagaatgagatcgtgcccatcgacagcaacctggatgctgagatcctgcaggaccaccacaagcagctgatgcagatcaagcatgagctgctggagagccagctgcgggtggccagcctgcaggacatgagctgccagctgctggtgaatgctgagggcacagactgcctggaggccaaggagaaggtgcacgtgattggcaaccggctgaagctgctgctgaaggaggtgagccgccacatcaaggagctggagaagctgctggatgtgagcagcagccagcaggacctgagctcctggagcagcgcagatgagctggacaccagcggctctgtgagccccaccagcggccgcagcacccccaaccggcagaagaccccccggggcaagtgcagcctgagccagcccggccccagcgtgagcagcccccacagccgcagcaccaagggcggcagtgacagcagcctgtctgagcccggccctggccgcagcggccggggcttcctgttccgggtgctgcgggccgccctgcccctgcagctgctgctgctgctgctgattggcctggcctgcctggtgcccatgtctgaggaggactacagctgtgccctgagcaacaactttgcccgctccttccaccccatgctgcgctacaccaacggccccccacccctgtag

SEQ ID NO: 171272 - DNA, 26394 bp, synthetic construct
  misc_feature 1..26394: note = Description of Artificial Sequence: Synthetic coding sequence
  source 1..26394: mol_type = other DNA
atggccaccagcagaggagccagccgctgcccccgggacatcgccaacgtgatgcagaggctgcaggatgagcaggagatcgtgcagaagaggaccttcaccaagtggatcaacagccacctggccaagaggaagccacccatggtggtggatgacctgtttgaggacatgaaggatggagtgaagctgctggccctgctggaggtgctgagcggccagaagctgccctgtgagcagggccgcaggatgaagagaattcatgctgtggccaacatcggcacagccctgaagttcctggagggcaggaagatcaagctggtgaacatcaacagcacagacattgctgatggccggcccagcatcgtgctgggcctgatgtggaccatcatcctgtacttccagatcgaggagctgaccagcaacctgccccagctgcagagcctgagcagcagcgccagctctgtggacagcatcgtgtcctctgagacccccagcccccccagcaagaggaaggtgaccaccaagatccagggcaatgccaagaaggccctgctgaagtgggtgcagtacacagctgggaagcagacaggcatcgaggtgaaggactttgggaagtcctggaggtctggagtggccttccacagcgtcatccacgccatccggcctgagctggtggacctggagaccgtgaagggccgcagcaaccgggagaacctggaggatgccttcaccatcgccgagacagagctgggcatcccccggctgctggaccctgaagatgtggatgtggacaagccagatgagaagagcatcatgacctacgtggcccagttcctgaagcactacccagacatccacaatgccagcacagatggccaggaggatgatgagatcctgcccggcttccccagctttgccaacagcgtgcagaacttcaagagagaagatagagtcatcttcaaggagatgaaggtgtggattgagcagtttgagcgggacctgacccgggcccagatggtggagagcaacctgcaggacaagtaccagagcttcaagcacttccgggtgcagtatgagatgaagaggaagcagatcgagcacctgatccagcccctgcacagagatggcaagctgagcctggaccaggccctggtgaagcagagctgggacagagtgaccagccggctgtttgactggcacatccagctggacaagagcctgcctgcccccctgggcaccatcggggcctggctgtacagagctgaggtggccctgcgggaggagatcaccgtgcagcaggtgcatgaggagacagccaacaccatccagaggaagctggagcagcacaaggacctgctgcagaacacagatgcccacaagagggccttccacgagatctaccgcaccaggtctgtgaatggcatccctgtgcccccagaccagctggaggacatggccgagcgcttccactttgtgagcagcaccagcgagctgcacctgatgaagatggagttcctggagctgaagtaccgcctgctgagcctgctggtgctggccgagagcaagctgaagtcctggatcatcaagtatggccggcgggagagcgtggagcagctgctgcagaactacgtgtccttcatcgagaacagcaagttctttgagcagtatgaggtgacctaccagatcctgaagcagacagctgagatgtatgtgaaggcagatggctctgtggaggaggctgaaaatgtgatgaagttcatgaatgagaccacagcccagtggaggaacctgtctgtggaggtgcgctctgtgcgctccatgctggaggaggtgatcagcaactgggacagatatggcaacacagtggccagcctgcaggcctggctggaggatgctgagaagatgctgaaccagagtgaaaatgccaagaaggacttcttcaggaacctgccccactggatccagcagcacacagccatgaatgatgctggcaacttcctgattgagacctgtgatgagatggtgtcccgggacctgaagcagcagctgctgctgctgaatggccgctggagggagctgttcatggaggtgaagcagtatgcccaggctgatgagatggacaggatgaagaaggagtacacagactgtgtggtgaccctgagcgcctttgccacagaggcccacaagaagctgtctgagcccctggaggtgtccttcatgaatgtgaagctgctgatccaggacctggaggacatcgagcagagggtgcctgtgatggatgcccagtacaagatcatcaccaagacagcccacctgatcaccaaggagagcccccaggaggagggcaaggagatgtttgccaccatgagcaagctgaaggagcagctgaccaaggtgaaggagtgctacagccccctgctgtatgagagccagcagctgctgatccccctggaggagctggagaagcagatgaccagcttctatgacagcctgggcaagatcaatgagatcatcaccgtgctggagcgggaggcccagagcagcgccctcttcaagcagaagcaccaggagctgctggcctgccaggagaactgcaagaagaccctgaccctcatcgagaagggcagccagagcgtgcagaagtttgtgaccctgagcaatgtgctgaagcactttgaccagacccggctgcagaggcagattgctgacatccacgtggccttccagagcatggtgaagaagacaggagactggaagaagcacgtggagaccaacagccggctgatgaagaagtttgaggagagcagagctgagctggagaaggtgctgagaattgcccaggagggcctggaggagaagggggaccctgaggagctgctgcggcggcacacagagttcttcagccagctggaccagagggtgctgaatgccttcctgaaggcctgtgatgagctgacagacatcctgcctgagcaggagcagcagggcctgcaggaggccgtgaggaagctgcacaagcagtggaaggacctgcagggcgaggccccctaccacctgctgcacctgaagattgatgtggagaagaaccgcttcctggcctctgtggaggagtgcaggacagagctggaccgggagaccaagctgatgccccaggagggcagcgagaagatcatcaaggagcacagggtcttcttcagtgacaagggcccccaccacctgtgtgagaagaggctgcagctgattgaggagctgtgtgtgaagctgcctgtgcgggaccctgtgcgggacaccccaggcacctgccacgtgaccctgaaggagctgcgggccgccatcgacagcacctacaggaagctgatggaggaccctgacaagtggaaggactacaccagccgcttcagcgagttcagctcctggatcagcaccaatgagacccagctgaagggcatcaagggggaggccatcgacacagccaaccacggggaggtgaagagagctgtggaggagatcagaaatggagtgaccaagagaggagagaccctgtcctggctgaagagccggctgaaggtgctgacagaggtgtccagtgaaaatgaggcccagaagcagggagatgagctggccaagctgagcagcagcttcaaggccctggtgaccctgctgtctgaggtggagaagatgctgagcaactttggagactgtgtgcagtacaaggagatcgtgaagaacagcctggaggagctgatcagcggcagcaaggaggtgcaggagcaggccgagaagatcctggacacagagaacctgtttgaggcccagcagctgctgctgcaccaccagcagaagaccaagaggatcagcgccaagaagagagatgtgcagcagcagatcgcccaggcccagcagggcgagggcggcctgcctgaccggggccacgaggagctgaggaagctggagagcaccctggatggcctggagaggagccgggagcggcaggagcggcgcatccaggtgaccctgaggaagtgggagagatttgagaccaacaaggagaccgtggtgcgctacctgttccagacaggcagcagccatgagcgcttcctgtccttcagcagcctggagagcctgagcagcgagctggagcagaccaaggagttcagcaagaggacagagagcattgctgtgcaggccgagaacctggtgaaggaggccagcgagatccccctgggcccccagaacaagcagctgctgcagcagcaggccaagagcatcaaggagcaggtgaagaagctggaggacaccctggaggaggacatcaagaccatggagatggtgaagaccaagtgggaccacttcggcagcaactttgagaccctgtctgtgtggatcacagagaaggagaaggagctgaatgccctggagaccagcagcagcgccatggacatgcagatcagccagatcaaggtgaccatccaggagattgagagcaagctgagcagcatcgtgggcctggaggaggaggcccagagctttgcccagtttgtgaccaccggggagagcgcccgcatcaaggccaagctgacccagatccgccgctacggggaggagctgcgggagcacgcccagtgcctggagggcaccatcctgggccacctgagccagcagcagaagtttgaggagaacctgaggaagatccagcagagcgtgtctgaatttgaggacaagctggccgtgcccatcaagatctgcagcagcgccacagagacctacaaggtgctgcaggagcacatggacctgtgccaggccctggagagcctgagcagcgccatcacagccttcagcgccagcgccaggaaggtggtgaacagagacagctgtgtgcaggaggccgccgccctgcagcagcagtatgaggacatcctgcggcgggccaaggagcggcagacagccctggagaacctgctggcccactggcagaggctggagaaggagctgagcagcttcctgacctggctggagcggggggaggccaaggccagcagccctgagatggacatctctgctgacagagtgaaggtggagggggagctgcagctgatccaggccctgcagaatgaggtggtgtcccaggccagcttctacagcaagctgctgcagctgaaggagagcctcttctctgtggccagcaaggatgatgtgaagatgatgaagctgcacctggagcagctggatgagcgctggagggacctgccccagatcatcaacaagaggatcaacttcctgcagagcgtggtggccgagcaccagcagtttgatgagctgctgctgtccttctctgtgtggatcaagctgttcctgtctgagctgcagaccaccagcgagatcagcatcatggaccaccaggtggccctgaccaggcacaaggaccacgccgctgaggtggagagcaagaagggggagctgcagagcctgcagggccacctggccaagctgggcagcctgggccgggcagaggacctgcacctgctgcagggcaaggccgaggactgcttccagctgtttgaggaggccagccaggtggtggagcggcggcagctggccctgagccacctggccgagttcctgcagagccacgccagcctgagcggcatcctgcggcagctgcggcagacagtggaggccaccaacagcatgaacaagaatgaaagtgacctgattgagaaggacctgaatgatgccctgcagaatgccaaggccctggagagcgctgctgtgtccctggatggcatcctgagcaaggcccagtaccacctgaagattggcagcagcgagcagaggaccagctgccgggccacagctgaccagctgtgtggggaggtggagcgcatccagaacctgctgggcaccaagcagagcgaggctgatgccctggccgtgctgaagaaggccttccaggaccagaaggaggagctgctgaagagcattgaagatattgaggagaggacagacaaggagcggctgaaggagcccacccggcaggccctgcagcagaggctgcgggtcttcaaccagctggaggatgagctgaacagccatgaacatgagctgtgctggctgaaggacaaggccaagcagatcgcccagaaggatgtggcctttgcccctgaggtggaccgggagatcaaccggctggaggtgacctgggatgacaccaagaggctcatccacgagaaccagggccagtgctgcggcctgattgacctgatgagggagtaccagaacctgaagtctgctgtgtccaaggtgctggagaatgccagctctgtgattgtgaccaggaccaccatcaaggaccaggaggacctgaagtgggccttcagcaagcatgaaacagccaagaacaagatgaactacaagcagaaggacctggacaacttcaccagcaagggcaagcacctgctgtctgagctgaagaagatccacagcagtgacttcagcctggtgaagacagacatggagagcacagtggacaagtggctggatgtgtctgagaagctggaggagaacatggaccggctgcgggtgtccctgagcatctgggatgatgtgctgagcaccagagatgaaattgagggctggagcaacaactgtgtgccccagatggccgagaacatcagcaacctggacaaccacctgcgggcagaggagctgctgaaggagtttgagagcgaggtgaagaacaaggccctgcggctggaggagctgcacagcaaggtgaatgacctgaaggagctgaccaagaacctggagaccccaccagacctgcagttcattgaagctgacctgatgcagaagctggagcacgccaaggagatcacagaggtggccaagggcaccctgaaggacttcaccgcccagagcacccaggtggagaagttcatcaatgacatcaccacctggttcaccaaggtggaggagagcctgatgaactgtgcccagaatgagacctgtgaggccctgaagaaggtgaaggacatccagaaggagctgcagagccagcagagcaacatcagcagcacccaggagaacctgaacagcctgtgcaggaagtaccacagcgctgagctggagagcctgggccgggccatgacaggcctcatcaagaagcatgaagctgtgtcccagctgtgcagcaagacccaggccagcctgcaggagagcctggagaagcacttcagcgagagcatgcaggagttccaggagtggttcctgggcgccaaggccgccgccaaggagagcagtgacagaactggagacagcaaggtgctggaggccaagctgcatgacctgcagaacatcctggacagcgtgtctgatggccagagcaagctggatgctgtgacccaggagggccagaccctgtatgcccacctgagcaagcagatcgtgagcagcatccaggagcagatcaccaaggccaatgaggagttccaggccttcctgaagcagtgcctgaaggacaagcaggccctgcaggactgtgccagcgagctgggcagctttgaggaccagcacaggaagctgaacctgtggatccacgagatggaggagcgcttcaacacagagaacctgggggagagcaagcagcacatccctgagaagaagaatgaggtgcacaaggtggagatgttcctgggggagctgctggccgcccgggagagcctggacaagctgagccagaggggccagctgctgtctgaggagggccatggagctggccaggagggccgcctgtgcagccagctgctgaccagccaccagaacctgctgaggatgaccaaggagaagctgcggagctgccaggtggccctgcaggagcacgaggccctggaggaggccctgcagagcatgtggttctgggtgaaggccatccaggaccggctggcctgtgccgagagcaccctgggcagcaaggacaccctggagaagaggctgagccagatccaggacatcctgctgatgaagggggagggggaggtgaagctgaacatggccatcggcaaaggagagcaggccctgcggagcagcaacaaggagggccagagggtcatccagacccagctggagaccctgaaggaggtgtgggccgacatcatgagcagctctgtgcacgcccagagcaccctggagagcgtcatcagccagtggaatgactatgtggagaggaagaaccagctggagcagtggatggagagcgtggaccagaagattgagcaccccctgcagccccagcccggcctgaaggagaagtttgtgctgctggaccacctgcagagcatcctgtctgaggccgaggaccacacccgggccctgcacaggctcatcgccaagagccgggagctgtatgagaagacagaagatgagagcttcaaggacacagcccaggaggagctgaagacccagttcaatgacatcatgacagtggccaaggagaagatgaggaaggtggaggagatcgtgaaggaccacctgatgtacctggatgctgtgcatgagttcacagactggctgcacagcgccaaggaggagctgcaccgctggagcgacatgtctggggacagcagcgccacccagaagaagctgagcaagatcaaggagctgattgacagccgggagatcggggccagccggctgagccgggtggagagcctggcccctgaggtgaagcagaacaccacagccagcggctgtgagctgatgcacacagagatgcaggccctgcgggctgactggaagcagtgggaggacagcgtcttccagacccagagctgcctggagaacctggtgtcccagatggccctgtctgagcaggagttcagcggccaggtggcccagctggagcaggccctggagcagttcagcgccctgctgaagacctgggcccagcagctgaccctgctggagggcaagaacacagatgaggagatcgtggagtgctggcacaagggccaggagatcctggatgccctgcagaaggccgagcccaggacagaggacctgaagagccagctgaatgagctgtgccgcttcagccgggacctgagcacctacagcggcaaggtgtctggcctcatcaaggagtacaactgcctgtgcctgcaggccagcaagggctgccagaacaaggagcagatcctgcagcagcgcttcaggaaggccttccgggacttccagcagtggctggtgaatgccaagatcaccacagccaagtgctttgacatcccccagaacatcagcgaggtgtccaccagcctgcagaagatccaggagttcctgtctgagagtgaaaatggccagcacaagctgaacatgatgctgagcaaaggagagctgctgagcaccctgctgaccaaggagaaggccaagggcatccaggccaaggtgacagctgccaaggaggactggaagaacttccacagcaacctgcaccagaaggagagcgccctggagaacctgaagatccagatgaaggactttgaggtgtctgctgagcccatccaggactggctgagcaagacagagaagatggtgcatgagagcagcaaccggctgtatgacctgcctgccaagaggcgggagcagcagaagctgcagagcgtgctggaggagatccactgctatgagccccagctgaaccggctgaaggagaaggcccagcagctgtgggagggccaggccgccagcaagagcttccgccaccgggtgtcccagctgagcagccagtacctggccctgagcaacctgaccaaggagaaggtgtcccggctggaccgcatcgtggccgagcacaaccagttcagcctgggcatcaaggagctgcaggactggatgacagatgccatccacatgctggacagctactgccaccccaccagtgacaagtctgtgctggacagcaggaccctgaagctggaggccctgctgtctgtgaagcaggagaaggagatccagatgaagatgattgtgaccagaggagagagcgtgctgcagaacaccagccctgagggcatccccaccatccagcagcagctgcagagcgtgaaggacatgtgggccagcctgctgtctgctggcatccgctgcaagagccagctggagggcgccctgagcaagtggaccagctaccaggatggagtgcggcagttcagcggctggatggacagcatggaggccaacctgaatgaaagtgagcggcagcacgccgagctgcgggacaagaccaccatgctgggcaaggccaagctgctgaatgaggaggtgctgagctacagcagcctgctggagaccatcgaggtgaagggggccggcatgacagagcactacgtgacccagctggagctgcaggacctgcaggagcgctaccgggccatccaggagcgggccaaggaggccgtgaccaagtctgagaagctggtgcggctgcaccaggagtaccagagggacctgaaggcctttgaggtgtggctgggccaggagcaggagaagctggaccagtacagcgtgctggagggagatgcccacacccatgagaccaccctgcgggacctgcaggagctgcaggtgcactgtgccgagggccaggccctgctgaacagcgtgctgcacaccagagaagatgtgatccccagcggcatcccccaggccgaggaccgggccctggagagcctgcggcaggactggcaggcctaccagcaccggctgtctgagaccaggacccagttcaacaacgtggtgaacaagctgcggctgatggagcagaagttccagcaggtggatgagtggctgaagacagctgaggagaaggtgagccccaggacccggcggcagagcaacagagccaccaaggagatccagctgcaccagatgaagaagtggcatgaggaggtgacagcctacagagatgaggtggaggaggtgggcgcccgggcccaggagatcctggatgagagccacgtgaacagcaggatgggctgccaggccacccagctgaccagccgctaccaggccctgctgctgcaggtgctggagcagatcaagttcctggaggaggagatccagagcctggaggagagcgagagcagcctgagcagctacagcgactggtacggcagcacccacaagaacttcaagaatgtggccaccaagattgacaaggtggacacagtgatgatgggcaagaagctgaagaccctggaggtgctgctgaaggacatggagaagggccacagcctgctgaagagcgcccgggagaagggggagagagctgtgaagtacctggaggagggggaggccgagcggctgaggaaggagatccatgaccacatggagcagctgaaggagctgaccagcacagtgaggaaggagcacatgaccctggagaagggcctgcacctggccaaggagttcagtgacaagtgcaaggccctgacccagtggattgctgagtaccaggagatcctgcacgtgcctgaggagcccaagatggagctgtatgagaagaaggcccagctgagcaagtacaagagcctgcagcagacagtgctgagccatgagcccagcgtgaagtctgtgcgggagaagggggaggccctgctggagctggtgcaggatgtgaccctgaaggacaagattgaccagctgcagagcgactaccaggacctgtgcagcatcggcaaggagcacgtgttcagcctggaggccaaggtgaaggaccacgaggactacaacagcgagctgcaggaggtggagaagtggctgctgcagatgagcggccgcctggtggccccagacctgctggagaccagcagcctggagaccatcacccagcagctggcccaccacaaggccatgatggaggagattgctggctttgaagatcggctgaacaacctgcagatgaagggggacaccctgattggccagtgtgccgaccacctgcaggccaagctgaagcagaatgtgcacgcccacctgcagggcaccaaggacagctacagcgccatctgcagcacagcccagaggatgtaccagagcctggagcacgagctgcagaagcacgtgtcccggcaggacaccctgcagcagtgccaggcctggctgtctgctgtgcagcctgacctggagcccagcccccagccccccctgagcagagctgaggccatcaagcaggtgaagcacttccgggccctgcaggagcaggcccggacctacctggacctgctgtgcagcatgtgtgacctgagcaatgcctctgtgaagaccacagccaaggacatccagcagacagagcagaccatcgagcagaagctggtgcaggcccagaacctgacccagggctgggaggagatcaagcacctgaagtctgagctgtggatctacctgcaggatgctgaccagcagctgcagaacatgaagaggaggcacagcgagctggagctgaacatcgcccagaacatggtgtcccaggtgaaggactttgtgaagaagctgcagagcaagcaggcctctgtgaacaccatcatcgagaaggtgaacaagctgaccaagaaggaggagagccctgagcacaaggagatcaaccacctgaatgaccagtggctggacctgtgccggcagagcaacaacctgtgcctgcagcgggaggaggacctgcagaggacccgggactaccatgactgcatgaatgtggtggaggtgttcctggagaagttcaccacagagtgggacaacctggcccggagtgatgctgagagcacagctgtgcacctggaggccctgaagaagctggccctggccctgcaggagaggaaatatgccatcgaggacctgaaggaccagaagcagaagatgattgagcacctgaacctggatgacaaggagctggtgaaggagcagaccagccacctggagcagcgctggttccagctggaggacctgatcaagaggaagatccaggtgtctgtgaccaacctggaggagctgaatgtggtgcagagccgcttccaggagctgatggagtgggccgaggagcagcagcccaacattgctgaggccctgaagcagagccccccaccagacatggcccagaacctgctgatggaccacctggccatctgcagcgagctggaggccaagcagatgctgctgaagagcctcatcaaggatgctgacagagtgatggctgacctgggcctgaatgaaaggcaggtgatccagaaggccctgagtgatgcccagagccacgtgaactgcctgagtgacctggtgggccagaggaggaagtacctgaacaaggccctgtctgagaagacccagttcctgatggctgtgttccaggccaccagccagatccagcagcacgagaggaagatcatgttccgggagcacatctgcctgctgcctgatgatgtgtccaagcaggtgaagacctgcaagagcgcccaggccagcctgaagacctaccagaatgaggtgacaggcctgtgggcccagggccgggagctgatgaaggaggtgacagagcaggagaagtctgaggtgctgggcaagctgcaggagctgcagagcgtgtatgattctgtgctgcagaagtgcagccaccggctgcaggagctggagaagaacctggtgtccaggaagcacttcaaggaggactttgacaaggcctgccactggctgaagcaggccgacatcgtgaccttccctgagatcaacctgatgaatgaaagcagcgagctgcacacccagctggccaagtaccagaacatcctggagcagagcccagaatatgagaacctgctgctgaccctgcagaggacaggccagaccatcctgcccagcctgaatgaggtggaccacagctacctgtctgagaagctgaatgccctgccccggcagttcaacgtgattgtggccctggccaaggacaagttctacaaggtgcaggaggccatcctggccaggaaggagtatgccagcctcatcgagctgaccacccagagcctgtctgagctggaggcccagttcctgaggatgagcaaggtgcccacagacctggccgtggaggaggccctgagcctgcaggacggctgccgggccatcctggatgaggtggccggcctgggggaggccgtggatgagctgaaccagaagaaggagggcttccgcagcacaggccagccctggcagcctgacaagatgctgcacctggtgaccctgtaccaccggctgaagaggcagacagagcagagggtgtccctgctggaggacaccaccagcgcctaccaggagcacgagaagatgtgccagcagctggagcggcagctgaagtctgtgaaggaggagcagagcaaggtgaatgaggagaccctgcctgctgaggagaagctgaagatgtaccacagcctggccggcagcctgcaggacagcggcatcgtgctgaagagggtgaccatccacctggaggacctggccccccacctggaccccctggcctatgagaaggcccggcaccagatccagagctggcagggcgagctgaagctgctgaccagcgccatcggggagaccgtgacagaatgtgagagcaggatggtgcagagcattgacttccagacagagatgagccgcagcctggactggctgcggcgggtgaaggccgagctgagcggccctgtgtacctggacctgaacctgcaggacatccaggaggagatcaggaagatccagatccaccaggaggaggtgcagagcagcctgcgcatcatgaatgccctgagccacaaggagaaggagaagttcaccaaggccaaggagctgatctctgctgacctggagcacagcctggccgagctgtctgagctggatggagacatccaggaggccctgcggacccggcaggccaccctgacagagatctacagccagtgccagcgctactaccaggtgttccaggccgccaatgactggctggaggatgcccaggagctgctgcagctggccggaaatggcctggatgtggagagcgctgaggagaacctgaagagccacatggagttcttcagcacagaggaccagttccacagcaacctggaggagctgcacagcctggtggccaccctggaccccctcatcaagcccaccgggaaggaggacctggagcagaaggtggccagcctggagctgcggagccagaggatgagccgggacagcggggcccaggtggacctgctgcagcgctgcacagcccagtggcatgactaccagaaggcccgggaggaggtgattgagctgatgaatgacacagagaagaagctgtctgagttcagcctgctgaagaccagcagcagccatgaggccgaggagaagctgtctgagcacaaggccctggtgtctgtggtgaacagcttccacgagaagatcgtggccctggaggagaaggccagccagctggagaagacaggaaatgatgccagcaaggccaccctgagccgctccatgaccaccgtgtggcagcgctggacccggctgcgggctgtggcccaggaccaggagaagatcctggaggatgctgtggatgagtggacaggcttcaacaacaaggtgaagaaggccacagagatgattgaccagctgcaggacaagctgcccggcagcagcgctgagaaggccagcaaggccgagctgctgaccctgctggagtaccatgacacctttgtgctggagctggagcagcagcagagcgccctgggcatgctgcggcagcagaccctgtccatgctgcaggatggagctgcccccaccccaggagaggagccccccctgatgcaggagatcacagccatgcaggaccgctgcctgaacatgcaggagaaggtgaagaccaacgggaagctggtgaagcaggagctgaaggaccgggagatggtggagacccagatcaacagcgtgaagtgctgggtgcaggagaccaaggagtacctgggcaaccccaccattgaaattgatgcccagctggaggagctgcagatcctgctgacagaggccaccaaccaccggcagaacatcgagaagatggccgaggagcagaaggagaagtacctgggcctgtacaccatcctgcccagcgagctgagcctgcagctggccgaggtggccctggacctgaagatccgggaccagatccaggacaagatcaaggaggtggagcagagcaaggccaccagccaggagctgagccggcagatccagaagctggccaaggacctgaccaccatcctgaccaagctgaaggccaagacagacaacgtggtgcaggccaagacagaccagaaggtgctgggggaggagctggatggctgcaacagcaagctgatggagctggatgctgctgtgcagaagttcctggagcagaatggccagctgggcaagcccctggccaagaagattggcaagctgacagagctgcaccagcagaccatccggcaggccgagaaccggctgagcaagctgaaccaggccgccagccacctggaggagtacaatgagatgctggagctgatcctgaagtggattgagaaggccaaggtgctggcccacggcaccatcgcctggaacagcgccagccagctgcgggagcagtacatcctgcaccagaccctgctggaggagagcaaggagattgattctgagctggaggccatgacagagaagctgcagtacctgacctctgtgtactgcacagagaagatgagccagcaggtggccgagctgggccgggagacagaggagctgcggcagatgatcaagatccggctgcagaacctgcaggatgctgccaaggacatgaagaagtttgaagctgagctgaagaagctgcaggccgccctggagcaggcccaggccaccctgaccagccctgaggtgggccgcctgagcctgaaggagcagctgagccaccggcagcacctgctgtctgagatggagagcctgaagcccaaggtgcaggccgtgcagctgtgccagagcgccctgcgcatcccagaagatgtggtggccagcctgcccctgtgccacgccgccctgcggctgcaggaggaggccagccggctgcagcacacagccatccagcagtgcaacatcatgcaggaggccgtggtgcagtatgagcagtatgagcaggagatgaagcacctgcagcagctgattgagggcgcccaccgggagattgaggacaagcctgtggccaccagcaacatccaggagctgcaggcccagatcagcagacatgaggagctggcccagaagatcaagggctaccaggagcagatcgccagcctgaacagcaagtgcaagatgctgaccatgaaggccaagcacgccaccatgctgctgactgtgacagaggtggagggcctggccgagggcacagaggacctggatggagagctgctgcccacccccagcgcccaccccagcgtggtgatgatgacagctggccgctgccacaccctgctgagccctgtgacagaggagagcggggaggagggcaccaacagcgagatcagcagccccccagcctgccgcagccccagccctgtggccaacacagatgcctctgtgaaccaggacatcgcctactaccaggccctgtctgctgagcggctgcagacagatgctgccaagatccaccccagcaccagcgccagccaggagttctatgagcccggcctggagcccagcgccacagccaagctgggggacctgcagaggtcctgggagaccctgaagaatgtcatcagcgagaagcagaggaccctgtatgaggccctggagcggcagcagaagtaccaggacagcctgcagagcatcagcaccaagatggaggccatcgagctgaagctgtctgagagccctgagcccggccgcagccctgagagccagatggccgagcaccaggccctgatggatgagatcctgatgctgcaggatgagatcaatgagctgcagagcagcctggccgaggagctggtgtctgagagctgtgaggccgaccctgctgagcagctggccctgcagagcaccctgactgtgctggccgagaggatgagcaccatccgcatgaaggccagcggcaagaggcagctgctggaggagaagctgaatgaccagctggaggagcagaggcaggagcaggccctgcagcgctaccgctgtgaggctgatgagctggacagctggctgctgagcaccaaggccaccctggacacagccctgagcccccccaaggagcccatggacatggaggcccagctgatggactgccagaacatgctggtggagattgagcagaaggtggtggccctgtctgagctgtctgtgcacaatgaaaacctgctgctggagggcaaggcccacaccaaggatgaggccgagcagctggccggcaagctgcggcggctgaagggcagcctgctggagctgcagagggccctgcatgacaagcagctgaacatgcagggcacagcccaggagaaggaggagagtgatgtggacctgacagccacccagagccctggggtgcaggagtggctggcccaggcccggaccacctggacccagcagaggcagagcagcctgcagcagcagaaggagctggagcaggagctggccgagcagaagagcctgctgcggtctgtggccagcagaggagaggagatcctgatccagcacagcgctgctgagaccagcggagatgctggggagaagccagatgtgctgagccaggagctgggcatggagggggagaagagcagcgctgaggaccagatgaggatgaagtgggagagcctgcaccaggagttcagcaccaagcagaagctgctgcagaatgtgctggagcaggagcaggagcaggtgctgtacagccggcccaaccggctgctgagcggcgtgcccctgtacaagggagatgtgcccacccaggacaagtctgctgtgaccagcctgctggatggcctgaaccaggcctttgaggaggtgagcagccagagcggcggggccaagaggcagagcatccacctggagcagaagctgtatgatggagtgtctgccaccagcacctggctggatgatgtggaggagcggctgtttgtggccacagccctgctgcctgaggagacagagacctgcctcttcaaccaggagatcctggccaaggacatcaaggagatgtctgaggagatggacaagaacaagaacctcttcagccaggccttcccagaaaatggagacaacagagatgtgattgaggacaccctgggctgcctgctgggccgcctgagcctgctggacagcgtggtgaaccagcgctgccaccagatgaaggagcggctgcagcagatcctgaacttccagaatgacctgaaggtgctcttcaccagcctggccgacaacaagtacatcatcctgcagaagctggccaacgtgtttgagcagcctgtggccgagcagatcgaggccatccagcaggccgaggatggcctgaaggagtttgatgctggcatcatcgagctgaagagaagaggagacaagctgcaggtggagcagcccagcatgcaggagctgagcaagctgcaggacatgtatgatgagctgatgatgatcatcggcagcagaagaagtggcctgaaccagaacctgaccctgaagagccagtatgagcgggccctgcaggacctggccgacctgctggagaccggccaggagaagatggccggggaccagaagatcatcgtgagcagcaaggaggagatccagcagctgctggacaagcacaaggagtacttccagggcctggagagccacatgatcctgacagagaccctcttcaggaagatcatcagctttgctgtgcagaaggagacccagttccacacagagctgatggcccaggccagcgctgtgctgaagagggcccacaagaggggcgtggagctggagtacatcctggagacctggagccacctggatgaggaccagcaggagctgagccggcagctggaggtggtggagagcagcatccccagcgtgggcctggtggaggagaatgaagatcggctgattgaccgcatcaccctgtaccagcacctgaagagcagcctgaatgagtaccagcccaagctgtaccaggtgctggatgatggcaagaggctgctgatcagcatcagctgcagcgacctggagagccagctgaaccagctgggggagtgctggctgagcaacaccaacaagatgagcaaggagctgcaccggctggagaccatcctgaagcactggacccgctaccagagcgagagcgctgacctgatccactggctgcagagcgccaaggaccggctggagttctggacccagcagagcgtgacagtgccccaggagctggagatggtgcgggaccacctgaatgccttcctggagttcagcaaggaggtggatgcccagagcagcctgaagagctctgtgctgagcacaggcaaccagctgctgcggctgaagaaggtggacacagccaccctgcggtctgagctgagcagaattgacagccagtggacagacctgctgaccaacatcccagctgtgcaggagaagctgcaccagctgcagatggacaagctgcccagcagacatgccatcagcgaggtgatgtcctggatcagcctgatggagaatgtcatccagaaggatgaggacaacatcaagaacagcatcggctacaaggccatccacgagtacctgcagaagtacaagggcttcaagattgacatcaactgcaagcagctgactgtggactttgtgaaccagagcgtgctgcagatcagcagccaggatgtggagagcaagagaagtgacaagacagactttgctgagcagctgggcgccatgaacaagtcctggcagatcctgcagggcctggtgacagagaagatccagctgctggagggcctgctggagagctggagcgaatatgagaacaacgtgcagtgcctgaagacctggtttgagacccaggagaagaggctgaagcagcagcacagaattggagaccaggcctctgtgcagaatgccctgaaggactgccaggacctggaggacctgatcaaggccaaggagaaggaggtggagaagattgagcagaatggcctggccctgatccagaacaagaaggaggatgtgagcagcatcgtgatgagcaccctgcgggagctgggccagacctgggccaacctggaccacatggtgggccagctgaagatcctgctgaagtctgtgctggaccagtggagcagccacaaggtggcctttgacaagatcaacagctacctgatggaggcccgctacagcctgagccgcttccggctgctgaccggcagcctggaggccgtgcaggtgcaggtggacaacctgcagaacctgcaggatgacctggagaagcaggagaggagcctgcagaagtttggcagcatcaccaaccagctgctgaaggagtgccacccccctgtgacagagaccctgaccaacaccctgaaggaggtgaacatgcgctggaacaacctgctggaggagattgctgagcagctgcagagcagcaaggccctgctgcagctgtggcagcgctacaaggactacagcaagcagtgtgccagcacagtgcagcagcaggaggacaggaccaatgagctgctgaaggccgccaccaacaaggacattgctgatgatgaggtggccacctggatccaggactgcaatgacctgctgaagggcctgggcaccgtgaaggacagcctcttcttcctgcacgagctgggggagcagctgaagcagcaggtggatgccagcgctgccagcgccatccagagcgaccagctgagcctgagccagcacctgtgtgccctggagcaggccctgtgcaagcagcagaccagcctgcaggccggcgtgctggactatgagacctttgccaagagcctggaggccctggaggcctggatcgtggaggccgaggagatcctgcagggccaggaccccagccacagcagtgacctgagcaccatccaggagaggatggaggagctgaagggccagatgctgaagttcagctccatggccccagacctggaccggctgaatgagctgggctaccgcctgcccctgaatgacaaggagatcaagaggatgcagaacctgaacagacactggagcctcatcagcagccagaccacagagcgcttcagcaagctgcagagcttcctgctgcagcaccagaccttcctggagaagtgtgagacctggatggagttcctggtgcagacagagcagaagctggccgtggagatcagcggcaactaccagcacctgctggagcagcagagggcccacgagctgttccaggccgagatgttcagccggcagcagatcctgcacagcatcatcattgatggccagaggctgctggagcagggccaggtggatgacagagatgagttcaacctgaagctgaccctgctgagcaaccagtggcagggcgtcatcagaagagcccagcagaggcggggcatcatcgacagccagatccggcagtggcagcgctaccgggagatggccgagaagctgaggaagtggctggtggaggtgtcctacctgcccatgagcggcctgggctctgtgcccatccccctgcagcaggcccggaccctgtttgatgaggtgcagttcaaggagaaggtgttcctgcggcagcagggcagctacatcctgactgtggaggccggcaagcagctgctgctgtctgctgacagcggggctgaggccgccctgcaggccgagctggccgagatccaggagaagtggaagagcgcctccatgaggctggaggagcagaagaagaagctggccttcctgctgaaggactgggagaagtgtgagaagggcattgctgacagcctggagaagctgcggaccttcaagaagaagctgagccagagcctgcctgaccaccacgaggagctgcatgctgagcagatgcgctgcaaggagctggagaatgctgtgggctcctggacagatgacctgacccagctgagcctgctgaaggacaccctgagcgcctacatctctgcagatgacatcagcatcctgaatgaaagagtggagctgctgcagaggcagtgggaggagctgtgccaccagctgagcctgcggcggcagcagattggagagcggctgaatgagtgggccgtgttcagcgagaagaacaaggagctgtgtgagtggctgacccagatggagagcaaggtgtcccagaatggagacatcctgattgaggagatgattgagaagctgaagaaggactaccaggaggagatcgccatcgcccaggagaacaagatccagctgcagcagatgggagagcggctggccaaggccagccatgagagcaaggccagcgagattgagtacaagctgggcaaggtgaatgaccgctggcagcacctgctggacctgattgctgcccgggtgaagaagctgaaggagaccctggtggccgtgcagcagctggacaagaacatgagcagcctgcggacctggctggcccacatcgagagcgagctggccaagcccatcgtgtatgacagctgcaacagcgaggagatccagaggaagctgaatgagcagcaggagctgcagagggacatcgagaagcacagcactggagtggcctctgtgctgaacctgtgtgaggtgctgctgcatgactgtgatgcctgtgccacagatgctgaatgtgacagcatccagcaggccaccaggaacctggaccggcgctggaggaacatctgtgccatgtccatggagcggcggctgaagattgaggagacctggaggctgtggcagaagttcctggatgactacagcagatttgaggactggctgaagagcagcgagaggacagctgccttccccagcagcagcggggtcatctacacagtggccaaggaggagctgaagaagtttgaggccttccagaggcaggtgcatgaatgtctgacccagctggagctgatcaacaagcagtaccgccgcctggccagagaaaatagaacagacagcgcctgcagcctgaagcagatggtgcatgagggcaaccagcgctgggacaacctgcagaagagggtgaccagcatcctgcggcggctgaagcacttcatcggccagcgggaggagtttgaaacagcccgggacagcatcctggtgtggctgacagagatggacctgcagctgaccaacatcgagcacttctctgaatgtgatgtgcaggccaagatcaagcagctgaaggccttccagcaggagatcagcctgaaccacaacaagattgagcagatcatcgcccagggcgagcagctgattgagaagtctgagcccctggatgctgccatcatcgaggaggagctggatgagctgcggcgctactgccaggaggtgtttggccgggtggagcgctaccacaagaagctgatccggctgcccctgcctgatgatgaacatgacctgagtgaccgggagctggagctggaggacagcgctgccctgagtgacctgcactggcatgacagatctgctgacagcctgctgagcccccagcccagcagcaacctgagcctgagcctggcccagcccctgcggtctgagaggagcggccgggacaccccagcctctgtggacagcatccccctggagtgggaccatgactatgacctgagccgggacctggagagcgccatgagccgggccctgcccagtgaagatgaggagggccaggatgacaaggacttctacctgcggggagctgtgggcctgagcggggaccacagcgccctggagagccagatccggcagctgggcaaggccctggatgacagccgcttccagatccagcagacagagaacatcatccgcagcaagacccccaccggccctgagctggacaccagctacaagggctacatgaagctgctgggagaatgtagcagcagcattgacagcgtgaagaggctggagcacaagctgaaggaggaggaggagagcctgcccggctttgtgaacctgcacagcacagagacccagacagctggggtcatcgaccgctgggagctgctgcaggcccaggccctgagcaaggagctgaggatgaagcagaacctgcagaagtggcagcagttcaacagcgacctgaacagcatctgggcctggctgggggacacagaggaggagctggagcagctgcagaggctggagctgagcacagacatccagaccatcgagctgcagatcaagaagctgaaggagctgcagaaggctgtggaccacaggaaggccatcatcctgagcatcaacctgtgcagccctgagttcacccaggccgacagcaaggagagccgggacctgcaggaccggctgagccagatgaatggccgctgggacagagtgtgcagcctgctggaggagtggaggggcctgctgcaggatgccctgatgcagtgccagggcttccacgagatgagccacggcctgctgctgatgctggagaacatcgacaggaggaagaatgagatcgtgcccatcgacagcaacctggatgctgagatcctgcaggaccaccacaagcagctgatgcagatcaagcatgagctgctggagagccagctgcgggtggccagcctgcaggacatgagctgccagctgctggtgaatgctgagggcacagactgcctggaggccaaggagaaggtgcacgtgattggcaaccggctgaagctgctgctgaaggaggtgagccgccacatcaaggagctggagaagctgctggatgtgagcagcagccagcaggacctgagctcctggagcagcgcagatgagctggacaccagcggctctgtgagccccaccagcggccgcagcacccccaaccggcagaagaccccccggggcaagtgcagcctgagccagcccggccccagcgtgagcagcccccacagccgcagcaccaagggcggcagtgacagcagcctgtctgagcccggccctggccgcagcggccggggcttcctgttccgggtgctgcgggccgccctgcccctgcagctgctgctgctgctgctgattggcctggcctgcctggtgcccatgtctgaggaggactacagctgtgccctgagcaacaactttgcccgctccttccaccccatgctgcgctacaccaacggccccccacccctgtag

SEQ ID NO: 171273 - DNA, 26250 bp, synthetic construct
  misc_feature 1..26250: note = Description of Artificial Sequence: Synthetic coding sequence
  source 1..26250: mol_type = other DNA
atggccaccagcagaggagccagccgctgcccccgggacatcgccaacgtgatgcagaggctgcaggatgagcaggagatcgtgcagaagaggaccttcaccaagtggatcaacagccacctggccaagaggaagccacccatggtggtggatgacctgtttgaggacatgaaggatggagtgaagctgctggccctgctggaggtgctgagcggccagaagctgccctgtgagcagggccgcaggatgaagagaattcatgctgtggccaacatcggcacagccctgaagttcctggagggcaggaagtccatgcaccggggcagccccatcaagctggtgaacatcaacagcacagacattgctgatggccggcccagcatcgtgctgggcctgatgtggaccatcatcctgtacttccagatcgaggagctgaccagcaacctgccccagctgcagagcctgagcagcagcgccagctctgtggacagcatcgtgagcagcgagacccccagcccccccagcaagaggaaggtgaccaccaagatccagggcaatgccaagaaggccctgctgaagtgggtgcagtacacagctgggaagcagacaggaattgaggtgaaggactttgggaagtcctggaggtctggagtggccttccacagcgtcatccacgccatccggcctgagctggtggacctggagaccgtgaagggccgcagcaaccgggagaacctggaggatgccttcaccatcgccgagacagagctgggcatcccccggctgctggaccctgaagatgtggatgtggacaagccagatgagaagagcatcatgacctacgtggcccagttcctgaagcactacccagacatccacaatgccagcacagatggccaggaggatgatgagatcctgcccggcttccccagctttgccaacagcgtgcagaacttcaagcgggaggacagagtcatcttcaaggagatgaaggtgtggattgagcagtttgagcgggacctgacccgggcccagatggtggagagcaacctgcaggacaagtaccagagcttcaagcacttccgggtgcagtatgagatgaagaggaagcagatcgagcacctgatccagcccctgcacagagatggcaagctgagcctggaccaggccctggtgaagcagagctgggacagagtgaccagccggctgtttgactggcacatccagctggacaagagcctgcctgcccccctgggcaccatcggggcctggctgtacagagctgaggtggccctgcgggaggagatcaccgtgcagcaggtgcatgaggagacagccaacaccatccagaggaagctggagcagcacaaggacctgctgcagaacacagatgcccacaagagggccttccacgagatctaccgcaccaggtctgtgaatggcatccctgtgcccccagaccagctggaggacatggccgagcgcttccactttgtgagcagcaccagcgagctgcacctgatgaagatggagttcctggagctgaagtaccgcctgctgagcctgctggtgctggccgagagcaagctgaagtcctggatcatcaagtatggaagaagagagagcgtggagcagctgctgcagaactacgtgtccttcatcgagaacagcaagttctttgagcagtatgaggtgacctaccagatcctgaagcagacagctgagatgtatgtgaaggcagatggctctgtggaggaggccgagaatgtgatgaagttcatgaatgagaccacagcccagtggaggaacctgtctgtggaggtgcgctctgtgcgctccatgctggaggaggtgatcagcaactgggacagatatggcaacacagtggccagcctgcaggcctggctggaggatgctgagaagatgctgaaccagagtgaaaatgccaagaaggacttcttcaggaacctgccccactggatccagcagcacacagccatgaatgatgctggcaacttcctgattgagacctgtgatgagatggtgtcccgggacctgaagcagcagctgctgctgctgaatggccgctggagggagctgttcatggaggtgaagcagtatgcccaggctgatgagatggacaggatgaagaaggagtacacagactgtgtggtgaccctgagcgcctttgccacagaggcccacaagaagctgtctgagcccctggaggtgtccttcatgaatgtgaagctgctgatccaggacctggaggacatcgagcagagggtgcctgtgatggatgcccagtacaagatcatcaccaagacagcccacctgatcaccaaggagagcccccaggaggagggcaaggagatgtttgccaccatgagcaagctgaaggagcagctgaccaaggtgaaggagtgctacagccccctgctgtatgagagccagcagctgctgatccccctggaggagctggagaagcagatgaccagcttctatgacagcctgggcaagatcaatgagatcatcaccgtgctggagcgggaggcccagagcagcgccctcttcaagcagaagcaccaggagctgctggcctgccaggagaactgcaagaagaccctgaccctgattgagaagggcagccagagcgtgcagaagtttgtgaccctgagcaatgtgctgaagcactttgaccagacccggctgcagaggcagattgctgacatccacgtggccttccagagcatggtgaagaagacaggagactggaagaagcacgtggagaccaacagccggctgatgaagaagtttgaggagagcagagctgagctggagaaggtgctgcgcatcgcccaggagggcctggaggagaagggggaccctgaggagctgctgcggcggcacacagagttcttcagccagctggaccagagggtgctgaatgccttcctgaaggcctgtgatgagctgacagacatcctgcctgagcaggagcagcagggcctgcaggaggccgtgaggaagctgcacaagcagtggaaggacctgcagggcgaggccccctaccacctgctgcacctgaagattgatgtggagaagaaccgcttcctggcctctgtggaggagtgcaggacagagctggaccgggagaccaagctgatgccccaggagggcagcgagaagatcatcaaggagcacagggtcttcttcagtgacaagggcccccaccacctgtgtgagaagaggctgcagctgattgaggagctgtgtgtgaagctgcctgtgcgggaccctgtgcgggacaccccaggcacctgccacgtgaccctgaaggagctgcgggccgccatcgacagcacctacaggaagctgatggaggaccctgacaagtggaaggactacaccagccgcttcagcgagttcagctcctggatcagcaccaatgagacccagctgaagggcatcaagggggaggccatcgacacagccaaccacggggaggtgaagagagctgtggaggagatcagaaatggagtgaccaagagaggagagaccctgtcctggctgaagagccggctgaaggtgctgacagaggtgtccagtgaaaatgaggcccagaagcagggagatgagctggccaagctgagcagcagcttcaaggccctggtgaccctgctgtctgaggtggagaagatgctgagcaactttggagactgtgtgcagtacaaggagatcgtgaagaacagcctggaggagctgatcagcggcagcaaggaggtgcaggagcaggccgagaagatcctggacacagagaacctgtttgaggcccagcagctgctgctgcaccaccagcagaagaccaagaggatcagcgccaagaagagagatgtgcagcagcagatcgcccaggcccagcagggcgagggcggcctgcctgaccggggccacgaggagctgaggaagctggagagcaccctggatggcctggagaggagccgggagcggcaggagcggcgcatccaggtgaccctgaggaagtgggagagatttgagaccaacaaggagaccgtggtgcgctacctgttccagacaggcagcagccatgagcgcttcctgtccttcagcagcctggagagcctgagcagcgagctggagcagaccaaggagttcagcaagaggacagagagcattgctgtgcaggccgagaacctggtgaaggaggccagcgagatccccctgggcccccagaacaagcagctgctgcagcagcaggccaagagcatcaaggagcaggtgaagaagctggaggacaccctggaggaggacatcaagaccatggagatggtgaagaccaagtgggaccacttcggcagcaactttgagaccctgtctgtgtggatcacagagaaggagaaggagctgaatgccctggagaccagcagcagcgccatggacatgcagatcagccagatcaaggtgaccatccaggagattgagagcaagctgagcagcatcgtgggcctggaggaggaggcccagagctttgcccagtttgtgaccactggagagagcgcccgcatcaaggccaagctgacccagatcagaagatatggagaggagctgcgggagcacgcccagtgcctggagggcaccatcctgggccacctgagccagcagcagaagtttgaggagaacctgaggaagatccagcagagcgtgtctgaatttgaggacaagctggccgtgcccatcaagatctgcagcagcgccacagagacctacaaggtgctgcaggagcacatggacctgtgccaggccctggagagcctgagcagcgccatcacagccttcagcgccagcgccaggaaggtggtgaacagagacagctgtgtgcaggaggccgccgccctgcagcagcagtatgaggacatcctgcggcgggccaaggagcggcagacagccctggagaacctgctggcccactggcagaggctggagaaggagctgagcagcttcctgacctggctggagcggggggaggccaaggccagcagccctgagatggacatctctgctgacagagtgaaggtggagggggagctgcagctgatccaggccctgcagaatgaggtggtgtcccaggccagcttctacagcaagctgctgcagctgaaggagagcctcttctctgtggccagcaaggatgatgtgaagatgatgaagctgcacctggagcagctggatgagcgctggagggacctgccccagatcatcaacaagaggatcaacttcctgcagagcgtggtggccgagcaccagcagtttgatgagctgctgctgtccttctctgtgtggatcaagctgttcctgtctgagctgcagaccaccagcgagatcagcatcatggaccaccaggtggccctgaccaggcacaaggaccatgctgctgaggtggagagcaagaagggggagctgcagagcctgcagggccacctggccaagctgggcagcctgggccgggcagaggacctgcacctgctgcagggcaaggccgaggactgcttccagctgtttgaggaggccagccaggtggtggagcggcggcagctggccctgagccacctggccgagttcctgcagagccacgccagcctgagcggcatcctgcggcagctgcggcagacagtggaggccaccaacagcatgaacaagaatgaaagtgacctgattgagaaggacctgaatgatgccctgcagaatgccaaggccctggagagcgctgctgtgtccctggatggcatcctgagcaaggcccagtaccacctgaagattggcagcagcgagcagaggaccagctgccgggccacagctgaccagctgtgtggggaggtggagcgcatccagaacctgctgggcaccaagcagagcgaggctgatgccctggccgtgctgaagaaggccttccaggaccagaaggaggagctgctgaagagcattgaggacatcgaggagaggacagacaaggagcggctgaaggagcccacccggcaggccctgcagcagaggctgcgggtcttcaaccagctggaggatgagctgaacagccatgagcacgagctgtgctggctgaaggacaaggccaagcagatcgcccagaaggatgtggcctttgcccctgaggtggaccgggagatcaaccggctggaggtgacctgggatgacaccaagaggctcatccacgagaaccagggccagtgctgcggcctgattgacctgatgagggagtaccagaacctgaagtctgctgtgtccaaggtgctggagaatgccagcagcgtcatcgtgaccaggaccaccatcaaggaccaggaggacctgaagtgggccttcagcaagcatgaaacagccaagaacaagatgaactacaagcagaaggacctggacaacttcaccagcaagggcaagcacctgctgtctgagctgaagaagatccacagcagtgacttcagcctggtgaagacagacatggagagcacagtggacaagtggctggatgtgtctgagaagctggaggagaacatggaccggctgcgggtgtccctgagcatctgggatgatgtgctgagcaccagagatgaaattgagggctggagcaacaactgtgtgccccagatggccgagaacatcagcaacctggacaaccacctgcgggcagaggagctgctgaaggagtttgaaagtgaggtgaagaacaaggccctgcggctggaggagctgcacagcaaggtgaatgacctgaaggagctgaccaagaacctggagaccccaccagacctgcagttcatcgaggccgacctgatgcagaagctggagcacgccaaggagatcacagaggtggccaagggcaccctgaaggacttcaccgcccagagcacccaggtggagaagttcatcaatgacatcaccacctggttcaccaaggtggaggagagcctgatgaactgtgcccagaatgagacctgtgaggccctgaagaaggtgaaggacatccagaaggagctgcagagccagcagagcaacatcagcagcacccaggagaacctgaacagcctgtgcaggaagtaccacagcgctgagctggagagcctgggccgggccatgacaggcctcatcaagaagcatgaggccgtgtcccagctgtgcagcaagacccaggccagcctgcaggagagcctggagaagcacttcagcgagagcatgcaggagttccaggagtggttcctgggcgccaaggctgctgccaaggagagcagtgacagaactggagacagcaaggtgctggaggccaagctgcatgacctgcagaacatcctggacagcgtgtctgatggccagagcaagctggatgctgtgacccaggagggccagaccctgtatgcccacctgagcaagcagatcgtgagcagcatccaggagcagatcaccaaggccaatgaggagttccaggccttcctgaagcagtgcctgaaggacaagcaggccctgcaggactgtgccagcgagctgggcagctttgaggaccagcacaggaagctgaacctgtggattcatgagatggaggagcgcttcaacacagagaacctgggggagagcaagcagcacatccctgagaagaagaatgaggtgcacaaggtggagatgttcctgggggagctgctggccgcccgggagagcctggacaagctgagccagaggggccagctgctgtctgaggagggccacggggccggccaggagggccgcctgtgcagccagctgctgaccagccaccagaacctgctgaggatgaccaaggagaagctgcggagctgccaggtggccctgcaggagcacgaggccctggaggaggccctgcagagcatgtggttctgggtgaaggccatccaggaccggctggcctgtgccgagagcaccctgggcagcaaggacaccctggagaagaggctgagccagatccaggacatcctgctgatgaagggggagggggaggtgaagctgaacatggccatcggcaagggggagcaggccctgcggagcagcaacaaggagggccagagggtcatccagacccagctggagaccctgaaggaggtgtgggccgacatcatgagcagctctgtgcacgcccagagcaccctggagagcgtcatcagccagtggaatgactatgtggagaggaagaaccagctggagcagtggatggagagcgtggaccagaagattgagcaccccctgcagccccagcccggcctgaaggagaagtttgtgctgctggaccacctgcagagcatcctgtctgaggccgaggaccacacccgggccctgcaccggctgattgccaagagccgggagctgtatgagaagacagaagatgagagcttcaaggacacagcccaggaggagctgaagacccagttcaatgacatcatgacagtggccaaggagaagatgaggaaggtggaggagatcgtgaaggaccacctgatgtacctggatgctgtgcatgagttcacagactggctgcacagcgccaaggaggagctgcaccgctggagcgacatgtctggggacagcagcgccacccagaagaagctgagcaagatcaaggagctgattgacagccgggagattggagccagccggctgagccgggtggagagcctggcccctgaggtgaagcagaacaccacagccagcggctgtgagctgatgcacacagagatgcaggccctgcgggctgactggaagcagtgggaggacagcgtcttccagacccagagctgcctggagaacctggtgtcccagatggccctgtctgagcaggagttcagcggccaggtggcccagctggagcaggccctggagcagttcagcgccctgctgaagacctgggcccagcagctgaccctgctggagggcaagaacacagatgaggagatcgtggagtgctggcacaagggccaggagatcctggatgccctgcagaaggccgagcccaggacagaggacctgaagagccagctgaatgagctgtgccgcttcagccgggacctgagcacctacagcggcaaggtgtctggcctcatcaaggagtacaactgcctgtgcctgcaggccagcaagggctgccagaacaaggagcagatcctgcagcagcgcttcaggaaggccttccgggacttccagcagtggctggtgaatgccaagatcaccacagccaagtgctttgacatcccccagaacatcagcgaggtgtccaccagcctgcagaagatccaggagttcctgtctgagagtgaaaatggccagcacaagctgaacatgatgctgagcaagggggagctgctgagcaccctgctgaccaaggagaaggccaagggcatccaggccaaggtgacagctgccaaggaggactggaagaacttccacagcaacctgcaccagaaggagagcgccctggagaacctgaagatccagatgaaggactttgaggtgtctgctgagcccatccaggactggctgagcaagacagagaagatggtgcatgagagcagcaaccggctgtatgacctgcctgccaagagaagagagcagcagaagctgcagagcgtgctggaggagatccactgctatgagccccagctgaaccggctgaaggagaaggcccagcagctgtgggagggccaggccgccagcaagagcttccgccaccgggtgtcccagctgagcagccagtacctggccctgagcaacctgaccaaggagaaggtgtcccggctggacagaattgtggccgagcacaaccagttcagcctgggcatcaaggagctgcaggactggatgacagatgccatccacatgctggacagctactgccaccccaccagtgacaagtctgtgctggacagcaggaccctgaagctggaggccctgctgtctgtgaagcaggagaaggagatccagatgaagatgattgtgaccagaggagagagcgtgctgcagaacaccagccctgagggcatccccaccatccagcagcagctgcagagcgtgaaggacatgtgggccagcctgctgtctgctggcatccgctgcaagagccagctggagggcgccctgagcaagtggaccagctaccaggatggagtgcggcagttcagcggctggatggacagcatggaggccaacctgaatgaaagtgagcggcagcacgccgagctgcgggacaagaccaccatgctgggcaaggccaagctgctgaatgaggaggtgctgagctacagcagcctgctggagaccatcgaggtgaagggagctggcatgacagagcactacgtgacccagctggagctgcaggacctgcaggagcgctaccgggccatccaggagcgggccaaggaggccgtgaccaagtctgagaagctggtgcggctgcaccaggagtaccagagggacctgaaggcctttgaggtgtggctgggccaggagcaggagaagctggaccagtacagcgtgctggagggagatgcccacacccatgagaccaccctgcgggacctgcaggagctgcaggtgcactgtgccgagggccaggccctgctgaacagcgtgctgcacacccgggaggatgtgatccccagcggcatcccccaggctgaagatcgggccctggagagcctgcggcaggactggcaggcctaccagcaccggctgtctgagaccaggacccagttcaacaacgtggtgaacaagctgcggctgatggagcagaagttccagcaggtggatgagtggctgaagacagctgaggagaagaagtggcatgaggaggtgacagcctacagagatgaggtggaggaggtgggcgcccgggcccaggagatcctggatgagagccacgtgaacagcaggatgggctgccaggccacccagctgaccagccgctaccaggccctgctgctgcaggtgctggagcagatcaagttcctggaggaggagatccagagcctggaggagagcgagagcagcctgagcagctacagcgactggtacggcagcacccacaagaacttcaagaatgtggccaccaagattgacaaggtggacacagtgatgatgggcaagaagctgaagaccctggaggtgctgctgaaggacatggagaagggccacagcctgctgaagagcgcccgggagaagggggagagagctgtgaagtacctggaggagggggaggccgagcggctgaggaaggagatccatgaccacatggagcagctgaaggagctgaccagcacagtgaggaaggagcacatgaccctggagaagggcctgcacctggccaaggagttcagtgacaagtgcaaggccctgacccagtggattgctgagtaccaggagatcctgcacgtgcctgaggagcccaagatggagctgtatgagaagaaggcccagctgagcaagtacaagagcctgcagcagacagtgctgagccatgagcccagcgtgaagtctgtgcgggagaagggggaggccctgctggagctggtgcaggatgtgaccctgaaggacaagattgaccagctgcagagcgactaccaggacctgtgcagcatcggcaaggccatgatggaggagattgctggctttgaggaccggctgaacaacctgcagatgaagggggacaccctcatcggccagtgtgccgaccacctgcaggccaagctgaagcagaatgtgcacgcccacctgcagggcaccaaggacagctacagcgccatctgcagcacagcccagaggatgtaccagagcctggagcacgagctgcagaagcacgtgtcccggcaggacaccctgcagcagtgccaggcctggctgtctgctgtgcagcctgacctggagcccagcccccagccccccctgagcagagctgaggccatcaagcaggtgaagcacttccgggccctgcaggagcaggcccggacctacctggacctgctgtgcagcatgtgtgacctgagcaatgcctctgtgaagaccacagccaaggacatccagcagacagagcagaccatcgagcagaagctggtgcaggcccagaacctgacccagggctgggaggagatcaagcacctgaagtctgagctgtggatctacctgcaggatgctgaccagcagctgcagaacatgaagagaagacacagcgagctggagctgaacatcgcccagaacatggtgtcccaggtgaaggactttgtgaagaagctgcagagcaagcaggcctctgtgaacaccatcatcgagaaggtgaacaagctgaccaagaaggaggagagccctgagcacaaggagatcaaccacctgaatgaccagtggctggacctgtgccggcagagcaacaacctgtgcctgcagcgggaggaggacctgcagaggacccgggactaccatgactgcatgaatgtggtggaggtgttcctggagaagttcaccacagagtgggacaacctggcccggagtgatgctgagagcacagctgtgcacctggaggccctgaagaagctggccctggccctgcaggagaggaaatatgccatcgaggacctgaaggaccagaagcagaagatgattgagcacctgaacctggatgacaaggagctggtgaaggagcagaccagccacctggagcagcgctggttccagctggaggacctgatcaagaggaagatccaggtgtctgtgaccaacctggaggagctgaatgtggtgcagagccgcttccaggagctgatggagtgggccgaggagcagcagcccaacattgctgaggccctgaagcagagccccccaccagacatggcccagaacctgctgatggaccacctggccatctgcagcgagctggaggccaagcagatgctgctgaagagcctcatcaaggatgctgacagagtgatggctgacctgggcctgaatgaaaggcaggtgatccagaaggccctgagtgatgcccagagccacgtgaactgcctgagtgacctggtgggccagaggaggaagtacctgaacaaggccctgtctgagaagacccagttcctgatggctgtgttccaggccaccagccagatccagcagcacgagaggaagatcatgttccgggagcacatctgcctgctgcctgatgatgtgtccaagcaggtgaagacctgcaagagcgcccaggccagcctgaagacctaccagaatgaggtgacaggcctgtgggcccagggccgggagctgatgaaggaggtgacagagcaggagaagtctgaggtgctgggcaagctgcaggagctgcagagcgtgtatgacagcgtgctgcagaagtgcagccaccggctgcaggagctggagaagaacctggtgtccaggaagcacttcaaggaggactttgacaaggcctgccactggctgaagcaggccgacatcgtgaccttccctgagatcaacctgatgaatgaatcttctgagctgcacacccagctggccaagtaccagaacatcctggagcagagcccagaatatgagaacctgctgctgaccctgcagaggacaggccagaccatcctgcccagcctgaatgaggtggaccacagctacctgtctgagaagctgaatgccctgccccggcagttcaacgtcatcgtggccctggccaaggacaagttctacaaggtgcaggaggccatcctggccaggaaggagtatgccagcctgattgagctgaccacccagagcctgtctgagctggaggcccagttcctgaggatgagcaaggtgcccacagacctggccgtggaggaggccctgagcctgcaggacggctgccgggccatcctggatgaggtggccggcctgggggaggccgtggatgagctgaaccagaagaaggagggcttccgcagcacaggccagccctggcagcctgacaagatgctgcacctggtgaccctgtaccaccggctgaagaggcagacagagcagagggtgtccctgctggaggacaccaccagcgcctaccaggagcacgagaagatgtgccagcagctggagcggcagctgaagtctgtgaaggaggagcagagcaaggtgaatgaggagaccctgcctgctgaggagaagctgaagatgtaccacagcctggccggcagcctgcaggacagcggcatcgtgctgaagagggtgaccatccacctggaggacctggccccccacctggaccccctggcctatgagaaggcccggcaccagatccagagctggcagggcgagctgaagctgctgaccagcgccatcggggagaccgtgacagaatgtgagagcaggatggtgcagagcattgacttccagacagagatgagccgcagcctggactggctgcggcgggtgaaggccgagctgagcggccctgtgtacctggacctgaacctgcaggacatccaggaggagatcaggaagatccagatccaccaggaggaggtgcagagcagcctgcgcatcatgaatgccctgagccacaaggagaaggagaagttcaccaaggccaaggagctgatctctgctgacctggagcacagcctggccgagctgtctgagctggatggagacatccaggaggccctgcggacccggcaggccaccctgacagagatctacagccagtgccagcgctactaccaggtgttccaggccgccaatgactggctggaggatgcccaggagctgctgcagctggccggaaatggcctggatgtggagagcgctgaggagaacctgaagagccacatggagttcttcagcacagaggaccagttccacagcaacctggaggagctgcacagcctggtggccaccctggaccccctcatcaagcccaccgggaaggaggacctggagcagaaggtggccagcctggagctgcggagccagaggatgagccgggacagcggggcccaggtggacctgctgcagcgctgcacagcccagtggcatgactaccagaaggcccgggaggaggtgattgagctgatgaatgacacagagaagaagctgtctgagttcagcctgctgaagaccagcagcagccatgaagctgaggagaagctgtctgagcacaaggccctggtgtctgtggtgaacagcttccacgagaagatcgtggccctggaggagaaggccagccagctggagaagacaggaaatgatgccagcaaggccaccctgagccgctccatgaccaccgtgtggcagcgctggacccggctgcgggctgtggcccaggaccaggagaagatcctggaggatgctgtggatgagtggacaggcttcaacaacaaggtgaagaaggccacagagatgattgaccagctgcaggacaagctgcccggcagcagcgctgagaaggccagcaaggccgagctgctgaccctgctggagtaccatgacacctttgtgctggagctggagcagcagcagagcgccctgggcatgctgcggcagcagaccctgtccatgctgcaggatggagctgcccccaccccaggagaggagccccccctgatgcaggagatcacagccatgcaggaccgctgcctgaacatgcaggagaaggtgaagaccaacgggaagctggtgaagcaggagctgaaggaccgggagatggtggagacccagatcaacagcgtgaagtgctgggtgcaggagaccaaggagtacctgggcaaccccaccatcgagattgatgcccagctggaggagctgcagatcctgctgacagaggccaccaaccaccggcagaacatcgagaagatggccgaggagcagaaggagaagtacctgggcctgtacaccatcctgcccagcgagctgagcctgcagctggccgaggtggccctggacctgaagatccgggaccagatccaggacaagatcaaggaggtggagcagagcaaggccaccagccaggagctgagccggcagatccagaagctggccaaggacctgaccaccatcctgaccaagctgaaggccaagacagacaacgtggtgcaggccaagacagaccagaaggtgctgggggaggagctggatggctgcaacagcaagctgatggagctggatgctgctgtgcagaagttcctggagcagaatggccagctgggcaagcccctggccaagaagattggcaagctgacagagctgcaccagcagaccatccggcaggctgaaaatcggctgagcaagctgaaccaggccgccagccacctggaggagtacaatgagatgctggagctgatcctgaagtggattgagaaggccaaggtgctggcccacggcaccatcgcctggaacagcgccagccagctgcgggagcagtacatcctgcaccagaccctgctggaggagagcaaggagattgacagcgagctggaggccatgacagagaagctgcagtacctgacctctgtgtactgcacagagaagatgagccagcaggtggccgagctgggccgggagacagaggagctgcggcagatgatcaagatccggctgcagaacctgcaggatgctgccaaggacatgaagaagtttgaggccgagctgaagaagctgcaggccgccctggagcaggcccaggccaccctgaccagccctgaggtgggccgcctgagcctgaaggagcagctgagccaccggcagcacctgctgtctgagatggagagcctgaagcccaaggtgcaggccgtgcagctgtgccagagcgccctgcgcatcccagaagatgtggtggccagcctgcccctgtgccacgccgccctgcggctgcaggaggaggccagccggctgcagcacacagccatccagcagtgcaacatcatgcaggccgctgtggtgcagtatgagcagtatgagcaggagatgaagcacctgcagcagctgattgaaggagcccaccgggagattgaggacaagcctgtggccaccagcaacatccaggagctgcaggcccagatcagcagacatgaggagctggcccagaagatcaagggctaccaggagcagatcgccagcctgaacagcaagtgcaagatgctgaccatgaaggccaagcacgccaccatgctgctgactgtgacagaggtggagggcctggccgagggcacagaggacctggatggagagctgctgcccaccccatctgcccaccccagcgtggtgatgatgacagctggccgctgccacaccctgctgagccctgtgacagaggagagcggggaggagggcaccaacagcgagatcagcagccccccagcctgccgcagccccagccctgtggccaacacagatgcctctgtgaaccaggacatcgcctactaccaggccctgtctgctgagcggctgcagacagatgctgccaagatccaccccagcaccagcgccagccaggagttctatgagcccggcctggagcccagcgccacagccaagctgggggacctgcagaggtcctgggagaccctgaagaatgtcatcagcgagaagcagaggaccctgtatgaggccctggagcggcagcagaagtaccaggacagcctgcagagcatcagcaccaagatggaggccatcgagctgaagctgtctgagagccctgagcccggccgcagccctgagagccagatggccgagcaccaggccctgatggatgagatcctgatgctgcaggatgagatcaatgagctgcagagcagcctggccgaggagctggtgtctgagagctgtgaggccgaccctgctgagcagctggccctgcagagcaccctgactgtgctggccgagaggatgagcaccatccgcatgaaggccagcggcaagaggcagctgctggaggagaagctgaatgaccagctggaggagcagaggcaggagcaggccctgcagcgctaccgctgtgaggctgatgagctggacagctggctgctgagcaccaaggccaccctggacacagccctgagcccccccaaggagcccatggacatggaggcccagctgatggactgccagaacatgctggtggagattgagcagaaggtggtggccctgtctgagctgtctgtgcacaatgaaaacctgctgctggagggcaaggcccacaccaaggatgaagctgagcagctggccggcaagctgcggcggctgaagggcagcctgctggagctgcagagggccctgcatgacaagcagctgaacatgcagggcacagcccaggagaaggaggagagtgatgtggacctgacagccacccagagccctggggtgcaggagtggctggcccaggcccggaccacctggacccagcagaggcagagcagcctgcagcagcagaaggagctggagcaggagctggccgagcagaagagcctgctgcggtctgtggccagcagaggagaggagatcctgatccagcacagcgctgctgagaccagcggagatgctggggagaagccagatgtgctgagccaggagctgggcatggagggggagaagagcagcgctgaggaccagatgaggatgaagtgggagagcctgcaccaggagttcagcaccaagcagaagctgctgcagaatgtgctggagcaggagcaggagcaggtgctgtacagccggcccaaccggctgctgtctggagtgcccctgtacaagggagatgtgcccacccaggacaagtctgctgtgaccagcctgctggatggcctgaaccaggcctttgaggaggtgagcagccagagcggcggggccaagaggcagagcatccacctggagcagaagctgtatgatggagtgtctgccaccagcacctggctggatgatgtggaggagcggctgtttgtggccacagccctgctgcctgaggagacagagacctgcctcttcaaccaggagatcctggccaaggacatcaaggagatgtctgaggagatggacaagaacaagaacctcttcagccaggccttcccagaaaatggagacaacagagatgtgattgaggacaccctgggctgcctgctgggccgcctgagcctgctggacagcgtggtgaaccagcgctgccaccagatgaaggagcggctgcagcagatcctgaacttccagaatgacctgaaggtgctcttcaccagcctggccgacaacaagtacatcatcctgcagaagctggccaacgtgtttgagcagcctgtggccgagcagatcgaggccatccagcaggctgaagatggcctgaaggagtttgatgctggcatcatcgagctgaagagaagaggagacaagctgcaggtggagcagcccagcatgcaggagctgagcaagctgcaggacatgtatgatgagctgatgatgatcatcggcagccgccgcagcggcctgaaccagaacctgaccctgaagagccagtatgaaagagccctgcaggacctggccgacctgctggagaccggccaggagaagatggccggggaccagaagatcatcgtgagcagcaaggaggagatccagcagctgctggacaagcacaaggagtacttccagggcctggagagccacatgatcctgacagagaccctcttcaggaagatcatcagctttgctgtgcagaaggagacccagttccacacagagctgatggcccaggccagcgctgtgctgaagagggcccacaagaggggcgtggagctggagtacatcctggagacctggagccacctggatgaggaccagcaggagctgagccggcagctggaggtggtggagagcagcatccccagcgtgggcctggtggaggagaatgaagatcggctgattgaccgcatcaccctgtaccagcacctgaagagcagcctgaatgagtaccagcccaagctgtaccaggtgctggatgatggcaagaggctgctgatcagcatcagctgcagcgacctggagagccagctgaaccagctgggggagtgctggctgagcaacaccaacaagatgagcaaggagctgcaccggctggagaccatcctgaagcactggacccgctaccagagcgagagcgctgacctgatccactggctgcagagcgccaaggaccggctggagttctggacccagcagagcgtgacagtgccccaggagctggagatggtgcgggaccacctgaatgccttcctggagttcagcaaggaggtggatgcccagagcagcctgaagagctctgtgctgagcactggaaaccagctgctgcggctgaagaaggtggacacagccaccctgcggtctgagctgagcagaattgacagccagtggacagacctgctgaccaacatcccagctgtgcaggagaagctgcaccagctgcagatggacaagctgcccagcagacatgccatcagcgaggtgatgtcctggatcagcctgatggagaatgtcatccagaaggatgaggacaacatcaagaacagcatcggctacaaggccatccacgagtacctgcagaagtacaagggcttcaagattgacatcaactgcaagcagctgactgtggactttgtgaaccagagcgtgctgcagatcagcagccaggatgtggagagcaagagaagtgacaagacagactttgctgagcagctgggcgccatgaacaagtcctggcagatcctgcagggcctggtgacagagaagatccagctgctggagggcctgctggagagctggagcgaatatgaaaataatgtgcagtgcctgaagacctggtttgagacccaggagaagaggctgaagcagcagcaccgcatcggggaccaggcctctgtgcagaatgccctgaaggactgccaggacctggaggacctgatcaaggccaaggagaaggaggtggagaagattgagcagaatggcctggccctgatccagaacaagaaggaggatgtgagcagcatcgtgatgagcaccctgcgggagctgggccagacctgggccaacctggaccacatggtgggccagctgaagatcctgctgaagtctgtgctggaccagtggagcagccacaaggtggcctttgacaagatcaacagctacctgatggaggcccgctacagcctgagccgcttccggctgctgaccggcagcctggaggccgtgcaggtgcaggtggacaacctgcagaacctgcaggatgacctggagaagcaggagaggagcctgcagaagtttggcagcatcaccaaccagctgctgaaggagtgccacccccctgtgacagagaccctgaccaacaccctgaaggaggtgaacatgcgctggaacaacctgctggaggagattgctgagcagctgcagagcagcaaggccctgctgcagctgtggcagcgctacaaggactacagcaagcagtgtgccagcacagtgcagcagcaggaggacaggaccaatgagctgctgaaggccgccaccaacaaggacattgctgatgatgaggtggccacctggatccaggactgcaatgacctgctgaagggcctgggcaccgtgaaggacagcctcttcttcctgcacgagctgggggagcagctgaagcagcaggtggatgccagcgctgccagcgccatccagagcgaccagctgagcctgagccagcacctgtgtgccctggagcaggccctgtgcaagcagcagaccagcctgcaggccggcgtgctggactatgagacctttgccaagagcctggaggccctggaggcctggatcgtggaggccgaggagatcctgcagggccaggaccccagccacagcagtgacctgagcaccatccaggagaggatggaggagctgaagggccagatgctgaagttcagctccatggccccagacctggaccggctgaatgagctgggctaccgcctgcccctgaatgacaaggagatcaagaggatgcagaacctgaacagacactggagcctcatcagcagccagaccacagagcgcttcagcaagctgcagagcttcctgctgcagcaccagaccttcctggagaagtgtgagacctggatggagttcctggtgcagacagagcagaagctggccgtggagatcagcggcaactaccagcacctgctggagcagcagagggcccacgagctgttccaggccgagatgttcagccggcagcagatcctgcacagcatcatcattgatggccagaggctgctggagcagggccaggtggatgacagagatgagttcaacctgaagctgaccctgctgagcaaccagtggcagggcgtcatccggcgggcccagcagaggcggggcatcatcgacagccagatccggcagtggcagcgctaccgggagatggccgagaagctgaggaagtggctggtggaggtgtcctacctgcccatgagcggcctgggctctgtgcccatccccctgcagcaggcccggaccctgtttgatgaggtgcagttcaaggagaaggtgttcctgcggcagcagggcagctacatcctgactgtggaggccggcaagcagctgctgctgtctgctgacagcggggctgaggccgccctgcaggccgagctggccgagatccaggagaagtggaagagcgcctccatgaggctggaggagcagaagaagaagctggccttcctgctgaaggactgggagaagtgtgagaagggcattgctgacagcctggagaagctgcggaccttcaagaagaagctgagccagagcctgcctgaccaccacgaggagctgcacgccgagcagatgcgctgcaaggagctggagaatgctgtgggctcctggacagatgacctgacccagctgagcctgctgaaggacaccctgagcgcctacatctctgcagatgacatcagcatcctgaatgaaagagtggagctgctgcagaggcagtgggaggagctgtgccaccagctgagcctgcggcggcagcagatcggggagcggctgaatgagtgggccgtgttttctgagaagaacaaggagctgtgtgagtggctgacccagatggagagcaaggtgtcccagaatggagacatcctgattgaggagatgattgagaagctgaagaaggactaccaggaggagatcgccatcgcccaggagaacaagatccagctgcagcagatgggagagcggctggccaaggccagccatgagagcaaggccagcgagattgagtacaagctgggcaaggtgaatgaccgctggcagcacctgctggacctgattgctgcccgggtgaagaagctgaaggagaccctggtggccgtgcagcagctggacaagaacatgagcagcctgcggacctggctggcccacattgaaagtgagctggccaagcccatcgtgtatgacagctgcaacagcgaggagatccagaggaagctgaatgagcagcaggagctgcagagggacatcgagaagcacagcactggagtggcctctgtgctgaacctgtgtgaggtgctgctgcatgactgtgatgcctgtgccacagatgctgaatgtgacagcatccagcaggccaccaggaacctggaccggcgctggaggaacatctgtgccatgtccatggagcggcggctgaagattgaggagacctggaggctgtggcagaagttcctggatgactacagcagatttgaggactggctgaagagcagcgagaggacagctgccttccccagcagcagtggagtcatctacacagtggccaaggaggagctgaagaagtttgaggccttccagaggcaggtgcatgagtgcctgacccagctggagctgatcaacaagcagtacagaaggctggcccgggagaacagaacagattctgcctgcagcctgaagcagatggtgcatgagggcaaccagcgctgggacaacctgcagaagagggtgaccagcatcctgcggcggctgaagcacttcatcggccagcgggaggagtttgaaacagcccgggacagcatcctggtgtggctgacagagatggacctgcagctgaccaacatcgagcacttctctgaatgtgatgtgcaggccaagatcaagcagctgaaggccttccagcaggagatcagcctgaaccacaacaagattgagcagatcatcgcccagggcgagcagctgattgagaagtctgagcccctggatgctgccatcatcgaggaggagctggatgagctgcggcgctactgccaggaggtgtttggccgggtggagcgctaccacaagaagctgatccggctgcccctgcctgatgatgaacatgacctgagtgaccgggagctggagctggaggacagcgctgccctgagtgacctgcactggcatgacagatctgctgacagcctgctgagcccccagcccagcagcaacctgagcctgagcctggcccagcccctgcggtctgagaggagcggccgggacaccccagcctctgtggacagcatccccctggagtgggaccatgactatgacctgagccgggacctggagagcgccatgagccgggccctgcccagtgaagatgaggagggccaggatgacaaggacttctacctgcggggagctgtgggcctgagtgatgtgatgatccctgagagccctgaggcctacgtgaagctgacagaaaatgccatcaagaacaccagcggggaccacagcgccctggagagccagatccggcagctgggcaaggccctggatgacagccgcttccagatccagcagacagagaacatcatccgcagcaagacccccaccggccctgagctggacaccagctacaagggctacatgaagctgctgggagaatgtagcagcagcattgacagcgtgaagaggctggagcacaagctgaaggaggaggaggagagcctgcccggctttgtgaacctgcacagcacagagacccagacagctggggtcatcgaccgctgggagctgctgcaggcccaggccctgagcaaggagctgaggatgaagcagaacctgcagaagtggcagcagttcaacagcgacctgaacagcatctgggcctggctgggggacacagaggaggagctggagcagctgcagaggctggagctgagcacagacatccagaccatcgagctgcagatcaagaagctgaaggagctgcagaaggctgtggaccacaggaaggccatcatcctgagcatcaacctgtgcagccctgagttcacccaggccgacagcaaggagagccgggacctgcaggaccggctgagccagatgaatggccgctgggacagagtgtgcagcctgctggaggagtggaggggcctgctgcaggatgccctgatgcagtgccagggcttccacgagatgagccacggcctgctgctgatgctggagaacatcgacaggaggaagaatgagatcgtgcccatcgacagcaacctggatgctgagatcctgcaggaccaccacaagcagctgatgcagatcaagcatgagctgctggagagccagctgcgggtggccagcctgcaggacatgagctgccagctgctggtgaatgctgagggcacagactgcctggaggccaaggagaaggtgcacgtgattggcaaccggctgaagctgctgctgaaggaggtgagccgccacatcaaggagctggagaagctgctggatgtgagcagcagccagcaggacctgagctcctggagcagcgcagatgagctggacaccagcggctctgtgagccccaccagcggccgcagcacccccaaccggcagaagaccccccggggcaagtgcagcctgagccagcccggccccagcgtgagcagcccccacagccgcagcaccaagggcggcagtgacagcagcctgtctgagcccggccctggccgcagcggccggggcttcctgttccgggtgctgcgggccgccctgcccctgcagctgctgctgctgctgctgattggcctggcctgcctggtgcccatgtctgaggaggactacagctgtgccctgagcaacaactttgcccgctccttccaccccatgctgcgctacaccaacggccccccacccctgtag

SEQ ID NO: 171274 - DNA, 26250 bp, synthetic construct
  misc_feature 1..26250: note = Description of Artificial Sequence: Synthetic coding sequence
  source 1..26250: mol_type = other DNA
atggccaccagcagaggagccagccgctgcccccgggacatcgccaacgtgatgcagaggctgcaggatgagcaggagatcgtgcagaagaggaccttcaccaagtggatcaacagccacctggccaagaggaagccacccatggtggtggatgacctgtttgaggacatgaaggatggagtgaagctgctggccctgctggaggtgctgagcggccagaagctgccctgtgagcagggccgcaggatgaagagaattcatgctgtggccaacatcggcacagccctgaagttcctggagggcaggaagtccatgcaccggggcagccccatcaagctggtgaacatcaacagcacagacattgctgatggccggcccagcatcgtgctgggcctgatgtggaccatcatcctgtacttccagatcgaggagctgaccagcaacctgccccagctgcagagcctgagcagcagcgccagctctgtggacagcatcgtgagcagcgagacccccagcccccccagcaagaggaaggtgaccaccaagatccagggcaatgccaagaaggccctgctgaagtgggtgcagtacacagctgggaagcagacaggaattgaggtgaaggactttgggaagtcctggaggtctggagtggccttccacagcgtcatccacgccatccggcctgagctggtggacctggagaccgtgaagggccgcagcaaccgggagaacctggaggatgccttcaccatcgccgagacagagctgggcatcccccggctgctggaccctgaagatgtggatgtggacaagccagatgagaagagcatcatgacctacgtggcccagttcctgaagcactacccagacatccacaatgccagcacagatggccaggaggatgatgagatcctgcccggcttccccagctttgccaacagcgtgcagaacttcaagcgggaggacagagtcatcttcaaggagatgaaggtgtggattgagcagtttgagcgggacctgacccgggcccagatggtggagagcaacctgcaggacaagtaccagagcttcaagcacttccgggtgcagtatgagatgaagaggaagcagatcgagcacctgatccagcccctgcacagagatggcaagctgagcctggaccaggccctggtgaagcagagctgggacagagtgaccagccggctgtttgactggcacatccagctggacaagagcctgcctgcccccctgggcaccatcggggcctggctgtacagagctgaggtggccctgcgggaggagatcaccgtgcagcaggtgcatgaggagacagccaacaccatccagaggaagctggagcagcacaaggacctgctgcagaacacagatgcccacaagagggccttccacgagatctaccgcaccaggtctgtgaatggcatccctgtgcccccagaccagctggaggacatggccgagcgcttccactttgtgagcagcaccagcgagctgcacctgatgaagatggagttcctggagctgaagtaccgcctgctgagcctgctggtgctggccgagagcaagctgaagtcctggatcatcaagtatggaagaagagagagcgtggagcagctgctgcagaactacgtgtccttcatcgagaacagcaagttctttgagcagtatgaggtgacctaccagatcctgaagcagacagctgagatgtatgtgaaggcagatggctctgtggaggaggccgagaatgtgatgaagttcatgaatgagaccacagcccagtggaggaacctgtctgtggaggtgcgctctgtgcgctccatgctggaggaggtgatcagcaactgggacagatatggcaacacagtggccagcctgcaggcctggctggaggatgctgagaagatgctgaaccagagtgaaaatgccaagaaggacttcttcaggaacctgccccactggatccagcagcacacagccatgaatgatgctggcaacttcctgattgagacctgtgatgagatggtgtcccgggacctgaagcagcagctgctgctgctgaatggccgctggagggagctgttcatggaggtgaagcagtatgcccaggctgatgagatggacaggatgaagaaggagtacacagactgtgtggtgaccctgagcgcctttgccacagaggcccacaagaagctgtctgagcccctggaggtgtccttcatgaatgtgaagctgctgatccaggacctggaggacatcgagcagagggtgcctgtgatggatgcccagtacaagatcatcaccaagacagcccacctgatcaccaaggagagcccccaggaggagggcaaggagatgtttgccaccatgagcaagctgaaggagcagctgaccaaggtgaaggagtgctacagccccctgctgtatgagagccagcagctgctgatccccctggaggagctggagaagcagatgaccagcttctatgacagcctgggcaagatcaatgagatcatcaccgtgctggagcgggaggcccagagcagcgccctcttcaagcagaagcaccaggagctgctggcctgccaggagaactgcaagaagaccctgaccctgattgagaagggcagccagagcgtgcagaagtttgtgaccctgagcaatgtgctgaagcactttgaccagacccggctgcagaggcagattgctgacatccacgtggccttccagagcatggtgaagaagacaggagactggaagaagcacgtggagaccaacagccggctgatgaagaagtttgaggagagcagagctgagctggagaaggtgctgcgcatcgcccaggagggcctggaggagaagggggaccctgaggagctgctgcggcggcacacagagttcttcagccagctggaccagagggtgctgaatgccttcctgaaggcctgtgatgagctgacagacatcctgcctgagcaggagcagcagggcctgcaggaggccgtgaggaagctgcacaagcagtggaaggacctgcagggcgaggccccctaccacctgctgcacctgaagattgatgtggagaagaaccgcttcctggcctctgtggaggagtgcaggacagagctggaccgggagaccaagctgatgccccaggagggcagcgagaagatcatcaaggagcacagggtcttcttcagtgacaagggcccccaccacctgtgtgagaagaggctgcagctgattgaggagctgtgtgtgaagctgcctgtgcgggaccctgtgcgggacaccccaggcacctgccacgtgaccctgaaggagctgcgggccgccatcgacagcacctacaggaagctgatggaggaccctgacaagtggaaggactacaccagccgcttcagcgagttcagctcctggatcagcaccaatgagacccagctgaagggcatcaagggggaggccatcgacacagccaaccacggggaggtgaagagagctgtggaggagatcagaaatggagtgaccaagagaggagagaccctgtcctggctgaagagccggctgaaggtgctgacagaggtgtccagtgaaaatgaggcccagaagcagggagatgagctggccaagctgagcagcagcttcaaggccctggtgaccctgctgtctgaggtggagaagatgctgagcaactttggagactgtgtgcagtacaaggagatcgtgaagaacagcctggaggagctgatcagcggcagcaaggaggtgcaggagcaggccgagaagatcctggacacagagaacctgtttgaggcccagcagctgctgctgcaccaccagcagaagaccaagaggatcagcgccaagaagagagatgtgcagcagcagatcgcccaggcccagcagggcgagggcggcctgcctgaccggggccacgaggagctgaggaagctggagagcaccctggatggcctggagaggagccgggagcggcaggagcggcgcatccaggtgaccctgaggaagtgggagagatttgagaccaacaaggagaccgtggtgcgctacctgttccagacaggcagcagccatgagcgcttcctgtccttcagcagcctggagagcctgagcagcgagctggagcagaccaaggagttcagcaagaggacagagagcattgctgtgcaggccgagaacctggtgaaggaggccagcgagatccccctgggcccccagaacaagcagctgctgcagcagcaggccaagagcatcaaggagcaggtgaagaagctggaggacaccctggaggaggacatcaagaccatggagatggtgaagaccaagtgggaccacttcggcagcaactttgagaccctgtctgtgtggatcacagagaaggagaaggagctgaatgccctggagaccagcagcagcgccatggacatgcagatcagccagatcaaggtgaccatccaggagattgagagcaagctgagcagcatcgtgggcctggaggaggaggcccagagctttgcccagtttgtgaccactggagagagcgcccgcatcaaggccaagctgacccagatcagaagatatggagaggagctgcgggagcacgcccagtgcctggagggcaccatcctgggccacctgagccagcagcagaagtttgaggagaacctgaggaagatccagcagagcgtgtctgaatttgaggacaagctggccgtgcccatcaagatctgcagcagcgccacagagacctacaaggtgctgcaggagcacatggacctgtgccaggccctggagagcctgagcagcgccatcacagccttcagcgccagcgccaggaaggtggtgaacagagacagctgtgtgcaggaggccgccgccctgcagcagcagtatgaggacatcctgcggcgggccaaggagcggcagacagccctggagaacctgctggcccactggcagaggctggagaaggagctgagcagcttcctgacctggctggagcggggggaggccaaggccagcagccctgagatggacatctctgctgacagagtgaaggtggagggggagctgcagctgatccaggccagcagcaggaagtttgtgtcccaggccagcttctacagcaagctgctgcagctgaaggagagcctcttctctgtggccagcaaggatgatgtgaagatgatgaagctgcacctggagcagctggatgagcgctggagggacctgccccagatcatcaacaagaggatcaacttcctgcagagcgtggtggccgagcaccagcagtttgatgagctgctgctgtccttctctgtgtggatcaagctgttcctgtctgagctgcagaccaccagcgagatcagcatcatggaccaccaggtggccctgaccaggcacaaggaccatgctgctgaggtggagagcaagaagggggagctgcagagcctgcagggccacctggccaagctgggcagcctgggccgggcagaggacctgcacctgctgcagggcaaggccgaggactgcttccagctgtttgaggaggccagccaggtggtggagcggcggcagctggccctgagccacctggccgagttcctgcagagccacgccagcctgagcggcatcctgcggcagctgcggcagacagtggaggccaccaacagcatgaacaagaatgaaagtgacctgattgagaaggacctgaatgatgccctgcagaatgccaaggccctggagagcgctgctgtgtccctggatggcatcctgagcaaggcccagtaccacctgaagattggcagcagcgagcagaggaccagctgccgggccacagctgaccagctgtgtggggaggtggagcgcatccagaacctgctgggcaccaagcagagcgaggctgatgccctggccgtgctgaagaaggccttccaggaccagaaggaggagctgctgaagagcattgaggacatcgaggagaggacagacaaggagcggctgaaggagcccacccggcaggccctgcagcagaggctgcgggtcttcaaccagctggaggatgagctgaacagccatgagcacgagctgtgctggctgaaggacaaggccaagcagatcgcccagaaggatgtggcctttgcccctgaggtggaccgggagatcaaccggctggaggtgacctgggatgacaccaagaggctcatccacgagaaccagggccagtgctgcggcctgattgacctgatgagggagtaccagaacctgaagtctgctgtgtccaaggtgctggagaatgccagcagcgtcatcgtgaccaggaccaccatcaaggaccaggaggacctgaagtgggccttcagcaagcatgaaacagccaagaacaagatgaactacaagcagaaggacctggacaacttcaccagcaagggcaagcacctgctgtctgagctgaagaagatccacagcagtgacttcagcctggtgaagacagacatggagagcacagtggacaagtggctggatgtgtctgagaagctggaggagaacatggaccggctgcgggtgtccctgagcatctgggatgatgtgctgagcaccagagatgaaattgagggctggagcaacaactgtgtgccccagatggccgagaacatcagcaacctggacaaccacctgcgggcagaggagctgctgaaggagtttgaaagtgaggtgaagaacaaggccctgcggctggaggagctgcacagcaaggtgaatgacctgaaggagctgaccaagaacctggagaccccaccagacctgcagttcatcgaggccgacctgatgcagaagctggagcacgccaaggagatcacagaggtggccaagggcaccctgaaggacttcaccgcccagagcacccaggtggagaagttcatcaatgacatcaccacctggttcaccaaggtggaggagagcctgatgaactgtgcccagaatgagacctgtgaggccctgaagaaggtgaaggacatccagaaggagctgcagagccagcagagcaacatcagcagcacccaggagaacctgaacagcctgtgcaggaagtaccacagcgctgagctggagagcctgggccgggccatgacaggcctcatcaagaagcatgaggccgtgtcccagctgtgcagcaagacccaggccagcctgcaggagagcctggagaagcacttcagcgagagcatgcaggagttccaggagtggttcctgggcgccaaggctgctgccaaggagagcagtgacagaactggagacagcaaggtgctggaggccaagctgcatgacctgcagaacatcctggacagcgtgtctgatggccagagcaagctggatgctgtgacccaggagggccagaccctgtatgcccacctgagcaagcagatcgtgagcagcatccaggagcagatcaccaaggccaatgaggagttccaggccttcctgaagcagtgcctgaaggacaagcaggccctgcaggactgtgccagcgagctgggcagctttgaggaccagcacaggaagctgaacctgtggattcatgagatggaggagcgcttcaacacagagaacctgggggagagcaagcagcacatccctgagaagaagaatgaggtgcacaaggtggagatgttcctgggggagctgctggccgcccgggagagcctggacaagctgagccagaggggccagctgctgtctgaggagggccacggggccggccaggagggccgcctgtgcagccagctgctgaccagccaccagaacctgctgaggatgaccaaggagaagctgcggagctgccaggtggccctgcaggagcacgaggccctggaggaggccctgcagagcatgtggttctgggtgaaggccatccaggaccggctggcctgtgccgagagcaccctgggcagcaaggacaccctggagaagaggctgagccagatccaggacatcctgctgatgaagggggagggggaggtgaagctgaacatggccatcggcaagggggagcaggccctgcggagcagcaacaaggagggccagagggtcatccagacccagctggagaccctgaaggaggtgtgggccgacatcatgagcagctctgtgcacgcccagagcaccctggagagcgtcatcagccagtggaatgactatgtggagaggaagaaccagctggagcagtggatggagagcgtggaccagaagattgagcaccccctgcagccccagcccggcctgaaggagaagtttgtgctgctggaccacctgcagagcatcctgtctgaggccgaggaccacacccgggccctgcaccggctgattgccaagagccgggagctgtatgagaagacagaagatgagagcttcaaggacacagcccaggaggagctgaagacccagttcaatgacatcatgacagtggccaaggagaagatgaggaaggtggaggagatcgtgaaggaccacctgatgtacctggatgctgtgcatgagttcacagactggctgcacagcgccaaggaggagctgcaccgctggagcgacatgtctggggacagcagcgccacccagaagaagctgagcaagatcaaggagctgattgacagccgggagattggagccagccggctgagccgggtggagagcctggcccctgaggtgaagcagaacaccacagccagcggctgtgagctgatgcacacagagatgcaggccctgcgggctgactggaagcagtgggaggacagcgtcttccagacccagagctgcctggagaacctggtgtcccagatggccctgtctgagcaggagttcagcggccaggtggcccagctggagcaggccctggagcagttcagcgccctgctgaagacctgggcccagcagctgaccctgctggagggcaagaacacagatgaggagatcgtggagtgctggcacaagggccaggagatcctggatgccctgcagaaggccgagcccaggacagaggacctgaagagccagctgaatgagctgtgccgcttcagccgggacctgagcacctacagcggcaaggtgtctggcctcatcaaggagtacaactgcctgtgcctgcaggccagcaagggctgccagaacaaggagcagatcctgcagcagcgcttcaggaaggccttccgggacttccagcagtggctggtgaatgccaagatcaccacagccaagtgctttgacatcccccagaacatcagcgaggtgtccaccagcctgcagaagatccaggagttcctgtctgagagtgaaaatggccagcacaagctgaacatgatgctgagcaagggggagctgctgagcaccctgctgaccaaggagaaggccaagggcatccaggccaaggtgacagctgccaaggaggactggaagaacttccacagcaacctgcaccagaaggagagcgccctggagaacctgaagatccagatgaaggactttgaggtgtctgctgagcccatccaggactggctgagcaagacagagaagatggtgcatgagagcagcaaccggctgtatgacctgcctgccaagagaagagagcagcagaagctgcagagcgtgctggaggagatccactgctatgagccccagctgaaccggctgaaggagaaggcccagcagctgtgggagggccaggccgccagcaagagcttccgccaccgggtgtcccagctgagcagccagtacctggccctgagcaacctgaccaaggagaaggtgtcccggctggacagaattgtggccgagcacaaccagttcagcctgggcatcaaggagctgcaggactggatgacagatgccatccacatgctggacagctactgccaccccaccagtgacaagtctgtgctggacagcaggaccctgaagctggaggccctgctgtctgtgaagcaggagaaggagatccagatgaagatgattgtgaccagaggagagagcgtgctgcagaacaccagccctgagggcatccccaccatccagcagcagctgcagagcgtgaaggacatgtgggccagcctgctgtctgctggcatccgctgcaagagccagctggagggcgccctgagcaagtggaccagctaccaggatggagtgcggcagttcagcggctggatggacagcatggaggccaacctgaatgaaagtgagcggcagcacgccgagctgcgggacaagaccaccatgctgggcaaggccaagctgctgaatgaggaggtgctgagctacagcagcctgctggagaccatcgaggtgaagggagctggcatgacagagcactacgtgacccagctggagctgcaggacctgcaggagcgctaccgggccatccaggagcgggccaaggaggccgtgaccaagtctgagaagctggtgcggctgcaccaggagtaccagagggacctgaaggcctttgaggtgtggctgggccaggagcaggagaagctggaccagtacagcgtgctggagggagatgcccacacccatgagaccaccctgcgggacctgcaggagctgcaggtgcactgtgccgagggccaggccctgctgaacagcgtgctgcacacccgggaggatgtgatccccagcggcatcccccaggctgaagatcgggccctggagagcctgcggcaggactggcaggcctaccagcaccggctgtctgagaccaggacccagttcaacaacgtggtgaacaagctgcggctgatggagcagaagttccagcaggtggatgagtggctgaagacagctgaggagaagaagtggcatgaggaggtgacagcctacagagatgaggtggaggaggtgggcgcccgggcccaggagatcctggatgagagccacgtgaacagcaggatgggctgccaggccacccagctgaccagccgctaccaggccctgctgctgcaggtgctggagcagatcaagttcctggaggaggagatccagagcctggaggagagcgagagcagcctgagcagctacagcgactggtacggcagcacccacaagaacttcaagaatgtggccaccaagattgacaaggtggacacagtgatgatgggcaagaagctgaagaccctggaggtgctgctgaaggacatggagaagggccacagcctgctgaagagcgcccgggagaagggggagagagctgtgaagtacctggaggagggggaggccgagcggctgaggaaggagatccatgaccacatggagcagctgaaggagctgaccagcacagtgaggaaggagcacatgaccctggagaagggcctgcacctggccaaggagttcagtgacaagtgcaaggccctgacccagtggattgctgagtaccaggagatcctgcacgtgcctgaggagcccaagatggagctgtatgagaagaaggcccagctgagcaagtacaagagcctgcagcagacagtgctgagccatgagcccagcgtgaagtctgtgcgggagaagggggaggccctgctggagctggtgcaggatgtgaccctgaaggacaagattgaccagctgcagagcgactaccaggacctgtgcagcatcggcaaggccatgatggaggagattgctggctttgaggaccggctgaacaacctgcagatgaagggggacaccctcatcggccagtgtgccgaccacctgcaggccaagctgaagcagaatgtgcacgcccacctgcagggcaccaaggacagctacagcgccatctgcagcacagcccagaggatgtaccagagcctggagcacgagctgcagaagcacgtgtcccggcaggacaccctgcagcagtgccaggcctggctgtctgctgtgcagcctgacctggagcccagcccccagccccccctgagcagagctgaggccatcaagcaggtgaagcacttccgggccctgcaggagcaggcccggacctacctggacctgctgtgcagcatgtgtgacctgagcaatgcctctgtgaagaccacagccaaggacatccagcagacagagcagaccatcgagcagaagctggtgcaggcccagaacctgacccagggctgggaggagatcaagcacctgaagtctgagctgtggatctacctgcaggatgctgaccagcagctgcagaacatgaagagaagacacagcgagctggagctgaacatcgcccagaacatggtgtcccaggtgaaggactttgtgaagaagctgcagagcaagcaggcctctgtgaacaccatcatcgagaaggtgaacaagctgaccaagaaggaggagagccctgagcacaaggagatcaaccacctgaatgaccagtggctggacctgtgccggcagagcaacaacctgtgcctgcagcgggaggaggacctgcagaggacccgggactaccatgactgcatgaatgtggtggaggtgttcctggagaagttcaccacagagtgggacaacctggcccggagtgatgctgagagcacagctgtgcacctggaggccctgaagaagctggccctggccctgcaggagaggaaatatgccatcgaggacctgaaggaccagaagcagaagatgattgagcacctgaacctggatgacaaggagctggtgaaggagcagaccagccacctggagcagcgctggttccagctggaggacctgatcaagaggaagatccaggtgtctgtgaccaacctggaggagctgaatgtggtgcagagccgcttccaggagctgatggagtgggccgaggagcagcagcccaacattgctgaggccctgaagcagagccccccaccagacatggcccagaacctgctgatggaccacctggccatctgcagcgagctggaggccaagcagatgctgctgaagagcctcatcaaggatgctgacagagtgatggctgacctgggcctgaatgaaaggcaggtgatccagaaggccctgagtgatgcccagagccacgtgaactgcctgagtgacctggtgggccagaggaggaagtacctgaacaaggccctgtctgagaagacccagttcctgatggctgtgttccaggccaccagccagatccagcagcacgagaggaagatcatgttccgggagcacatctgcctgctgcctgatgatgtgtccaagcaggtgaagacctgcaagagcgcccaggccagcctgaagacctaccagaatgaggtgacaggcctgtgggcccagggccgggagctgatgaaggaggtgacagagcaggagaagtctgaggtgctgggcaagctgcaggagctgcagagcgtgtatgacagcgtgctgcagaagtgcagccaccggctgcaggagctggagaagaacctggtgtccaggaagcacttcaaggaggactttgacaaggcctgccactggctgaagcaggccgacatcgtgaccttccctgagatcaacctgatgaatgaatcttctgagctgcacacccagctggccaagtaccagaacatcctggagcagagcccagaatatgagaacctgctgctgaccctgcagaggacaggccagaccatcctgcccagcctgaatgaggtggaccacagctacctgtctgagaagctgaatgccctgccccggcagttcaacgtcatcgtggccctggccaaggacaagttctacaaggtgcaggaggccatcctggccaggaaggagtatgccagcctgattgagctgaccacccagagcctgtctgagctggaggcccagttcctgaggatgagcaaggtgcccacagacctggccgtggaggaggccctgagcctgcaggacggctgccgggccatcctggatgaggtggccggcctgggggaggccgtggatgagctgaaccagaagaaggagggcttccgcagcacaggccagccctggcagcctgacaagatgctgcacctggtgaccctgtaccaccggctgaagaggcagacagagcagagggtgtccctgctggaggacaccaccagcgcctaccaggagcacgagaagatgtgccagcagctggagcggcagctgaagtctgtgaaggaggagcagagcaaggtgaatgaggagaccctgcctgctgaggagaagctgaagatgtaccacagcctggccggcagcctgcaggacagcggcatcgtgctgaagagggtgaccatccacctggaggacctggccccccacctggaccccctggcctatgagaaggcccggcaccagatccagagctggcagggcgagctgaagctgctgaccagcgccatcggggagaccgtgacagaatgtgagagcaggatggtgcagagcattgacttccagacagagatgagccgcagcctggactggctgcggcgggtgaaggccgagctgagcggccctgtgtacctggacctgaacctgcaggacatccaggaggagatcaggaagatccagatccaccaggaggaggtgcagagcagcctgcgcatcatgaatgccctgagccacaaggagaaggagaagttcaccaaggccaaggagctgatctctgctgacctggagcacagcctggccgagctgtctgagctggatggagacatccaggaggccctgcggacccggcaggccaccctgacagagatctacagccagtgccagcgctactaccaggtgttccaggccgccaatgactggctggaggatgcccaggagctgctgcagctggccggaaatggcctggatgtggagagcgctgaggagaacctgaagagccacatggagttcttcagcacagaggaccagttccacagcaacctggaggagctgcacagcctggtggccaccctggaccccctcatcaagcccaccgggaaggaggacctggagcagaaggtggccagcctggagctgcggagccagaggatgagccgggacagcggggcccaggtggacctgctgcagcgctgcacagcccagtggcatgactaccagaaggcccgggaggaggtgattgagctgatgaatgacacagagaagaagctgtctgagttcagcctgctgaagaccagcagcagccatgaagctgaggagaagctgtctgagcacaaggccctggtgtctgtggtgaacagcttccacgagaagatcgtggccctggaggagaaggccagccagctggagaagacaggaaatgatgccagcaaggccaccctgagccgctccatgaccaccgtgtggcagcgctggacccggctgcgggctgtggcccaggaccaggagaagatcctggaggatgctgtggatgagtggacaggcttcaacaacaaggtgaagaaggccacagagatgattgaccagctgcaggacaagctgcccggcagcagcgctgagaaggccagcaaggccgagctgctgaccctgctggagtaccatgacacctttgtgctggagctggagcagcagcagagcgccctgggcatgctgcggcagcagaccctgtccatgctgcaggatggagctgcccccaccccaggagaggagccccccctgatgcaggagatcacagccatgcaggaccgctgcctgaacatgcaggagaaggtgaagaccaacgggaagctggtgaagcaggagctgaaggaccgggagatggtggagacccagatcaacagcgtgaagtgctgggtgcaggagaccaaggagtacctgggcaaccccaccatcgagattgatgcccagctggaggagctgcagatcctgctgacagaggccaccaaccaccggcagaacatcgagaagatggccgaggagcagaaggagaagtacctgggcctgtacaccatcctgcccagcgagctgagcctgcagctggccgaggtggccctggacctgaagatccgggaccagatccaggacaagatcaaggaggtggagcagagcaaggccaccagccaggagctgagccggcagatccagaagctggccaaggacctgaccaccatcctgaccaagctgaaggccaagacagacaacgtggtgcaggccaagacagaccagaaggtgctgggggaggagctggatggctgcaacagcaagctgatggagctggatgctgctgtgcagaagttcctggagcagaatggccagctgggcaagcccctggccaagaagattggcaagctgacagagctgcaccagcagaccatccggcaggctgaaaatcggctgagcaagctgaaccaggccgccagccacctggaggagtacaatgagatgctggagctgatcctgaagtggattgagaaggccaaggtgctggcccacggcaccatcgcctggaacagcgccagccagctgcgggagcagtacatcctgcaccagaccctgctggaggagagcaaggagattgacagcgagctggaggccatgacagagaagctgcagtacctgacctctgtgtactgcacagagaagatgagccagcaggtggccgagctgggccgggagacagaggagctgcggcagatgatcaagatccggctgcagaacctgcaggatgctgccaaggacatgaagaagtttgaggccgagctgaagaagctgcaggccgccctggagcaggcccaggccaccctgaccagccctgaggtgggccgcctgagcctgaaggagcagctgagccaccggcagcacctgctgtctgagatggagagcctgaagcccaaggtgcaggccgtgcagctgtgccagagcgccctgcgcatcccagaagatgtggtggccagcctgcccctgtgccacgccgccctgcggctgcaggaggaggccagccggctgcagcacacagccatccagcagtgcaacatcatgcaggccgctgtggtgcagtatgagcagtatgagcaggagatgaagcacctgcagcagctgattgaaggagcccaccgggagattgaggacaagcctgtggccaccagcaacatccaggagctgcaggcccagatcagcagacatgaggagctggcccagaagatcaagggctaccaggagcagatcgccagcctgaacagcaagtgcaagatgctgaccatgaaggccaagcacgccaccatgctgctgactgtgacagaggtggagggcctggccgagggcacagaggacctggatggagagctgctgcccaccccatctgcccaccccagcgtggtgatgatgacagctggccgctgccacaccctgctgagccctgtgacagaggagagcggggaggagggcaccaacagcgagatcagcagccccccagcctgccgcagccccagccctgtggccaacacagatgcctctgtgaaccaggacatcgcctactaccaggccctgtctgctgagcggctgcagacagatgctgccaagatccaccccagcaccagcgccagccaggagttctatgagcccggcctggagcccagcgccacagccaagctgggggacctgcagaggtcctgggagaccctgaagaatgtcatcagcgagaagcagaggaccctgtatgaggccctggagcggcagcagaagtaccaggacagcctgcagagcatcagcaccaagatggaggccatcgagctgaagctgtctgagagccctgagcccggccgcagccctgagagccagatggccgagcaccaggccctgatggatgagatcctgatgctgcaggatgagatcaatgagctgcagagcagcctggccgaggagctggtgtctgagagctgtgaggccgaccctgctgagcagctggccctgcagagcaccctgactgtgctggccgagaggatgagcaccatccgcatgaaggccagcggcaagaggcagctgctggaggagaagctgaatgaccagctggaggagcagaggcaggagcaggccctgcagcgctaccgctgtgaggctgatgagctggacagctggctgctgagcaccaaggccaccctggacacagccctgagcccccccaaggagcccatggacatggaggcccagctgatggactgccagaacatgctggtggagattgagcagaaggtggtggccctgtctgagctgtctgtgcacaatgaaaacctgctgctggagggcaaggcccacaccaaggatgaagctgagcagctggccggcaagctgcggcggctgaagggcagcctgctggagctgcagagggccctgcatgacaagcagctgaacatgcagggcacagcccaggagaaggaggagagtgatgtggacctgacagccacccagagccctggggtgcaggagtggctggcccaggcccggaccacctggacccagcagaggcagagcagcctgcagcagcagaaggagctggagcaggagctggccgagcagaagagcctgctgcggtctgtggccagcagaggagaggagatcctgatccagcacagcgctgctgagaccagcggagatgctggggagaagccagatgtgctgagccaggagctgggcatggagggggagaagagcagcgctgaggaccagatgaggatgaagtgggagagcctgcaccaggagttcagcaccaagcagaagctgctgcagaatgtgctggagcaggagcaggagcaggtgctgtacagccggcccaaccggctgctgtctggagtgcccctgtacaagggagatgtgcccacccaggacaagtctgctgtgaccagcctgctggatggcctgaaccaggcctttgaggaggtgagcagccagagcggcggggccaagaggcagagcatccacctggagcagaagctgtatgatggagtgtctgccaccagcacctggctggatgatgtggaggagcggctgtttgtggccacagccctgctgcctgaggagacagagacctgcctcttcaaccaggagatcctggccaaggacatcaaggagatgtctgaggagatggacaagaacaagaacctcttcagccaggccttcccagaaaatggagacaacagagatgtgattgaggacaccctgggctgcctgctgggccgcctgagcctgctggacagcgtggtgaaccagcgctgccaccagatgaaggagcggctgcagcagatcctgaacttccagaatgacctgaaggtgctcttcaccagcctggccgacaacaagtacatcatcctgcagaagctggccaacgtgtttgagcagcctgtggccgagcagatcgaggccatccagcaggctgaagatggcctgaaggagtttgatgctggcatcatcgagctgaagagaagaggagacaagctgcaggtggagcagcccagcatgcaggagctgagcaagctgcaggacatgtatgatgagctgatgatgatcatcggcagccgccgcagcggcctgaaccagaacctgaccctgaagagccagtatgaaagagccctgcaggacctggccgacctgctggagaccggccaggagaagatggccggggaccagaagatcatcgtgagcagcaaggaggagatccagcagctgctggacaagcacaaggagtacttccagggcctggagagccacatgatcctgacagagaccctcttcaggaagatcatcagctttgctgtgcagaaggagacccagttccacacagagctgatggcccaggccagcgctgtgctgaagagggcccacaagaggggcgtggagctggagtacatcctggagacctggagccacctggatgaggaccagcaggagctgagccggcagctggaggtggtggagagcagcatccccagcgtgggcctggtggaggagaatgaagatcggctgattgaccgcatcaccctgtaccagcacctgaagagcagcctgaatgagtaccagcccaagctgtaccaggtgctggatgatggcaagaggctgctgatcagcatcagctgcagcgacctggagagccagctgaaccagctgggggagtgctggctgagcaacaccaacaagatgagcaaggagctgcaccggctggagaccatcctgaagcactggacccgctaccagagcgagagcgctgacctgatccactggctgcagagcgccaaggaccggctggagttctggacccagcagagcgtgacagtgccccaggagctggagatggtgcgggaccacctgaatgccttcctggagttcagcaaggaggtggatgcccagagcagcctgaagagctctgtgctgagcactggaaaccagctgctgcggctgaagaaggtggacacagccaccctgcggtctgagctgagcagaattgacagccagtggacagacctgctgaccaacatcccagctgtgcaggagaagctgcaccagctgcagatggacaagctgcccagcagacatgccatcagcgaggtgatgtcctggatcagcctgatggagaatgtcatccagaaggatgaggacaacatcaagaacagcatcggctacaaggccatccacgagtacctgcagaagtacaagggcttcaagattgacatcaactgcaagcagctgactgtggactttgtgaaccagagcgtgctgcagatcagcagccaggatgtggagagcaagagaagtgacaagacagactttgctgagcagctgggcgccatgaacaagtcctggcagatcctgcagggcctggtgacagagaagatccagctgctggagggcctgctggagagctggagcgaatatgaaaataatgtgcagtgcctgaagacctggtttgagacccaggagaagaggctgaagcagcagcaccgcatcggggaccaggcctctgtgcagaatgccctgaaggactgccaggacctggaggacctgatcaaggccaaggagaaggaggtggagaagattgagcagaatggcctggccctgatccagaacaagaaggaggatgtgagcagcatcgtgatgagcaccctgcgggagctgggccagacctgggccaacctggaccacatggtgggccagctgaagatcctgctgaagtctgtgctggaccagtggagcagccacaaggtggcctttgacaagatcaacagctacctgatggaggcccgctacagcctgagccgcttccggctgctgaccggcagcctggaggccgtgcaggtgcaggtggacaacctgcagaacctgcaggatgacctggagaagcaggagaggagcctgcagaagtttggcagcatcaccaaccagctgctgaaggagtgccacccccctgtgacagagaccctgaccaacaccctgaaggaggtgaacatgcgctggaacaacctgctggaggagattgctgagcagctgcagagcagcaaggccctgctgcagctgtggcagcgctacaaggactacagcaagcagtgtgccagcacagtgcagcagcaggaggacaggaccaatgagctgctgaaggccgccaccaacaaggacattgctgatgatgaggtggccacctggatccaggactgcaatgacctgctgaagggcctgggcaccgtgaaggacagcctcttcttcctgcacgagctgggggagcagctgaagcagcaggtggatgccagcgctgccagcgccatccagagcgaccagctgagcctgagccagcacctgtgtgccctggagcaggccctgtgcaagcagcagaccagcctgcaggccggcgtgctggactatgagacctttgccaagagcctggaggccctggaggcctggatcgtggaggccgaggagatcctgcagggccaggaccccagccacagcagtgacctgagcaccatccaggagaggatggaggagctgaagggccagatgctgaagttcagctccatggccccagacctggaccggctgaatgagctgggctaccgcctgcccctgaatgacaaggagatcaagaggatgcagaacctgaacagacactggagcctcatcagcagccagaccacagagcgcttcagcaagctgcagagcttcctgctgcagcaccagaccttcctggagaagtgtgagacctggatggagttcctggtgcagacagagcagaagctggccgtggagatcagcggcaactaccagcacctgctggagcagcagagggcccacgagctgttccaggccgagatgttcagccggcagcagatcctgcacagcatcatcattgatggccagaggctgctggagcagggccaggtggatgacagagatgagttcaacctgaagctgaccctgctgagcaaccagtggcagggcgtcatccggcgggcccagcagaggcggggcatcatcgacagccagatccggcagtggcagcgctaccgggagatggccgagaagctgaggaagtggctggtggaggtgtcctacctgcccatgagcggcctgggctctgtgcccatccccctgcagcaggcccggaccctgtttgatgaggtgcagttcaaggagaaggtgttcctgcggcagcagggcagctacatcctgactgtggaggccggcaagcagctgctgctgtctgctgacagcggggctgaggccgccctgcaggccgagctggccgagatccaggagaagtggaagagcgcctccatgaggctggaggagcagaagaagaagctggccttcctgctgaaggactgggagaagtgtgagaagggcattgctgacagcctggagaagctgcggaccttcaagaagaagctgagccagagcctgcctgaccaccacgaggagctgcacgccgagcagatgcgctgcaaggagctggagaatgctgtgggctcctggacagatgacctgacccagctgagcctgctgaaggacaccctgagcgcctacatctctgcagatgacatcagcatcctgaatgaaagagtggagctgctgcagaggcagtgggaggagctgtgccaccagctgagcctgcggcggcagcagatcggggagcggctgaatgagtgggccgtgttttctgagaagaacaaggagctgtgtgagtggctgacccagatggagagcaaggtgtcccagaatggagacatcctgattgaggagatgattgagaagctgaagaaggactaccaggaggagatcgccatcgcccaggagaacaagatccagctgcagcagatgggagagcggctggccaaggccagccatgagagcaaggccagcgagattgagtacaagctgggcaaggtgaatgaccgctggcagcacctgctggacctgattgctgcccgggtgaagaagctgaaggagaccctggtggccgtgcagcagctggacaagaacatgagcagcctgcggacctggctggcccacattgaaagtgagctggccaagcccatcgtgtatgacagctgcaacagcgaggagatccagaggaagctgaatgagcagcaggagctgcagagggacatcgagaagcacagcactggagtggcctctgtgctgaacctgtgtgaggtgctgctgcatgactgtgatgcctgtgccacagatgctgaatgtgacagcatccagcaggccaccaggaacctggaccggcgctggaggaacatctgtgccatgtccatggagcggcggctgaagattgaggagacctggaggctgtggcagaagttcctggatgactacagcagatttgaggactggctgaagagcagcgagaggacagctgccttccccagcagcagtggagtcatctacacagtggccaaggaggagctgaagaagtttgaggccttccagaggcaggtgcatgagtgcctgacccagctggagctgatcaacaagcagtacagaaggctggcccgggagaacagaacagattctgcctgcagcctgaagcagatggtgcatgagggcaaccagcgctgggacaacctgcagaagagggtgaccagcatcctgcggcggctgaagcacttcatcggccagcgggaggagtttgaaacagcccgggacagcatcctggtgtggctgacagagatggacctgcagctgaccaacatcgagcacttctctgaatgtgatgtgcaggccaagatcaagcagctgaaggccttccagcaggagatcagcctgaaccacaacaagattgagcagatcatcgcccagggcgagcagctgattgagaagtctgagcccctggatgctgccatcatcgaggaggagctggatgagctgcggcgctactgccaggaggtgtttggccgggtggagcgctaccacaagaagctgatccggctgcccctgcctgatgatgaacatgacctgagtgaccgggagctggagctggaggacagcgctgccctgagtgacctgcactggcatgacagatctgctgacagcctgctgagcccccagcccagcagcaacctgagcctgagcctggcccagcccctgcggtctgagaggagcggccgggacaccccagcctctgtggacagcatccccctggagtgggaccatgactatgacctgagccgggacctggagagcgccatgagccgggccctgcccagtgaagatgaggagggccaggatgacaaggacttctacctgcggggagctgtgggcctgagtgatgtgatgatccctgagagccctgaggcctacgtgaagctgacagaaaatgccatcaagaacaccagcggggaccacagcgccctggagagccagatccggcagctgggcaaggccctggatgacagccgcttccagatccagcagacagagaacatcatccgcagcaagacccccaccggccctgagctggacaccagctacaagggctacatgaagctgctgggagaatgtagcagcagcattgacagcgtgaagaggctggagcacaagctgaaggaggaggaggagagcctgcccggctttgtgaacctgcacagcacagagacccagacagctggggtcatcgaccgctgggagctgctgcaggcccaggccctgagcaaggagctgaggatgaagcagaacctgcagaagtggcagcagttcaacagcgacctgaacagcatctgggcctggctgggggacacagaggaggagctggagcagctgcagaggctggagctgagcacagacatccagaccatcgagctgcagatcaagaagctgaaggagctgcagaaggctgtggaccacaggaaggccatcatcctgagcatcaacctgtgcagccctgagttcacccaggccgacagcaaggagagccgggacctgcaggaccggctgagccagatgaatggccgctgggacagagtgtgcagcctgctggaggagtggaggggcctgctgcaggatgccctgatgcagtgccagggcttccacgagatgagccacggcctgctgctgatgctggagaacatcgacaggaggaagaatgagatcgtgcccatcgacagcaacctggatgctgagatcctgcaggaccaccacaagcagctgatgcagatcaagcatgagctgctggagagccagctgcgggtggccagcctgcaggacatgagctgccagctgctggtgaatgctgagggcacagactgcctggaggccaaggagaaggtgcacgtgattggcaaccggctgaagctgctgctgaaggaggtgagccgccacatcaaggagctggagaagctgctggatgtgagcagcagccagcaggacctgagctcctggagcagcgcagatgagctggacaccagcggctctgtgagccccaccagcggccgcagcacccccaaccggcagaagaccccccggggcaagtgcagcctgagccagcccggccccagcgtgagcagcccccacagccgcagcaccaagggcggcagtgacagcagcctgtctgagcccggccctggccgcagcggccggggcttcctgttccgggtgctgcgggccgccctgcccctgcagctgctgctgctgctgctgattggcctggcctgcctggtgcccatgtctgaggaggactacagctgtgccctgagcaacaactttgcccgctccttccaccccatgctgcgctacaccaacggccccccacccctgtag

SEQ ID NO: 171275 - DNA, 2859 bp, synthetic construct
  misc_feature 1..2859: note = Description of Artificial Sequence: Synthetic coding sequence
  source 1..2859: mol_type = other DNA
atggtggtggccgaggacctgagcgccctgaggatggccgaggacagctgtgtggatgctgacctgcctgactgcaactgtgatgtgaccagggtgaagaagctgaaggagaccctggtggccgtgcagcagctggacaagaacatgagcagcctgcggacctggctggcccacattgaaagtgagctggccaagcccatcgtgtatgacagctgcaacagcgaggagatccagaggaagctgaatgagcagcaggagctgcagagggacatcgagaagcacagcactggagtggcctctgtgctgaacctgtgtgaggtgctgctgcatgactgtgatgcctgtgccacagatgctgaatgtgacagcatccagcaggccaccaggaacctggaccggcgctggaggaacatctgtgccatgtccatggagcggcggctgaagattgaggagacctggaggctgtggcagaagttcctggatgactacagcagatttgaggactggctgaagagcagcgagaggacagctgccttccccagcagcagtggagtcatctacacagtggccaaggaggagctgaagaagtttgaggccttccagaggcaggtgcatgagtgcctgacccagctggagctgatcaacaagcagtacagaaggctggcccgggagaacagaacagattctgcctgcagcctgaagcagatggtgcatgagggcaaccagcgctgggacaacctgcagaagagggtgaccagcatcctgcggcggctgaagcacttcatcggccagcgggaggagtttgaaacagcccgggacagcatcctggtgtggctgacagagatggacctgcagctgaccaacatcgagcacttctctgaatgtgatgtgcaggccaagatcaagcagctgaaggccttccagcaggagatcagcctgaaccacaacaagattgagcagatcatcgcccagggcgagcagctgattgagaagtctgagcccctggatgctgccatcatcgaggaggagctggatgagctgcggcgctactgccaggaggtgtttggccgggtggagcgctaccacaagaagctgatccggctgcccctgcctgatgatgaacatgacctgagtgaccgggagctggagctggaggacagcgctgccctgagtgacctgcactggcatgacagatctgctgacagcctgctgagcccccagcccagcagcaacctgagcctgagcctggcccagcccctgcggtctgagaggagcggccgggacaccccagcctctgtggacagcatccccctggagtgggaccatgactatgacctgagccgggacctggagagcgccatgagccgggccctgcccagtgaagatgaggagggccaggatgacaaggacttctacctgcggggagctgtgggcctgagcggggaccacagcgccctggagagccagatccggcagctgggcaaggccctggatgacagccgcttccagatccagcagacagagaacatcatccgcagcaagacccccactggacctgagctggacaccagctacaagggctacatgaagctgctgggggagtgcagcagcagcattgattctgtgaagaggctggagcacaagctgaaggaggaggaggagagcctgcccggctttgtgaacctgcacagcacagagacccagacagctggggtgattgaccgctgggagctgctgcaggcccaggccctgagcaaggagctgaggatgaagcagaacctgcagaagtggcagcagttcaacagcgacctgaacagcatctgggcctggctgggggacacagaggaggagctggagcagctgcagaggctggagctgagcacagacatccagaccatcgagctgcagatcaagaagctgaaggagctgcagaaggctgtggaccacaggaaggccatcatcctgagcatcaacctgtgcagccctgagttcacccaggccgacagcaaggagagccgggacctgcaggaccggctgagccagatgaatggccgctgggacagagtgtgcagcctgctggaggagtggaggggcctgctgcaggatgccctgatgcagtgccagggcttccacgagatgagccacggcctgctgctgatgctggagaacatcgacaggaggaagaatgaaattgtgcccatcgacagcaacctggatgctgagatcctgcaggaccaccacaagcagctgatgcagatcaagcatgagctgctggagagccagctgcgggtggccagcctgcaggacatgagctgccagctgctggtgaatgctgagggcacagactgcctggaggccaaggagaaggtgcacgtgattggcaaccggctgaagctgctgctgaaggaggtgagccgccacatcaaggagctggagaagctgctggatgtgagcagcagccagcaggacctgagctcctggagcagcgcagatgagctggacaccagcggctctgtgagccccaccagcggccgcagcacccccaaccggcagaagaccccccggggcaagtgcagcctgagccagcccggccccagcgtgagcagcccccacagccgcagcaccaagggcggcagtgacagcagcctgtctgagcccggccctggccgcagcggccggggcttcctgttccgggtgctgcgggccgccctgcccctgcagctgctgctgctgctgctgattggcctggcctgcctggtgcccatgtctgaggaggactacagctgtgccctgagcaacaactttgcccggagcttccaccccatgctgcgctacaccaatggacctccacccctgtag

SEQ ID NO: 171276 - DNA, 20475 bp, synthetic construct
  misc_feature 1..20475: note = Description of Artificial Sequence: Synthetic coding sequence
  source 1..20475: mol_type = other DNA
atggccagcagccctgagctgcccacagaagatgagcagggctcctggggcattgatgacctgcacatcagcctgcaggccgagcaggaggacacccagaagaaggccttcacctgctggatcaacagccagctggcccggcacaccagccccagcgtcatcagtgacctcttcacagacatcaagaagggccacgtgctgctggacctgctggaggtgctgagcggccagcagctgccccgggacaagggcagcaacaccttccagtgccgcatcaacatcgagcacgccctgaccttcctgaggaacagaagcatcaagctgatcaacatccacgtgacagacatcattgatggcaaccccagcatcatcctgggcctcatctggaccatcatcctgcacttccacatcgagaagctggcccagaccctgagctgcaactacaaccagcccagcctggatgatgtgtctgtggtggacagcagccctgccagcagccccccagccaagaagtgcagcaaggtgcaggcccgctggcagatgtctgccaggaaggccctgctgctgtgggcccaggagcagtgtgccacctatgagagcgtgaatgtgacagacttcaagagctcctggagaaatggcatggccttcctggccatcatccacgccctgcggccagacctgattgacatgaagtctgtgaagcacaggagcaacaaggacaacctgcgggaggccttcagaattgctgagcaggagctgaagatcccccggctgctggagccagaagatgtggatgtggtggaccctgatgagaagagcatcatgacctacgtggcccagttcctgcagtacagcaaggatgcccctggcactggagaggaggcccagggcaaggtgaaggatgccatgggctggctgaccctgcagaaggagaagctgcagaagctgctgaaggacagtgaaaatgacacctacttcaagaagtacaacagcctgctgtccttcatggagagcttcaatgaggagaagaagagcttcctggatgtgctgagcatcaagagggacctggatgagctggacaaggaccacctgcagctgcgggaggcctgggatggcctggaccaccagatcaatgcctggaagatcaagctgaactatgccctgcccccacccctgcaccagacagaggcctggctgcaggaggtggaggagctgatggatgaggacctgagcgccagccaggaccacagccaggccgtgaccctcatccaggagaagatgaccctcttcaagagcctgatggacagatttgagcaccacagcaacatcctgctgacctttgagaacaaggatgagaaccacctgcccctggtgccccccaacaagctggaggagatgaagaggcgcatcaacaacatcctggagaagaagttcatcctgctgctggagttccactactacaagtgcctggtgctgggcctggtggatgaggtgaagagcaagctggacatctggaacatcaagtatggcagccgggagagcgtggagctgctgctggaggactggcacaagttcatcgaggagaaggagttcctggcccggctggacaccagcttccagaagtgtggggagatctacaagaacctggccggggagtgccagaacatcaacaagcagtacatgatggtgaagagtgatgtgtgcatgtacaggaagaacatctacaacgtgaagagcaccctgcagaaggtgctggcctgctgggccacctacgtggagaacctgcggctgctgcgggcctgctttgaggagaccaagaaggaggagatcaaggaggtgccctttgagaccctggcccagtggaacctggagcacgccaccctgaatgaagctggcaacttcctggtggaggtgtccaatgatgtggtgggcagcagcatcagcaaggagctgcggcggctgaacaagcgctggaggaagctggtgtccaagacccagctggagatgaacctgcccctgatgatcaagaagcaggaccagcccacctttgacaacagcggcaacatcctgagcaaggaggagaaggccaccgtggagttcagcacagacatgtctgtggagctgcctgagaactacaaccagaacatcaaggccggggagaagcatgagaaggaaaatgaggagttcaccggccagctgaaggtggccaaggatgtggagaagctgattggccaggtggagatctgggaggccgaggccaagtctgtgctggaccaggatgatgtggacacctccatggaggagagcctgaagcacctgattgccaagggctccatgtttgatgagctgatggcccggtctgaggacatgctgcagatggacatccagaacatcagcagccaggagagcttccagcacgtgctgaccaccggcctgcaggccaagatccaggaggccaaggagaaggtgcagatcaacgtggtgaagctgattgctgccctgaagaacctgacagatgtgtccccagacctggacatccggctgaagatggaggagagccagaaggagctggagagctacatgatgagggcccagcagctgctgggccagcgggagagccctggagagctgatcagcaagcacaaggaggccctgatcatcagcaacaccaagagcctggccaagtacctgaaggctgtggaggagctgaagaacaacgtgacagaggacatcaagatgagcctggaggagaagagcagagatgtgtgtgccaagtgggagagcctgcaccacgagctgagcctgtatgtgcagcagctgaagattgacatcgagaagggcaagctgagtgacaacatcctgaagctggagaagcagatcaacaaggagaagaagctgatccggcggggccgcaccaagggcctcatcaaggagcacgaggcctgcttcagcgaggagggctgcctgtaccagctgaaccaccacatggaggtgctgcgggagctgtgtgaggagctgcccagccagaagagccagcaggaggtgaagaggctgctgaaggactatgagcagaagattgaaaggctgctgaagtgtgccagcgagatccacatgaccctgcagcccacagctgggggcaccagcaagaatgaaggcaccatcaccaccagcgagaacagaggaggagacccccacagcgaggccccctttgccaagagtgacaaccagcccagcacagagaaggccatggagcccaccatgaagttcagcctggcctctgtgctgcggcccctgcaggaggagagcatcatggagaaggactacagcgccagcatcaacagcctgctggagagatatgacacctacagagacatcctggagcaccacctgcagaacaacaagttccgcatcaccagtgacttcagcagtgaagaagatagaagcagcagctgcctgcaggccaagctgacagacctgcaggtgatcaagaatgaaacagatgcccgctggaaggagtttgagatcatcagcctgaagctggagaaccacgtgaatgacatcaagaagccctttgtgatcaaggagcgggacaccctgaaggagcgggagcgggagctgcagatgaccctgaacaccaggatggagagcctggagacagccctgcggctggtgctgcctgtggagaaggccagcctgctgctgtgtggcagtgacctgcccctgcacaagatggccatccagggcttccacctgattgatgctgaccgcatctaccagcacctgaggaacatccaggacagcatcgccaagcagatcgagatctgcaaccggctggaggagcccggcaactttgtgctgaaggagctgcacccctttgacctgcacgccatgcagaacatcatcctgaagtacaagacccagtttgagggcatgaaccaccgggtgcagaggtctgaggacaccctgaaggccctggaggacttcctggccagcctgaggacagccaagctgtctgctgagcctgtgacagacctgagcgccagtgacacccaggtggcccaggagaacaccctgactgtgaagaacaaggagggggagatccacctgatgaaggacaaggccaagcacctggacaagtgcctgaagatgctggacatgtccttcaaggatgctgagagaggagatgacaccagctgtgagaacctgctggatgccttcagcatcaagctgtctgagacccacggctacggcgtgcaggaggagttcacagaggagaacaagctgctggaggcctgcatcttcaagaacaatgagctgctgaagaacatccaggatgtgcagagccagatcagcaagattggcctgaaggaccccaccgtgcctgctgtgaagcacaggaagaagagcctcatccggctggacaaggtgctggatgaatatgaggaggagaagaggcacctgcaggagatggccaacagcctgccccacttcaaggatggccgggagaagacagtgaaccagcagtgccagaacacagtggtgctgtgggagaacaccaaggccctggtgacagaatgtctggagcagtgtggccgggtgctggagctgctgaagcagtaccagaacttcaagagcatcctgaccaccctcatccagaaggaggagagcgtcatcagcctgcaggccagctacatgggcaaggagaacctgaagaagagaattgctgagattgaaattgtgaaggaggagttcaatgagcacctggaggtggtggacaagatcaaccaggtgtgcaagaacctgcagttctacctgaacaagatgaagacctttgaggagcccccatttgagaaggaggccaacatcatcgtggaccgctggctggacatcaatgagaagacagaggactactatgagaacctgggccgggccctggccctgtgggacaagctgttcaacctgaagaatgtgattgatgagtggacagagaaggccctgcagaagatggagctgcaccagctgacagaagaagatcgggagcggctgaaggaggagctgcaggtgcatgagcagaagaccagcgagttcagccggcgggtggccgagatccagttcctgctgcagagcagcgagatccccctggagctgcaggtgatggagagcagcatcctgaacaagatggagcacgtgcagaagtgcctgactggagagagcaactgccacgccctgagcggcagcacagctgagctgcgggaggacctggaccaggccaagacccagatcggcatgacagagagcctgctgaaggccctgagccccagcgacagcctggagatcttcaccaagctggaggagatccagcagcagatcctgcagcagaagcacagcatgatcctgctggagaaccagatcggctgcctgaccccagagctgtctgagctgaagaagcagtatgagagcgtgtctgacctcttcaacaccaagaagtctgtgctgcaggaccacttcagcaagctgctgaatgaccagtgcaagaacttcaatgactggttcagcaacatcaaggtgaacctgaaggagtgctttgagagcagcgagaccaagaagtctgtggagcagaagctgcagaagctgagtgacttcctgaccctggagggcaggaacagcaagatcaagcaggtggacagcgtgctgaagcacgtgaagaagcacctgcccaaggcccacgtgaaggagctgatctcctggctggtgggccaggagtttgagctggagaagatggagagcatctgccaggcccgggccaaggagctggaggacagcctgcagcagctgctgcggctgcaggatgaccacaggaacctgaggaagtggctgaccaaccaggaggagaagtggaagggcatggaggagcccggggagaagacagagctgttctgccaggccctggccaggaagcgggagcagtttgagagcgtggcccagctgaacaacagcctgaaggagtatggcttcacagaggaggaggagatcatcatggaggccacctgcctgatggaccgctaccagaccctgctgcggcagctgtctgaaattgaggaggaggacaagctgctgcccacagaggaccagagcttcaatgacctggcccatgatgtgatccactggatcaaggagatcaaggagagcctgatggtgctgaacagcagcgagggcaagatgcccctggaggagcgcatccagaagatcaaggagatcatcctgctgaagccagaaggagatgccagaattgagaccatcatgaagcaggccgagagcagcgaggcccccctggtgcagaagaccctgacagacatcagcaaccagtgggacaacaccctgcacctggccagcacctacctgagccaccaggagaagctgctgctggagggggagaagtacctgcagagcaaggaggacctgcggctgatgctgattgagctgaagaagaagcaggaggccggctttgccctgcagcacggcctgcaggagaagaaggcccagctgaagatctacaagaagttcctgaagaaggcccaggacctgaccagcctgctgaaggagctgaagagccagggcaactacctgctggagtgcaccaagaaccccagcttcagcgaggagccctggctggagatcaagcacctgcacgagagcctgctgcagcagctgcaggacagcgtgcagaacctggatggccacgtgcgggagcatgacagctaccaggtgtgtgtgacagacctgaacaccaccctggacaacttcagcaaggagtttgtgtccttcagtgacaagcctgtggaccagattgctgtggaggagaagctgcagaagctgcaggagctggagaaccggctgagcctgcaggacggcaccctgaagaagatcctggccctggccaagtctgtgaagcagaacaccagctctgtgggccagaagatcatcaaggatgacatcaagagcctgcagtgcaagcagaaggacctggagaaccggctggccagcgccaagcaggagatggagtgctgcctgaacagcatcctgaagagcaagaggagcacagagaagaagggcaagttcaccctgcccggccgggagaagcaggccaccagtgatgtgcaggagagcacccaggagagcgctgctgtggagaagctggaggaggactgggagatcaacaagaactttgtggagaatgtgatggctgtgtccaagaactgccaccacagcatgtacatctttgagagcatcgtgaagaacttcatcagtgatgagatgcaggacagcgctgtggagatggccatgagcaagcagctgagcctgaatgcccaggagagcatgaagaacacagaagatgagaggaaggtgaatgagctgcagaaccagcccctggagctggacaccatgctgagaaatgagcagctggaggagattgagaagctgtacacccagctggaggccaagaaggccgccatcaagcccctggagcagacagagtgcctgaacaagacagaaacaggagccctggtgctgcacaacatcggctacagcgcccagcacctggacaacctgctgcaggccctgatcaccctgaagaagaacaaggagagccagtactgtgtgctgcgggacttccaggagtacctggccgctgtggagagctccatgaaggccctgctgacagacaaggagagcctgaaggtgggccccctggacagcgtgacctacctggacaagatcaagaagttcatcgccagcattgagaaggagaaggacagcctgggcaacctgaagatcaagtgggagaacctgagcaaccacgtgacagacatggacaagaagctgctggagagccagatcaagcagctggagcacggctgggagcaggtggagcagcagatccagaagaagtacagccagcaggtggtggagtatgatgagttcaccaccctgatgaacaaggtgcaggacacagagatcagcctgcagcagcagcagcagcacctgcagctgcggctgaagagccctgaggagagagctggcaaccagagcatgattgccctgaccacagacctgcaggccaccaagcacggcttctctgtgctgaagggccaggccgagctgcagatgaagaggatctggggcgagaaggagaagaagaacctggaggatggcatcaacaacctgaagaagcagtgggagaccctggagcccctgcacctggaggccgagaaccagatcaagaagtgtgacatccggaacaagatgaaggagaccatcctgtgggccaagaacctgctgggggagctgaaccccagcatccccctgctgcctgatgacatcctgagccagatcaggaagtgcaaggtgacccatgatggcatcctggcccggcagcagagcgtggagagcctggccgaggaggtgaaggacaaggtgcccagcctgaccacctatgagggcagtgacctgaacaacaccctggaggacctgaggaaccagtaccagatgctggtgctgaagagcacccagaggagccagcagctggagttcaagctggaggagaggagcaacttctttgccatcatcaggaagttccagctgatggtgcaggagagcgagaccctcatcatcccccgggtggagacagctgccacagaagctgagctgaagcaccaccacgtgaccctggaggccagccagaaggagctgcaggagattgacagcggcatcagcacccacctgcaggagctgaccaacatctatgaggagctgaatgtgtttgagcggctcttcctggaggaccagctgaagaacctgaagatccgcaccaaccgcatccagcgcttcatccagaacacctgcaatgaggtggagcacaagatcaagttctgccggcagttccacgagaagaccagcgccctgcaggaggaggccgacagcatccagagaaatgagctgctgctgaaccaggaggtgaacaagggcgtgaaggaggagatctacaacctgaaggaccggctgacagccatcaagtgctgcatcctgcaggtgctgaagctgaagaaggtgtttgactacatcggcctgaactgggacttcagccagctggaccagctgcagacccaggtgtttgagaaggagaaggagctggaggagaagatcaagcagctggacacctttgaggaggagcacggcaagtaccaggccctgctgagcaagatgagggccatcgacctgcagatcaagaagatgacagaggtggtgctgaaggccccagacagcagccctgagagccggcggctgaatgcccagatcctgagccagagaattgagaaggccaagtgcctgtgtgatgagatcatcaagaagctgaatgaaaacaagacctttgatgacagcttcaaggagaaggagatcctgcagatcaagctgaatgctgaggagaatgacaagctgtacaaggtgctgcagaacatggtgctggagctgagccccaaggagctggatgagaagaactgccaggacaagctggagaccagcctgcacgtgctgaaccagatcaagagccagctgcagcagcccctgctgatcaacctggagatcaagcacatccagaatgagaaggacaactgtgaggccttccaggagcaggtgtgggccgagatgtgcagcatcaaggctgtgacagccatcgagaagcagcgggaggagaacagcagcgaggccagtgatgtggagaccaagctgcgggagtttgaggacctgcagatgcagctgaacaccagcattgacctgcggaccaacgtgctgaatgatgcctatgagaacctgacccgctacaaggaggccgtgaccagggctgtggagagcatcaccagcctggaggccatcatcatcccctacagagtggatgtgggcaaccctgaggagagcctggagatgcccctgaggaagcaggaggagctggagagcacagtggcccacatccaggacctgacagagaagctgggcatgatcagcagccctgaggccaagctgcagctgcagtacaccctgcaggagctggtgtccaagaacagcgccatgaaggaggccttcaaggcccaggagacagaagctgagcgctacctggagaactacaagtgctacaggaagatggaggaggacatctacaccaacctgagcaagatggagaccgtgctgggccagagcatgagcagcctgcccctgagctaccgggaggccctggagcggctggagcagagcaaggccctggtgagcaacctgatcagcaccaaggaggagctgatgaagctgcggcagatcctgcggctgctgcggctgcgctgcacagaaaatgatggcatctgcctgctgaagatcgtgtctgccctgtgggagaagtggctgagcctgctggaggccgccaaggagtgggagatgtggtgtgaggagctgaagcaggagtggaagtttgtgtctgaggagattgagcgggaggccatcatcctggacaacctgcaggaggagctgcctgagatcagcaagaccaaggaggccgccaccacagaggagctgtctgagctgctggactgcctgtgccagtacggggagaatgtggagaagcagcagctgctgctgaccctgctgctgcagaggatccgcagcatccagaatgtgcctgagagcagcggggctgtggagaccgtgcctgccttccaggagatcacctccatgaaggagcgctgcaacaagctgctgcagaaggtgcagaagaacaaggagctggtgcagacagagatccaggagcggcacagcttcaccaaggagatcatcgccctgaagaacttcttccagcagaccaccaccagcttccagaacatggccttccaggaccaccctgagaagtctgagcagtttgaggagctgcagagcatcctgaagaagggcaagctgacctttgagaacatcatggagaagctgcgcatcaagtacagcgagatgtacaccatcgtgcctgctgagattgagagccaggtggaggagtgcaggaaggccctggaggacattgatgagaagatcagcaatgaggtgctgaagagcagccccagctatgccatgaggaggaagattgaggagatcaacaacggcctgcacaacgtggagaagatgctgcagcagaagagcaagaacatcgagaaggcccaggagatccagaagaagatgtgggatgagctggacctgtggcacagcaagctgaatgagctggacagcgaggtgcaggacatcgtggagcaggaccccggccaggcccaggagtggatggacaacctgatgatccccttccagcagtaccagcaggtgtcccagagagcagaatgtaggaccagccagctgaacaaggccaccgtgaagatggaggagtacagcgacctgctgaagagcacagaggcctggattgagaacaccagccacctgctggccaacccagctgactatgacagcctgcggaccctgagccaccacgccagcacagtgcagatggccctggaggacagcgagcagaagcacaacctgctgcacagcatcttcatggacctggaggacctgagcatcatctttgaaacagatgagctgacccagagcatccaggagctgagcaaccaggtgacagccctgcagcagaagatcatggagagcctgccccagatccagaggatggctgatgatgtggtggccatcgagagcgaggtgaagtccatggagaagagggtgtccaagatcaagaccatcctgctgagcaaggagatctttgacttcagccctgaggagcacctgaagcacggggaggtgatcctggagaacatccggcccatgaagaagaccatcgccgagatcgtgtcctaccaggtggagctgcggctgccccagacaggcatgaagcccctgcccgtcttccagaggaccaaccagctgctgcaggacatcaagctgctggagaatgtgacccaggagcagaatgagctgctgaaggtggtgatcaagcagaccaatgagtgggatgaggagattgagaacctgaagcagatcctgaacaactacagcgcccagttcagcctggagcacatgagcccagaccaggccgacaagctgccccagctgcagggcgagattgaaagaatggagaagcagatcctgagcctgaaccagaggaaagaagacctgctggtggacctgaaggccaccgtgctgaacctgcaccagcacctgaagcaggagcaggagggcgtggagcgggaccggctgcctgctgtgaccagcgaggagggcggcgtggccgagagagatgccagcgagaggaagctgaacagaagaggctccatgagctacctggccgctgtggaggaggaggtggaggagagctctgtgaagagtgaccatgacaaggacatggaggaggaccgggccagcagcagcagcggcaccatcgtgcaggaggcctacggcaagatcagcaccagtgacaacagcatggcccagatcctgaccccagacagcctgaacacagagcagggccctgagtgcagcctgcggcccaaccagacagaggagggcaccaccccacccatcgaggccgacaccctggacagcagtgatgcccagggcggcctggagccccgggtggagaagaccaggcctgagcccacagaggtgctgcacgcctgcaagacccaggtggccgagctggagctgtggctgcagcaggccaacgtggccgtggagcctgagaccctgaatgctgacatgcagcaggtgctggagcagcagctggtgggctgccaggccatgctgacagaaattgagcacaaggtggccttcctgctggagacctgcaaggaccagggcctgggggacaacggggccacccagcatgaagctgaggccctgagcctgaagctgaagacagtgaagtgcaacctggagaaggtgcagatgatgctgcaggagaagcacagcgaggaccagcaccccaccatcctgaagaagagcagcgagcctgagcaccaggaggccctgcagcctgtgaacctgtctgagctggagagcatcgtgacagagcggccccagttcagccggcagaaggacttccagcagcagcaggtgctggagctgaagcccatggagcagaaggacttcatcaagttcatcgagttcaatgccaagaagatgtggccccagtactgccagcacgacaatgacaccacccaggagagcagcgcccgctaccccaccacagaggagctgaagacctacaccacccagctggaggacctgcggcaggaggccagcaacctgcagacccaggagaacatgacagaggaggcctacatcaacctggacaagaagctgtttgagctgttcctgaccctgagccagtgcctgagctctgtggaggagatgctggagatgccccggctgtaccgggaggatggcagcggccagcaggtgcactatgagaccctggccctggagctgaagaagctgtacctggccctgagtgacaagaagggggacctgctgaaggccatgacctggccaggagagaacaccaacctgctgctggagtgctttgacaacctgcaggtgtgcctggagcacacccaggccgctgctgtgtgccgcagcaagagcctgaaggccggcctggactacaacagaagctaccagaaggcagatgcctacacagtggagctggagaatgctgagagccgggtggccaagctgagagatgaaggagagcggctgcacctgccctatgccctgctgcaggaggtgtacaagctggaggatgtgctggacagcatgtggggcatgctgcgggcccgctacacagagctgagcagcccctttgtgacagagagccagcaggatgccctgctgcagggcatggtggagctggtgaagattggcaaggagaagctggcccacggccacctgaagcagaccaagagcaaggtggccctgcaggcccagatcgagaaccacaaggtgttcttccagaagctggtggccgacatgctgctgatccaggcctacagcgccaagatcctgcccagcctgctgcagaaccgggagaccttctgggccgagcaggtgacagaggtgaagatcctggaggagaagagccggcagtgtggcatgaagctgcagagcctgctgcagaagtgggaggagtttgatgagaactatgccagcctggagaaggacctggagatcctgatcagcaccctgcccagcgtgtccctggtggaggagacagaggagcggctggtggagcgcatctccttctaccagcagatcaagagaaatattggaggcaagcacgcccggctgtaccagaccctgaatgaaggcaagcagctggtggcctctgtgtcctgcccagagctggagggccagatcgccaagctggaggagcagtggctgagcctgaacaagaagattgaccacgagctgcaccggctgcaggccctgctgaagcacctgctgcggagcgccttcctgggcgtgtacaacagagacagcgaccagctgaccaagtggctggagagcagccagcacaccctgaactactggaaggagcagagcctgaatgtgtcccaggacctggacaccatccgcagcaacatcaacaacttctttgagttcagcaaggaggtggatgagaagagcagcctgaagacagctgtgatcagcatcggcaaccagctgctgcacctgaaggagacagacacagccaccctgcgggccagcctggcccagtttgagcagaagtggaccatgctgatcacccagctgcctgacatccaggagaagctgcaccagctgcagatggagaagctgcccagcaggaaggccatcacagagatgatctcctggatgaacaacgtggagcaccagaccagtgatgaagattctgtgcacagccccagcagcgccagccaggtgaagcacctgctgcagaagcacaaggagttcaggatggagatggactacaagcagtggatcgtggactttgtgaaccagagcctgctgcagctgagcacctgtgatgtggagagcaagagatatgaaagaacagaatttgctgagcacctgggggagatgaaccggcagtggcaccgggtgcacggcatgctgaacaggaagatccagcacctggagcagctgctggagagcatcacagaaagtgagaacaagatccagatcctgaacaactggctggaggcccaggaggagcggctgaagaccctgcagaagccagagagcgtcatctctgtgcagaagctgctgctggactgccaggacatcgagaaccagctggccatcaagagcaaggccctggatgagctgaagcagagctacctgaccctggagagcggggctgtgcccctgctggaggacacagccagcagaattgatgagctgttccagaagaggagctctgtgctgacccaggtgaaccagctgaagacctccatgcagagcgtgctgcaggagtggaagatctatgaccagctgtatgatgaggtgaacatgatgaccatccgcttctggtactgcatggagcacagcaagcctgtggtgctgagcctggagaccctgcgctgccaggtggagaacctgcagagcctgcaggatgaggccgagagcagcgagggctcctgggagaagctgcaggaggtgattggcaagctgaagggcctgtgccccagcgtggccgagatcatcgaggagaagtgccagaacacccacaagcgctggacccaggtgaaccaggccatcgctgaccagctgcagaaggcccagagcctgctgcagctgtggaaggcctacagcaatgcccatggagaggccgccgcccggctgaagcagcaggaggccaagttccagcagctggccaacatctccatgagcggcaacaacctggccgagatcctgcccccagccctgcaggacatcaaggagctgcagcatgatgtgcagaagaccaaggaggccttcctgcagaacagctctgtgctggaccggctgccccagcctgctgagagcagcacccacatgctgctgcccggccccctgcacagcctgcagagagctgcctacctggagaagatgctgctggtgaaggccaatgaatttgagaaccacgtgctggccctgacagcccagagcccagacatcgagcacctgaatgaggtgtccctgaagctgcccctgagtgatgtggccgtgaagaccctgcagaacatgaaccggcagtggatccgggccacagccacagccctggagcgctgcagcgagctgcagggcatcggcctgaatgagaagttcctgtactgctgtgagaagtggatccagctgctggagaagattgaggaggccctgaaggtggatgtggccaacagcctgcctgagctgctggagcagcagaagacctacaagatgctggaggccgaggtgtccatcaaccagaccatcgctgacagctatgtgacccagagcctgcagctgctggacaccacagaaattgagaacagacctgagttcatcacagagttcagcaagctgacagaccgctggcagaatgctgtgcagggcgtgcggcagaggaaaggagatgtggatggcctgaatgcccacgtggcccgctgtggcggggccagcctgaagaagcaggacctgcgctacagcctgcacacagcctgtggggccgccctgctgtgccgcagcagccacggggccaacaaggagatccacttccagaggaggaggaccacctgtgccctgaccctggaggccggggagaagctgctgctgaccacagacctgaagaccaaggagagcgtgggccgccgcatcagccagctgcaggacagctggaaggacatggagccccagctggccgagatgatcaagcagttccagagcacagtggagacctgggaccagtgtgagaagaagatcaaggagctgaagagccggctgcaggtgctgaaggcccagagcgaggaccccctgcctgagctgcacgaggacctgcacaatgagaaggagctgatcaaggtggccatcaggaagcaggagattgaggaccggctgaacacctgggtggtgttcaatgagaagaacaaggagctgtgtgcctggctggtgcagatggagaacaaggtgctgcagacagctgacatcagcattgaggagatgattgagaagctgcagaagaggacagtgggccgggaggaggtgcctgagcgctgggagtgtgagaccatcgtgtctggccatggaacagaggagagctgcttcctgagcatcaggaagttccaccagggccggggcctgcacatcctgacctgccagctgatcccccaggactgcatggaggagatcaacctcttcagcgagaacaagctgcagctgaagcagatgggagaccagctgatcaaggccagcaacaagagcagagctgctgagattgatgacaagctgaacaagatcaatgaccgctggcagcacctgtttgatgtgattggcagctccatggctgaccagaccaacagccgctggatgttcttccagtggccccggggcatccagaggacagtgacctggccctgggaccacctgtgcagctgtgccagcacaggccacacaggccccttccacagctctgtgctgcgctgctttgagcagcacattgaatttggcatctacagaaggacctacaaggtgaacaaggagctgggcggggacaagaatggccagcgctgccccatcatctacccccacggcctggtgcagtgcatccggctgggggagcccctcatcctgaagagggtgaagaagctgaaggagacctttgccttcatccagcagctggacaagaacatgagcaacctgcggacctggctggccagaattgaaagtgagctgagcaagcctgtggtgtatgatgtgtgtgatgaccaggagatccagaagaggctggccgagcagcaggacctgcagagggacatcgagcagcacagcgctggggtggagagcgtcttcaacatctgtgatgtgctgctgcatgacagtgatgcctgtgccaatgaaacagaatgtgacagcatccagcagaccaccaggagcctggaccggcgctggaggaacatctgtgccatgtccatggagaggaggatgaagattgaggagacctggaggctgtggcagaagttcctggatgactacagcagatttgaggactggctgaagtctgctgagaggacagctgcctgccccaacagcagcgaggtgctgtacaccagcgccaaggaggagctgaagagatttgagcggcagatccacgagcggctgacccagctggagctgatcaacaagcagtaccgccgcctggccagagaaaatagaacagacacagccagccggctgaagcagatggtgcatgagggcaaccagcgctgggacaacctgcagaggagagtgacagctgtgctgcggcggctgcggcacttcaccaaccagcgggaggagtttgagggcacccgggagagcatcctggtgtggctgacagagatggacctgcagctgaccaacgtggagcacttcagcgagagtgatgctgatgacaagatgaggcagctgaatggcttccagcaggagatcaccctgaacaccaacaagattgaccagctgattgtgtttggagagcagctgatccagaagtctgagcccctggatgctgtgctgattgaagatgagctggaggagctgcaccgctactgccaggagggcctggaggatgagaaggaggcctctgaaaatgaaacagacatggaggacccccgggagatccagacagacagctggaggaagagaggagagagcgaggagcccagcagcccccagagcctgtgccacctggtggcccctggccacgagaggagcggctgtgagacccctgtgtctgtggacagcatccccctggagtgggaccacactggagatgtgggcggcagcagcagccatgaagaagatgaggagggcccctactacagcgccctgagcggcaagagcatcagtgatggccacagctggcacgtgcctgacagccccagctgcccagagcaccactacaagcagatggagggggacagaaatgtgccccctgtgcccccagccagcagcaccccctacaagccaccctacgtgtccctgaacttcaccggcagcacagcctacgtgtgtgcctttgaccgctgggagatgatccaggcccaggagctgcacaacaagctgaagatcaagcagaacctgcagcagctgaacagcgacatcagcgccatcaccacctggctgaagaagacagaggccgagctggagatgctgaagatggccaagccacccagcgacatccaggagattgagctgcgggtgaagaggctgcaggagatcctgaaggcctttgacacctacaaggccctggtggtgtctgtgaatgtgagcagcaaggagttcctgcagacagagagccctgagagcacagagctgcagagccggctgcggcagctgagcctgctgtgggaggccgcccagggcgctgtggacagctggaggggcggcctgcggcagagcctgatgcagtgccaggacttccaccagctgagccagaacctgctgctgtggctggccagcgccaagaacagacggcagaaggcccacgtgacagaccccaaggctgacccccgggccctgctggagtgcagaagagagctgatgcagctggagaaggagctggtggagcggcagccccaggtggacatgctgcaggagatcagcaacagcctgctgatcaagggccatggagaggactgcatcgaggccgaggagaaggtgcacgtgattgagaagaagctgaagcagctgcgggagcaggtgtcccaggacctgatggccctgcagggcacccagaacccagccagccccctgcccagctttgatgaggtggacagcggggaccagcccccagccacctctgtgcctgccccccgggccaagttcctgtacccagctgtgcagagcagcgagaactacagaagaagaggaggagaccgggagcagggcccccggcagcacacagccacagccctgctgcccctgaagggcggccctggcagccccaccccagctgctgcccctcctgctgctgctgcccctggcctgcctgctgccctgctgcggcggcggctgcagctgcacagcggccagcagctgtgccctgtgctgctgccccacgccgaggtgcaccagtgggccaccccccacatcgagggcattgctggccacagcgccaccccaccagcctag

SEQ ID NO: 171277 - DNA, 20658 bp, synthetic construct
  misc_feature 1..20658: note = Description of Artificial Sequence: Synthetic coding sequence
  source 1..20658: mol_type = other DNA
atggccagcagccctgagctgcccacagaagatgagcagggctcctggggcattgatgacctgcacatcagcctgcaggccgagcaggaggacacccagaagaaggccttcacctgctggatcaacagccagctggcccggcacaccagccccagcgtcatcagtgacctcttcacagacatcaagaagggccacgtgctgctggacctgctggaggtgctgagcggccagcagctgccccgggacaagggcagcaacaccttccagtgccgcatcaacatcgagcacgccctgaccttcctgaggaacagaagcatcaagctgatcaacatccacgtgacagacatcattgatggcaaccccagcatcatcctgggcctcatctggaccatcatcctgcacttccacatcgagaagctggcccagaccctgagctgcaactacaaccagcccagcctggatgatgtgtctgtggtggacagcagccctgccagcagccccccagccaagaagtgcagcaaggtgcaggcccgctggcagatgtctgccaggaaggccctgctgctgtgggcccaggagcagtgtgccacctatgagagcgtgaatgtgacagacttcaagagctcctggagaaatggcatggccttcctggccatcatccacgccctgcggccagacctgattgacatgaagtctgtgaagcacaggagcaacaaggacaacctgcgggaggccttcagaattgctgagcaggagctgaagatcccccggctgctggagccagaagatgtggatgtggtggaccctgatgagaagagcatcatgacctacgtggcccagttcctgcagtacagcaaggatgcccctggcactggagaggaggcccagggcaaggtgaaggatgccatgggctggctgaccctgcagaaggagaagctgcagaagctgctgaaggacagtgaaaatgacacctacttcaagaagtacaacagcctgctgtccttcatggagagcttcaatgaggagaagaagagcttcctggatgtgctgagcatcaagagggacctggatgagctggacaaggaccacctgcagctgcgggaggcctgggatggcctggaccaccagatcaatgcctggaagatcaagctgaactatgccctgcccccacccctgcaccagacagaggcctggctgcaggaggtggaggagctgatggatgaggacctgagcgccagccaggaccacagccaggccgtgaccctcatccaggagaagatgaccctcttcaagagcctgatggacagatttgagcaccacagcaacatcctgctgacctttgagaacaaggatgagaaccacctgcccctggtgccccccaacaagctggaggagatgaagaggcgcatcaacaacatcctggagaagaagttcatcctgctgctggagttccactactacaagtgcctggtgctgggcctggtggatgaggtgaagagcaagctggacatctggaacatcaagtatggcagccgggagagcgtggagctgctgctggaggactggcacaagttcatcgaggagaaggagttcctggcccggctggacaccagcttccagaagtgtggggagatctacaagaacctggccggggagtgccagaacatcaacaagcagtacatgatggtgaagagtgatgtgtgcatgtacaggaagaacatctacaacgtgaagagcaccctgcagaaggtgctggcctgctgggccacctacgtggagaacctgcggctgctgcgggcctgctttgaggagaccaagaaggaggagatcaaggaggtgccctttgagaccctggcccagtggaacctggagcacgccaccctgaatgaagctggcaacttcctggtggaggtgtccaatgatgtggtgggcagcagcatcagcaaggagctgcggcggctgaacaagcgctggaggaagctggtgtccaagacccagctggagatgaacctgcccctgatgatcaagaagcaggaccagcccacctttgacaacagcggcaacatcctgagcaaggaggagaaggccaccgtggagttcagcacagacatgtctgtggagctgcctgagaactacaaccagaacatcaaggccggggagaagcatgagaaggaaaatgaggagttcaccggccagctgaaggtggccaaggatgtggagaagctgattggccaggtggagatctgggaggccgaggccaagtctgtgctggaccaggatgatgtggacacctccatggaggagagcctgaagcacctgattgccaagggctccatgtttgatgagctgatggcccggtctgaggacatgctgcagatggacatccagaacatcagcagccaggagagcttccagcacgtgctgaccaccggcctgcaggccaagatccaggaggccaaggagaaggtgcagatcaacgtggtgaagctgattgctgccctgaagaacctgacagatgtgtccccagacctggacatccggctgaagatggaggagagccagaaggagctggagagctacatgatgagggcccagcagctgctgggccagcgggagagccctggagagctgatcagcaagcacaaggaggccctgatcatcagcaacaccaagagcctggccaagtacctgaaggctgtggaggagctgaagaacaacgtgacagaggacatcaagatgagcctggaggagaagagcagagatgtgtgtgccaagtgggagagcctgcaccacgagctgagcctgtatgtgcagcagctgaagattgacatcgagaagggcaagctgagtgacaacatcctgaagctggagaagcagatcaacaaggagaagaagctgatccggcggggccgcaccaagggcctcatcaaggagcacgaggcctgcttcagcgaggagggctgcctgtaccagctgaaccaccacatggaggtgctgcgggagctgtgtgaggagctgcccagccagaagagccagcaggaggtgaagaggctgctgaaggactatgagcagaagattgaaaggctgctgaagtgtgccagcgagatccacatgaccctgcagcccacagctgggggcaccagcaagaatgaaggcaccatcaccaccagcgagaacagaggaggagacccccacagcgaggccccctttgccaagagtgacaaccagcccagcacagagaaggccatggagcccaccatgaagttcagcctggcctctgtgctgcggcccctgcaggaggagagcatcatggagaaggactacagcgccagcatcaacagcctgctggagagatatgacacctacagagacatcctggagcaccacctgcagaacaacaagttccgcatcaccagtgacttcagcagtgaagaagatagaagcagcagctgcctgcaggccaagctgacagacctgcaggtgatcaagaatgaaacagatgcccgctggaaggagtttgagatcatcagcctgaagctggagaaccacgtgaatgacatcaagaagccctttgtgatcaaggagcgggacaccctgaaggagcgggagcgggagctgcagatgaccctgaacaccaggatggagagcctggagacagccctgcggctggtgctgcctgtggagaaggccagcctgctgctgtgtggcagtgacctgcccctgcacaagatggccatccagggcttccacctgattgatgctgaccgcatctaccagcacctgaggaacatccaggacagcatcgccaagcagatcgagatctgcaaccggctggaggagcccggcaactttgtgctgaaggagctgcacccctttgacctgcacgccatgcagaacatcatcctgaagtacaagacccagtttgagggcatgaaccaccgggtgcagaggtctgaggacaccctgaaggccctggaggacttcctggccagcctgaggacagccaagctgtctgctgagcctgtgacagacctgagcgccagtgacacccaggtggcccaggagaacaccctgactgtgaagaacaaggagggggagatccacctgatgaaggacaaggccaagcacctggacaagtgcctgaagatgctggacatgtccttcaaggatgctgagagaggagatgacaccagctgtgagaacctgctggatgccttcagcatcaagctgtctgagacccacggctacggcgtgcaggaggagttcacagaggagaacaagctgctggaggcctgcatcttcaagaacaatgagctgctgaagaacatccaggatgtgcagagccagatcagcaagattggcctgaaggaccccaccgtgcctgctgtgaagcacaggaagaagagcctcatccggctggacaaggtgctggatgaatatgaggaggagaagaggcacctgcaggagatggccaacagcctgccccacttcaaggatggccgggagaagacagtgaaccagcagtgccagaacacagtggtgctgtgggagaacaccaaggccctggtgacagaatgtctggagcagtgtggccgggtgctggagctgctgaagcagtaccagaacttcaagagcatcctgaccaccctcatccagaaggaggagagcgtcatcagcctgcaggccagctacatgggcaaggagaacctgaagaagagaattgctgagattgaaattgtgaaggaggagttcaatgagcacctggaggtggtggacaagatcaaccaggtgtgcaagaacctgcagttctacctgaacaagatgaagacctttgaggagcccccatttgagaaggaggccaacatcatcgtggaccgctggctggacatcaatgagaagacagaggactactatgagaacctgggccgggccctggccctgtgggacaagctgttcaacctgaagaatgtgattgatgagtggacagagaaggccctgcagaagatggagctgcaccagctgacagaagaagatcgggagcggctgaaggaggagctgcaggtgcatgagcagaagaccagcgagttcagccggcgggtggccgagatccagttcctgctgcagagcagcgagatccccctggagctgcaggtgatggagagcagcatcctgaacaagatggagcacgtgcagaagtgcctgactggagagagcaactgccacgccctgagcggcagcacagctgagctgcgggaggacctggaccaggccaagacccagatcggcatgacagagagcctgctgaaggccctgagccccagcgacagcctggagatcttcaccaagctggaggagatccagcagcagatcctgcagcagaagcacagcatgatcctgctggagaaccagatcggctgcctgaccccagagctgtctgagctgaagaagcagtatgagagcgtgtctgacctcttcaacaccaagaagtctgtgctgcaggaccacttcagcaagctgctgaatgaccagtgcaagaacttcaatgactggttcagcaacatcaaggtgaacctgaaggagtgctttgagagcagcgagaccaagaagtctgtggagcagaagctgcagaagctgagtgacttcctgaccctggagggcaggaacagcaagatcaagcaggtggacagcgtgctgaagcacgtgaagaagcacctgcccaaggcccacgtgaaggagctgatctcctggctggtgggccaggagtttgagctggagaagatggagagcatctgccaggcccgggccaaggagctggaggacagcctgcagcagctgctgcggctgcaggatgaccacaggaacctgaggaagtggctgaccaaccaggaggagaagtggaagggcatggaggagcccggggagaagacagagctgttctgccaggccctggccaggaagcgggagcagtttgagagcgtggcccagctgaacaacagcctgaaggagtatggcttcacagaggaggaggagatcatcatggaggccacctgcctgatggaccgctaccagaccctgctgcggcagctgtctgaaattgaggaggaggacaagctgctgcccacagaggaccagagcttcaatgacctggcccatgatgtgatccactggatcaaggagatcaaggagagcctgatggtgctgaacagcagcgagggcaagatgcccctggaggagcgcatccagaagatcaaggagatcatcctgctgaagccagaaggagatgccagaattgagaccatcatgaagcaggccgagagcagcgaggcccccctggtgcagaagaccctgacagacatcagcaaccagtgggacaacaccctgcacctggccagcacctacctgagccaccaggagaagctgctgctggagggggagaagtacctgcagagcaaggaggacctgcggctgatgctgattgagctgaagaagaagcaggaggccggctttgccctgcagcacggcctgcaggagaagaaggcccagctgaagatctacaagaagttcctgaagaaggcccaggacctgaccagcctgctgaaggagctgaagagccagggcaactacctgctggagtgcaccaagaaccccagcttcagcgaggagccctggctggagatcaagcacctgcacgagagcctgctgcagcagctgcaggacagcgtgcagaacctggatggccacgtgcgggagcatgacagctaccaggtgtgtgtgacagacctgaacaccaccctggacaacttcagcaaggagtttgtgtccttcagtgacaagcctgtggaccagattgctgtggaggagaagctgcagaagctgcaggagctggagaaccggctgagcctgcaggacggcaccctgaagaagatcctggccctggccaagtctgtgaagcagaacaccagctctgtgggccagaagatcatcaaggatgacatcaagagcctgcagtgcaagcagaaggacctggagaaccggctggccagcgccaagcaggagatggagtgctgcctgaacagcatcctgaagagcaagaggagcacagagaagaagggcaagttcaccctgcccggccgggagaagcaggccaccagtgatgtgcaggagagcacccaggagagcgctgctgtggagaagctggaggaggactgggagatcaacaaggacagcgctgtggagatggccatgagcaagcagctgagcctgaatgcccaggagagcatgaagaacacagaagatgagaggaaggtgaatgagctgcagaaccagcccctggagctggacaccatgctgagaaatgagcagctggaggagattgagaagctgtacacccagctggaggccaagaaggccgccatcaagcccctggagcagacagaatgtctgaacaagacagagaccggggccctggtgctgcacaacatcggctacagcgcccagcacctggacaacctgctgcaggccctgatcaccctgaagaagaacaaggagagccagtactgtgtgctgcgggacttccaggagtacctggccgctgtggagagctccatgaaggccctgctgacagacaaggagagcctgaaggtgggccccctggacagcgtgacctacctggacaagatcaagaagttcatcgccagcattgagaaggagaaggacagcctgggcaacctgaagatcaagtgggagaacctgagcaaccacgtgacagacatggacaagaagctgctggagagccagatcaagcagctggagcacggctgggagcaggtggagcagcagatccagaagaagtacagccagcaggtggtggagtatgatgagttcaccaccctgatgaacaaggtgcaggacacagagatcagcctgcagcagcagcagcagcacctgcagctgcggctgaagagccctgaggagcgggccggcaaccagagcatgattgccctgaccacagacctgcaggccaccaagcacggcttctctgtgctgaagggccaggccgagctgcagatgaagaggatctggggcgagaaggagaagaagaacctggaggatggcatcaacaacctgaagaagcagtgggagaccctggagcccctgcacctggaggccgagaaccagatcaagaagtgtgacatccggaacaagatgaaggagaccatcctgtgggccaagaacctgctgggggagctgaaccccagcatccccctgctgcctgatgacatcctgagccagatcaggaagtgcaaggtgacccatgatggcatcctggcccggcagcagagcgtggagagcctggccgaggaggtgaaggacaaggtgcccagcctgaccacctatgagggcagtgacctgaacaacaccctggaggacctgaggaaccagtaccagatgctggtgctgaagagcacccagaggagccagcagctggagttcaagctggaggagaggagcaacttctttgccatcatcaggaagttccagctgatggtgcaggagagcgagaccctcatcatcccccgggtggagacagctgccacagaggccgagctgaagcaccaccacgtgaccctggaggccagccagaaggagctgcaggagattgattctggcatcagcacccacctgcaggagctgaccaacatctatgaggagctgaatgtgtttgagcggctcttcctggaggaccagctgaagaacctgaagatccgcaccaaccgcatccagcgcttcatccagaacacctgcaatgaggtggagcacaagatcaagttctgccggcagttccacgagaagaccagcgccctgcaggaggaggccgacagcatccagagaaatgagctgctgctgaaccaggaggtgaacaagggcgtgaaggaggagatctacaacctgaaggaccggctgacagccatcaagtgctgcatcctgcaggtgctgaagctgaagaaggtgtttgactacatcggcctgaactgggacttcagccagctggaccagctgcagacccaggtgtttgagaaggagaaggagctggaggagaagatcaagcagctggacacctttgaggaggagcacggcaagtaccaggccctgctgagcaagatgagggccatcgacctgcagatcaagaagatgacagaggtggtgctgaaggccccagacagcagccctgagagccggcggctgaatgcccagatcctgagccagagaattgagaaggccaagtgcctgtgtgatgagatcatcaagaagctgaatgaaaacaagacctttgatgacagcttcaaggagaaggagatcctgcagatcaagctgaatgcagaagaaaatgacaagctgtacaaggtgctgcagaacatggtgctggagctgagccccaaggagctggatgagaagaactgccaggacaagctggagaccagcctgcacgtgctgaaccagatcaagagccagctgcagcagcccctgctgatcaacctggagatcaagcacatccagaatgagaaggacaactgtgaggccttccaggagcaggtgtgggccgagatgtgcagcatcaaggctgtgacagccatcgagaagcagcgggaggagaacagcagcgaggccagtgatgtggagaccaagctgcgggagtttgaggacctgcagatgcagctgaacaccagcattgacctgcggaccaacgtgctgaatgatgcctatgagaacctgacccgctacaaggaggccgtgaccagggctgtggagagcatcaccagcctggaggccatcatcatcccctacagagtggatgtgggcaaccctgaggagagcctggagatgcccctgaggaagcaggaggagctggagagcacagtggcccacatccaggacctgacagagaagctgggcatgatcagcagccctgaggccaagctgcagctgcagtacaccctgcaggagctggtgtccaagaacagcgccatgaaggaggccttcaaggcccaggagacagaggccgagcgctacctggagaactacaagtgctacaggaagatggaggaggacatctacaccaacctgagcaagatggagaccgtgctgggccagagcatgagcagcctgcccctgagctaccgggaggccctggagcggctggagcagagcaaggccctggtgagcaacctgatcagcaccaaggaggagctgatgaagctgcggcagatcctgcggctgctgcggctgcgctgcacagaaaatgatggcatctgcctgctgaagatcgtgtctgccctgtgggagaagtggctgagcctgctggaggccgccaaggagtgggagatgtggtgtgaggagctgaagcaggagtggaagtttgtgtctgaggagattgaaagagaggccatcatcctggacaacctgcaggaggagctgcctgagatcagcaagaccaaggaggccgccaccacagaggagctgtctgagctgctggactgcctgtgccagtatggagaaaatgtggagaagcagcagctgctgctgaccctgctgctgcagaggatccgcagcatccagaatgtgcctgagagcagtggagctgtggagaccgtgcctgccttccaggagatcacctccatgaaggagcgctgcaacaagctgctgcagaaggtgcagaagaacaaggagctggtgcagacagagatccaggagcggcacagcttcaccaaggagatcatcgccctgaagaacttcttccagcagaccaccaccagcttccagaacatggccttccaggaccaccctgagaagtctgagcagtttgaggagctgcagagcatcctgaagaagggcaagctgacctttgagaacatcatggagaagctgcgcatcaagtacagcgagatgtacaccatcgtgcctgctgagattgagagccaggtggaggagtgcaggaaggccctggaggacattgatgagaagatcagcaatgaggtgctgaagagcagccccagctatgccatgaggaggaagattgaggagatcaacaacggcctgcacaacgtggagaagatgctgcagcagaagagcaagaacatcgagaaggcccaggagatccagaagaagatgtgggatgagctggacctgtggcacagcaagctgaatgagctggacagcgaggtgcaggacatcgtggagcaggaccccggccaggcccaggagtggatggacaacctgatgatccccttccagcagtaccagcaggtgtcccagagagctgagtgcaggaccagccagctgaacaaggccaccgtgaagatggaggagtacagcgacctgctgaagagcacagaggcctggattgagaacaccagccacctgctggccaacccagctgactatgacagcctgcggaccctgagccaccacgccagcacagtgcagatggccctggaggacagcgagcagaagcacaacctgctgcacagcatcttcatggacctggaggacctgagcatcatctttgaaacagatgagctgacccagagcatccaggagctgagcaaccaggtgacagccctgcagcagaagatcatggagagcctgccccagatccagaggatggctgatgatgtggtggccattgaaagtgaggtgaagtccatggagaagagggtgtccaagatcaagaccatcctgctgagcaaggagatctttgacttcagccctgaggagcacctgaagcatggagaggtgatcctggagaacatccggcccatgaagaagaccatcgccgagatcgtgtcctaccaggtggagctgcggctgccccagacaggcatgaagcccctgcctgtgttccagaggaccaaccagctgctgcaggacatcaagctgctggagaatgtgacccaggagcagaatgagctgctgaaggtggtgatcaagcagaccaatgagtgggatgaggagattgagaacctgaagcagatcctgaacaactacagcgcccagttcagcctggagcacatgagcccagaccaggccgacaagctgccccagctgcagggcgagattgaaagaatggagaagcagatcctgagcctgaaccagaggaaggaggacctgctggtggacctgaaggccaccgtgctgaacctgcaccagcacctgaagcaggagcaggagggcgtggagcgggaccggctgcctgctgtgaccagcgaggagggcggcgtggccgagagagatgccagcgagaggaagctgaacagaagaggctccatgagctacctggccgctgtggaggaggaggtggaggagagctctgtgaagagtgacaatggagatgagaaggccgagcccagcccccagagctggagcagcctgtggaagcatgacaaggacatggaggaggaccgggccagcagcagcagcggcaccatcgtgcaggaggcctacggcaagatcagcaccagtgacaacagcatggcccagatcctgaccccagacagcctgaacacagagcagggcccagaatgttccctgcggcccaaccagacagaggagggcaccaccccacccattgaagctgacaccctggacagcagtgatgcccagggcggcctggagccccgggtggagaagaccaggcctgagcccacagaggtgctgcacgcctgcaagacccaggtggccgagctggagctgtggctgcagcaggccaacgtggccgtggagcctgagaccctgaatgctgacatgcagcaggtgctggagcagcagctggtgggctgccaggccatgctgacagaaattgagcacaaggtggccttcctgctggagacctgcaaggaccagggcctgggggacaatggagccacccagcacgaggccgaggccctgagcctgaagctgaagacagtgaagtgcaacctggagaaggtgcagatgatgctgcaggagaagcacagcgaggaccagcaccccaccatcctgaagaagagcagcgagcctgagcaccaggaggccctgcagcctgtgaacctgtctgagctggagagcatcgtgacagagcggccccagttcagccggcagaaggacttccagcagcagcaggtgctggagctgaagcccatggagcagaaggacttcatcaagttcatcgagttcaatgccaagaagatgtggccccagtactgccagcacgacaatgacaccacccaggagagcagcgccagcaaccaggccagcagcccagaaaatgatgtgcctgacagcatcctgagcccccagggccagaatggagacaagtggcagtacctgcaccacgagctgagcagcaagatcaagctgcccctgccccagctggtggagccccaggtgtccaccaacatgggcatcctgcccagcgtgaccatgtacaacttccgctaccccaccacagaggagctgaagacctacaccacccagctggaggacctgcggcaggaggccagcaacctgcagacccaggagaacatgacagaggaggcctacatcaacctggacaagaagctgtttgagctgttcctgaccctgagccagtgcctgagctctgtggaggagatgctggagatgccccggctgtacagagaagatggcagcggccagcaggtgcactatgagaccctggccctggagctgaagaagctgtacctggccctgagtgacaagaagggggacctgctgaaggccatgacctggccaggagagaacaccaacctgctgctggagtgctttgacaacctgcaggtgtgcctggagcacacccaggccgctgctgtgtgccgcagcaagagcctgaaggccggcctggactacaacagaagctaccagaatgagatcaagaggctgtaccaccagctgatcaagagcaagaccagcctgcagcagagcctgaatgagatcagcggccagagcgtggccgagcagctgcagaaggcagatgcctacacagtggagctggagaatgctgagagccgggtggccaagctgagagatgaaggagagcggctgcacctgccctatgccctgctgcaggaggtgtacaagctggaggatgtgctggacagcatgtggggcatgctgcgggcccgctacacagagctgagcagcccctttgtgacagagagccagcaggatgccctgctgcagggcatggtggagctggtgaagattggcaaggagaagctggcccacggccacctgaagcagaccaagagcaaggtggccctgcaggcccagatcgagaaccacaaggtgttcttccagaagctggtggccgacatgctgctgatccaggcctacagcgccaagatcctgcccagcctgctgcagaaccgggagaccttctgggccgagcaggtgacagaggtgaagatcctggaggagaagagccggcagtgtggcatgaagctgcagagcctgctgcagaagtgggaggagtttgatgaaaattatgccagcctggagaaggacctggagatcctgatcagcaccctgcccagcgtgtccctggtggaggagacagaggagcggctggtggagcgcatctccttctaccagcagatcaagaggaacatcggcggcaagcacgcccggctgtaccagaccctgaatgaaggcaagcagctggtggcctctgtgtcctgcccagagctggagggccagatcgccaagctggaggagcagtggctgagcctgaacaagaagattgaccacgagctgcaccggctgcaggccctgctgaagcacctgctgagctacaacagagacagcgaccagctgaccaagtggctggagagcagccagcacaccctgaactactggaaggagcagagcctgaatgtgtcccaggacctggacaccatccgcagcaacatcaacaacttctttgagttcagcaaggaggtggatgagaagagcagcctgaagacagctgtgatcagcatcggcaaccagctgctgcacctgaaggagacagacacagccaccctgcgggccagcctggcccagtttgagcagaagtggaccatgctgatcacccagctgcctgacatccaggagaagctgcaccagctgcagatggagaagctgcccagcaggaaggccatcacagagatgatctcctggatgaacaacgtggagcaccagaccagtgatgaggacagcgtgcacagccccagcagcgccagccaggtgaagcacctgctgcagaagcacaaggagttcaggatggagatggactacaagcagtggatcgtggactttgtgaaccagagcctgctgcagctgagcacctgtgatgtggagagcaagagatatgaaagaacagaatttgctgagcacctgggggagatgaaccggcagtggcaccgggtgcacggcatgctgaacaggaagatccagcacctggagcagctgctggagagcatcacagaaagtgagaacaagatccagatcctgaacaactggctggaggcccaggaggagcggctgaagaccctgcagaagccagagagcgtcatctctgtgcagaagctgctgctggactgccaggacatcgagaaccagctggccatcaagagcaaggccctggatgagctgaagcagagctacctgaccctggagagcggggctgtgcccctgctggaggacacagccagcagaattgatgagctgttccagaagaggagctctgtgctgacccaggtgaaccagctgaagacctccatgcagagcgtgctgcaggagtggaagatctatgaccagctgtatgatgaggtgaacatgatgaccatccgcttctggtactgcatggagcacagcaagcctgtggtgctgagcctggagaccctgcgctgccaggtggagaacctgcagagcctgcaggatgaagctgagagcagcgagggctcctgggagaagctgcaggaggtgattggcaagctgaagggcctgtgccccagcgtggccgagatcatcgaggagaagtgccagaacacccacaagcgctggacccaggtgaaccaggccatcgctgaccagctgcagaaggcccagagcctgctgcagctgtggaaggcctacagcaatgcccacggggaggccgccgcccggctgaagcagcaggaggccaagttccagcagctggccaacatctccatgagcggcaacaacctggccgagatcctgcccccagccctgcaggacatcaaggagctgcagcatgatgtgcagaagaccaaggaggccttcctgcagaacagctctgtgctggaccggctgccccagcctgctgagagcagcacccacatgctgctgcccggccccctgcacagcctgcagagagctgcctacctggagaagatgctgctggtgaaggccaatgaatttgaatttgtgctgagccagttcaaggactttggagtgcggctggagagcctgaagggcctcatcatgcatgaggaggagaacctggaccggctgcaccagcaggagaaggaaaatccagacagcttcctgaaccacgtgctggccctgacagcccagagcccagacatcgagcacctgaatgaggtgtccctgaagctgcccctgagtgatgtggccgtgaagaccctgcagaacatgaaccggcagtggatccgggccacagccacagccctggagcgctgcagcgagctgcagggcatcggcctgaatgagaagttcctgtactgctgtgagaagtggatccagctgctggagaagattgaggaggccctgaaggtggatgtggccaacagcctgcctgagctgctggagcagcagaagacctacaagatgctggaggccgaggtgtccatcaaccagaccatcgctgacagctatgtgacccagagcctgcagctgctggacaccacagaaattgaaaatagacctgagttcatcacagagttcagcaagctgacagaccgctggcagaatgctgtgcagggcgtgcggcagaggaaaggagatgtggatggcctggtgcggcagtggcaggacttcaccacctctgtggagaacctcttccgcttcctgacagacaccagccacctgctgtctgctgtgaagggccaggagcgcttcagcctgtaccagaccaggagcctcatccacgagctgaagaacaaggagatccacttccagaggaggaggaccacctgtgccctgaccctggaggccggggagaagctgctgctgaccacagacctgaagaccaaggagagcgtgggccgccgcatcagccagctgcaggacagctggaaggacatggagccccagctggccgagatgatcaagcagttccagagcacagtggagacctgggaccagtgtgagaagaagatcaaggagctgaagagccggctgcaggtgctgaaggcccagagcgaggaccccctgcctgagctgcacgaggacctgcacaatgagaaggagctgatcaaggagctggagcagagcctggcctcctggacccagaacctgaaggagctgcagaccatgaaggctgacctgaccaggcatgtgctggtggaggatgtgatggtgctgaaggagcagatcgagcacctgcaccggcagtgggaggacctgtgcctgcgggtggccatcaggaagcaggagattgaagatcggctgaacacctgggtggtgttcaatgagaagaacaaggagctgtgtgcctggctggtgcagatggagaacaaggtgctgcagacagctgacatcagcattgaggagatgattgagaagctgcagaaggactgcatggaggagatcaacctcttcagcgagaacaagctgcagctgaagcagatgggagaccagctgatcaaggccagcaacaagagcagagctgctgagattgatgacaagctgaacaagatcaatgaccgctggcagcacctgtttgatgtgattggcagccgggtgaagaagctgaaggagacctttgccttcatccagcagctggacaagaacatgagcaacctgcggacctggctggccagaattgaaagtgagctgagcaagcctgtggtgtatgatgtgtgtgatgaccaggagatccagaagaggctggccgagcagcaggacctgcagagggacatcgagcagcacagcgctggggtggagagcgtcttcaacatctgtgatgtgctgctgcatgacagtgatgcctgtgccaatgaaacagaatgtgacagcatccagcagaccaccaggagcctggaccggcgctggaggaacatctgtgccatgtccatggagaggaggatgaagattgaggagacctggaggctgtggcagaagttcctggatgactacagcagatttgaggactggctgaagtctgctgagaggacagctgcctgccccaacagcagcgaggtgctgtacaccagcgccaaggaggagctgaagagatttgaggccttccagaggcagatccacgagcggctgacccagctggagctgatcaacaagcagtacagaaggctggcccgggagaacagaacagacacagccagccggctgaagcagatggtgcatgagggcaaccagcgctgggacaacctgcagaggagagtgacagctgtgctgcggcggctgcggcacttcaccaaccagcgggaggagtttgagggcacccgggagagcatcctggtgtggctgacagagatggacctgcagctgaccaacgtggagcacttcagcgagagtgatgctgatgacaagatgaggcagctgaatggcttccagcaggagatcaccctgaacaccaacaagattgaccagctgattgtgtttggagagcagctgatccagaagtctgagcccctggatgctgtgctgattgaagatgagctggaggagctgcaccgctactgccaggaggtgtttggccgggtgagccgcttccaccggcggctgaccagctgcaccccaggcctggaggatgagaaggaggcctctgaaaatgaaacagacatggaggacccccgggagatccagacagacagctggaggaagagaggagagagcgaggagcccagcagcccccagagcctgtgccacctggtggcccctggccacgagaggagcggctgtgagacccctgtgtctgtggacagcatccccctggagtgggaccacactggagatgtgggcggcagcagcagccatgaagaagatgaggagggcccctactacagcgccctgagcggcaagagcatcagtgatggccacagctggcacgtgcctgacagccccagctgcccagagcaccactacaagcagatggagggggacagaaatgtgccccctgtgcccccagccagcagcaccccctacaagccaccctacggcaagctgctgctgcccccaggcacagatggcggcaaggagggcccccgggtgctgaatggaaacccccagcaggaggatggcggcctggccggcatcacagagcagcagagcggggcctttgaccgctgggagatgatccaggcccaggagctgcacaacaagctgaagatcaagcagaacctgcagcagctgaacagcgacatcagcgccatcaccacctggctgaagaagacagaggccgagctggagatgctgaagatggccaagccacccagcgacatccaggagattgagctgcgggtgaagaggctgcaggagatcctgaaggcctttgacacctacaaggccctggtggtgtctgtgaatgtgagcagcaaggagttcctgcagacagagagccctgagagcacagagctgcagagccggctgcggcagctgagcctgctgtgggaggccgcccagggcgctgtggacagctggaggggcggcctgcggcagagcctgatgcagtgccaggacttccaccagctgagccagaacctgctgctgtggctggccagcgccaagaacagacggcagaaggcccacgtgacagaccccaaggctgacccccgggccctgctggagtgcagaagagagctgatgcagctggagaaggagctggtggagcggcagccccaggtggacatgctgcaggagatcagcaacagcctgctgatcaagggccatggagaggactgcatcgaggccgaggagaaggtgcacgtgattgagaagaagctgaagcagctgcgggagcaggtgtcccaggacctgatggccctgcagggcacccagaacccagccagccccctgcccagctttgatgaggtggacagcggggaccagcccccagccacctctgtgcctgccccccgggccaagcagttccgggctgtgaggaccacagaaggagaggaggagacagagagccgggtgcccggcagcacccggccccagaggagcttcctgagccgggtggtgcgggccgccctgcccctgcagctgctgctgctgctgctgctgctgctggcctgcctgctgcccagcagcgaggaggactacagctgcacccaggccaacaactttgcccgctccttctaccccatgctgcgctacaccaacggccccccacccacctag

SEQ ID NO: 171278 - DNA, 804 bp, synthetic construct
  misc_feature 1..804: note = Description of Artificial Sequence: Synthetic coding sequence
  source 1..804: mol_type = other DNA
atggccagcagccctgagctgcccacagaagatgagcagggctcctggggcattgatgacctgcacatcagcctgcaggccgagcaggaggacacccagaagaaggccttcacctgctggatcaacagccagctggcccggcacaccagccccagcgtcatcagtgacctcttcacagacatcaagaagggccacgtgctgctggacctgctggaggtgctgagcggccagcagctgccccgggacaagggcagcaacaccttccagtgccgcatcaacatcgagcacgccctgaccttcctgaggaacagaagcatcaagctgatcaacatccacgtgacagacatcattgatggcaaccccagcatcatcctgggcctcatctggaccatcatcctgcacttccacatcgagaagctggcccagaccctgagctgcaactacaaccagcccagcctggatgatgtgtctgtggtggacagcagccctgccagcagccccccagccaagaagtgcagcaaggtgcaggcccgctggcagatgtctgccaggaaggccctgctgctgtgggcccaggagcagtgtgccacctatgagagcgtgaatgtgacagacttcaagagctcctggagaaatggcatggccttcctggccatcatccacgccctgcggccagacctgattgacatgaagtctgtgaagcacaggagcaacaaggacaacctgcgggaggccttcagaattgctgagcaggagctgaagatcccccggctgctggagcctgaggcctacaagaacttctag

SEQ ID NO: 171279 - DNA, 9813 bp, synthetic construct
  misc_feature 1..9813: note = Description of Artificial Sequence: Synthetic coding sequence
  source 1..9813: mol_type = other DNA
atggagaagctgcgcatcaagtacagcgagatgtacaccatcgtgcctgctgagattgagagccaggtggaggagtgcaggaaggccctggaggacattgatgagaagatcagcaatgaggtgctgaagagcagccccagctatgccatgaggaggaagattgaggagatcaacaacggcctgcacaacgtggagaagatgctgcagcagaagagcaagaacatcgagaaggcccaggagatccagaagaagatgtgggatgagctggacctgtggcacagcaagctgaatgagctggacagcgaggtgcaggacatcgtggagcaggaccccggccaggcccaggagtggatggacaacctgatgatccccttccagcagtaccagcaggtgtcccagagagctgagtgcaggaccagccagctgaacaaggccaccgtgaagatggaggagtacagcgacctgctgaagagcacagaggcctggattgagaacaccagccacctgctggccaacccagctgactatgacagcctgcggaccctgagccaccacgccagcacagtgcaggacagcaagtgcttccgcagcggcccccggcccaacatctacgtgtcctactacgtgaccgtcatccagatggccctggaggacagcgagcagaagcacaacctgctgcacagcatcttcatggacctggaggacctgagcatcatctttgaaacagatgagctgacccagagcatccaggagctgagcaaccaggtgacagccctgcagcagaagatcatggagagcctgccccagatccagaggatggctgatgatgtggtggccatcgagagcgaggtgaagtccatggagaagagggtgtccaagatcaagaccatcctgctgagcaaggagatctttgacttcagccctgaggagcacctgaagcacggggaggtgatcctggagaacatccggcccatgaagaagaccatcgccgagatcgtgtcctaccaggtggagctgcggctgccccagacaggcatgaagcccctgcccgtcttccagaggaccaaccagctgctgcaggacatcaagctgctggagaatgtgacccaggagcagaatgagctgctgaaggtggtgatcaagcagaccaatgagtgggatgaggagattgagaacctgaagcagatcctgaacaactacagcgcccagttcagcctggagcacatgagcccagaccaggccgacaagctgccccagctgcagggcgagattgaaagaatggagaagcagatcctgagcctgaaccagaggaaagaagacctgctggtggacctgaaggccaccgtgctgaacctgcaccagcacctgaagcaggagcaggagggcgtggagcgggaccggctgcctgctgtgaccagcgaggagggcggcgtggccgagagagatgccagcgagaggaagctgaacagaagaggctccatgagctacctggccgctgtggaggaggaggtggaggagagctctgtgaagagtgacaatggagatgagaaggccgagcccagcccccagagctggagcagcctgtggaagcatgacaaggacatggaggaggaccgggccagcagcagcagcggcaccatcgtgcaggaggcctacggcaagatcagcaccagtgacaacagcatggcccagatcctgaccccagacagcctgaacacagagcagggccctgagtgcagcctgcggcccaaccagacagaggagggcaccaccccacccatcgaggccgacaccctggacagcagtgatgcccagggcggcctggagccccgggtggagaagaccaggcctgagcccacagaggtgctgcacgcctgcaagacccaggtggccgagctggagctgtggctgcagcaggccaacgtggccgtggagcctgagaccctgaatgctgacatgcagcaggtgctggagcagcagctggtgggctgccaggccatgctgacagaaattgagcacaaggtggccttcctgctggagacctgcaaggaccagggcctgggggacaacggggccacccagcatgaagctgaggccctgagcctgaagctgaagacagtgaagtgcaacctggagaaggtgcagatgatgctgcaggagaagcacagcgaggaccagcaccccaccatcctgaagaagagcagcgagcctgagcaccaggaggccctgcagcctgtgaacctgtctgagctggagagcatcgtgacagagcggccccagttcagccggcagaaggacttccagcagcagcaggtgctggagctgaagcccatggagcagaaggacttcatcaagttcatcgagttcaatgccaagaagatgtggccccagtactgccagcacgacaatgacaccacccaggagagcagcgccagcaaccaggccagcagcccagaaaatgatgtgcctgacagcatcctgagcccccagggccagaatggagacaagtggcagtacctgcaccacgagctgagcagcaagatcaagctgcccctgccccagctggtggagccccaggtgtccaccaacatgggcatcctgcccagcgtgaccatgtacaacttccgctaccccaccacagaggagctgaagacctacaccacccagctggaggacctgcggcaggaggccagcaacctgcagacccaggagaacatgacagaggaggcctacatcaacctggacaagaagctgtttgagctgttcctgaccctgagccagtgcctgagctctgtggaggagatgctggagatgccccggctgtaccgggaggatggcagcggccagcaggtgcactatgagaccctggccctggagctgaagaagctgtacctggccctgagtgacaagaagggggacctgctgaaggccatgacctggccaggagagaacaccaacctgctgctggagtgctttgacaacctgcaggtgtgcctggagcacacccaggccgctgctgtgtgccgcagcaagagcctgaaggccggcctggactacaacagaagctaccagaatgagatcaagaggctgtaccaccagctgatcaagagcaagaccagcctgcagcagagcctgaatgagatcagcggccagagcgtggccgagcagctgcagaaggcagatgcctacacagtggagctggagaatgctgagagccgggtggccaagctgagagatgaaggagagcggctgcacctgccctatgccctgctgcaggaggtgtacaagctggaggatgtgctggacagcatgtggggcatgctgcgggcccgctacacagagctgagcagcccctttgtgacagagagccagcaggatgccctgctgcagggcatggtggagctggtgaagattggcaaggagaagctggcccacggccacctgaagcagaccaagagcaaggtggccctgcaggcccagatcgagaaccacaaggtgttcttccagaagctggtggccgacatgctgctgatccaggcctacagcgccaagatcctgcccagcctgctgcagaaccgggagaccttctgggccgagcaggtgacagaggtgaagatcctggaggagaagagccggcagtgtggcatgaagctgcagagcctgctgcagaagtgggaggagtttgatgagaactatgccagcctggagaaggacctggagatcctgatcagcaccctgcccagcgtgtccctggtggaggagacagaggagcggctggtggagcgcatctccttctaccagcagatcaagagaaatattggaggcaagcacgcccggctgtaccagaccctgaatgaaggcaagcagctggtggcctctgtgtcctgcccagagctggagggccagatcgccaagctggaggagcagtggctgagcctgaacaagaagattgaccacgagctgcaccggctgcaggccctgctgaagcacctgctgagctacaacagagacagcgaccagctgaccaagtggctggagagcagccagcacaccctgaactactggaaggagcagagcctgaatgtgtcccaggacctggacaccatccgcagcaacatcaacaacttctttgagttcagcaaggaggtggatgagaagagcagcctgaagacagctgtgatcagcatcggcaaccagctgctgcacctgaaggagacagacacagccaccctgcgggccagcctggcccagtttgagcagaagtggaccatgctgatcacccagctgcctgacatccaggagaagctgcaccagctgcagatggagaagctgcccagcaggaaggccatcacagagatgatctcctggatgaacaacgtggagcaccagaccagtgatgaagattctgtgcacagccccagcagcgccagccaggtgaagcacctgctgcagaagcacaaggagttcaggatggagatggactacaagcagtggatcgtggactttgtgaaccagagcctgctgcagctgagcacctgtgatgtggagagcaagagatatgaaagaacagaatttgctgagcacctgggggagatgaaccggcagtggcaccgggtgcacggcatgctgaacaggaagatccagcacctggagcagctgctggagagcatcacagaaagtgagaacaagatccagatcctgaacaactggctggaggcccaggaggagcggctgaagaccctgcagaagccagagagcgtcatctctgtgcagaagctgctgctggactgccaggacatcgagaaccagctggccatcaagagcaaggccctggatgagctgaagcagagctacctgaccctggagagcggggctgtgcccctgctggaggacacagccagcagaattgatgagctgttccagaagaggagctctgtgctgacccaggtgaaccagctgaagacctccatgcagagcgtgctgcaggagtggaagatctatgaccagctgtatgatgaggtgaacatgatgaccatccgcttctggtactgcatggagcacagcaagcctgtggtgctgagcctggagaccctgcgctgccaggtggagaacctgcagagcctgcaggatgaggccgagagcagcgagggctcctgggagaagctgcaggaggtgattggcaagctgaagggcctgtgccccagcgtggccgagatcatcgaggagaagtgccagaacacccacaagcgctggacccaggtgaaccaggccatcgctgaccagctgcagaaggcccagagcctgctgcagctgtggaaggcctacagcaatgcccatggagaggccgccgcccggctgaagcagcaggaggccaagttccagcagctggccaacatctccatgagcggcaacaacctggccgagatcctgcccccagccctgcaggacatcaaggagctgcagcatgatgtgcagaagaccaaggaggccttcctgcagaacagctctgtgctggaccggctgccccagcctgctgagagcagcacccacatgctgctgcccggccccctgcacagcctgcagagagctgcctacctggagaagatgctgctggtgaaggccaatgaatttgaatttgtgctgagccagttcaaggactttggagtgcggctggagagcctgaagggcctcatcatgcatgaggaggagaacctggaccggctgcaccagcaggagaaggagaacccagacagcttcctgaaccacgtgctggccctgacagcccagagcccagacatcgagcacctgaatgaggtgtccctgaagctgcccctgagtgatgtggccgtgaagaccctgcagaacatgaaccggcagtggatccgggccacagccacagccctggagcgctgcagcgagctgcagggcatcggcctgaatgagaagttcctgtactgctgtgagaagtggatccagctgctggagaagattgaggaggccctgaaggtggatgtggccaacagcctgcctgagctgctggagcagcagaagacctacaagatgctggaggccgaggtgtccatcaaccagaccatcgctgacagctatgtgacccagagcctgcagctgctggacaccacagaaattgagaacagacctgagttcatcacagagttcagcaagctgacagaccgctggcagaatgctgtgcagggcgtgcggcagaggaaaggagatgtggatggcctggtgcggcagtggcaggacttcaccacctctgtggagaacctcttccgcttcctgacagacaccagccacctgctgtctgctgtgaagggccaggagcgcttcagcctgtaccagaccaggagcctcatccacgagctgaagaacaaggagatccacttccagaggaggaggaccacctgtgccctgaccctggaggccggggagaagctgctgctgaccacagacctgaagaccaaggagagcgtgggccgccgcatcagccagctgcaggacagctggaaggacatggagccccagctggccgagatgatcaagcagttccagagcacagtggagacctgggaccagtgtgagaagaagatcaaggagctgaagagccggctgcaggtgctgaaggcccagagcgaggaccccctgcctgagctgcacgaggacctgcacaatgagaaggagctgatcaaggagctggagcagagcctggcctcctggacccagaacctgaaggagctgcagaccatgaaggctgacctgaccaggcatgtgctggtggaggatgtgatggtgctgaaggagcagatcgagcacctgcaccggcagtgggaggacctgtgcctgcgggtggccatcaggaagcaggagattgaggaccggctgaacacctgggtggtgttcaatgagaagaacaaggagctgtgtgcctggctggtgcagatggagaacaaggtgctgcagacagctgacatcagcattgaggagatgattgagaagctgcagaaggactgcatggaggagatcaacctcttcagcgagaacaagctgcagctgaagcagatgggagaccagctgatcaaggccagcaacaagagcagagctgctgagattgatgacaagctgaacaagatcaatgaccgctggcagcacctgtttgatgtgattggcagccgggtgaagaagctgaaggagacctttgccttcatccagcagctggacaagaacatgagcaacctgcggacctggctggcccgcatcgagagcgagctgagcaagcctgtggtgtatgatgtgtgtgatgaccaggagatccagaagaggctggccgagcagcaggacctgcagagggacatcgagcagcacagcgctggggtggagagcgtcttcaacatctgtgatgtgctgctgcatgacagtgatgcctgtgccaatgaaacagaatgtgacagcatccagcagaccaccaggagcctggaccggcgctggaggaacatctgtgccatgtccatggagaggaggatgaagattgaggagacctggaggctgtggcagaagttcctggatgactacagcagatttgaggactggctgaagtctgctgagaggacagctgcctgccccaacagcagcgaggtgctgtacaccagcgccaaggaggagctgaagagatttgaggccttccagaggcagatccacgagcggctgacccagctggagctgatcaacaagcagtaccgccgcctggccagagaaaatagaacagacacagccagccggctgaagcagatggtgcatgagggcaaccagcgctgggacaacctgcagaggagagtgacagctgtgctgcggcggctgcggcacttcaccaaccagcgggaggagtttgagggcacccgggagagcatcctggtgtggctgacagagatggacctgcagctgaccaacgtggagcacttcagcgagagtgatgctgatgacaagatgaggcagctgaatggcttccagcaggagatcaccctgaacaccaacaagattgaccagctgattgtgtttggagagcagctgatccagaagtctgagcccctggatgctgtgctgattgaagatgagctggaggagctgcaccgctactgccaggaggtgtttggccgggtgagccgcttccaccggcggctgaccagctgcaccccaggcctggaggatgagaaggaggcctctgaaaatgaaacagacatggaggacccccgggagatccagacagacagctggaggaagagaggagagagcgaggagcccagcagcccccagagcctgtgccacctggtggcccctggccacgagaggagcggctgtgagacccctgtgtctgtggacagcatccccctggagtgggaccacactggagatgtgggcggcagcagcagccatgaggaggatgaggagggcccctactacagcgccctgagcggcaagagcatcagtgatggccacagctggcacgtgcctgacagccccagctgcccagagcaccactacaagcagatggagggggacagaaatgtgccccctgtgcccccagccagcagcaccccctacaagccaccctacggcaagctgctgctgcccccaggcacagatggcggcaaggagggcccccgggtgctgaatggaaacccccagcaggaggatggcggcctggccggcatcacagagcagcagagcggggcctttgaccgctgggagatgatccaggcccaggagctgcacaacaagctgaagatcaagcagaacctgcagcagctgaacagcgacatcagcgccatcaccacctggctgaagaagacagaagctgagctggagatgctgaagatggccaagcccccaagtgacatccaggagattgagctgcgggtgaagaggctgcaggagatcctgaaggcctttgacacctacaaggccctggtggtgtctgtgaatgtgagcagcaaggagttcctgcagacagagagccctgagagcacagagctgcagagccggctgcggcagctgagcctgctgtgggaggccgcccagggcgctgtggacagctggaggggcggcctgcggcagagcctgatgcagtgccaggacttccaccagctgagccagaacctgctgctgtggctggccagcgccaagaacagacggcagaaggcccacgtgacagaccccaaggctgacccccgggccctgctggagtgccggcgggagctgatgcagctggagaaggagctggtggagcggcagccccaggtggacatgctgcaggagatcagcaacagcctgctgatcaagggccacggggaggactgcattgaagctgaggagaaggtgcacgtgattgagaagaagctgaagcagctgcgggagcaggtgtcccaggacctgatggccctgcagggcacccagaacccagccagccccctgcccagctttgatgaggtggacagcggggaccagcccccagccacctctgtgcctgccccccgggccaagcagttccgggctgtgaggaccacagaaggagaggaggagacagagagccgggtgcccggcagcacccggccccagaggagcttcctgagccgggtggtgcgggccgccctgcccctgcagctgctgctgctgctgctgctgctgctggcctgcctgctgcccagcagcgaggaggactacagctgcacccaggccaacaactttgcccggagcttctaccccatgctgcgctacaccaatggacctccacccacctag

SEQ ID NO: 171280 - DNA, 20724 bp, synthetic construct
  misc_feature 1..20724: note = Description of Artificial Sequence: Synthetic coding sequence
  source 1..20724: mol_type = other DNA
atggccagcagccctgagctgcccacagaagatgagcagggctcctggggcattgatgacctgcacatcagcctgcaggccgagcaggaggacacccagaagaaggccttcacctgctggatcaacagccagctggcccggcacaccagccccagcgtcatcagtgacctcttcacagacatcaagaagggccacgtgctgctggacctgctggaggtgctgagcggccagcagctgccccgggacaagggcagcaacaccttccagtgccgcatcaacatcgagcacgccctgaccttcctgaggaacagaagcatcaagctgatcaacatccacgtgacagacatcattgatggcaaccccagcatcatcctgggcctcatctggaccatcatcctgcacttccacatcgagaagctggcccagaccctgagctgcaactacaaccagcccagcctggatgatgtgtctgtggtggacagcagccctgccagcagccccccagccaagaagtgcagcaaggtgcaggcccgctggcagatgtctgccaggaaggccctgctgctgtgggcccaggagcagtgtgccacctatgagagcgtgaatgtgacagacttcaagagctcctggagaaatggcatggccttcctggccatcatccacgccctgcggccagacctgattgacatgaagtctgtgaagcacaggagcaacaaggacaacctgcgggaggccttcagaattgctgagcaggagctgaagatcccccggctgctggagccagaagatgtggatgtggtggaccctgatgagaagagcatcatgacctacgtggcccagttcctgcagtacagcaaggatgcccctggcactggagaggaggcccagggcaaggtgaaggatgccatgggctggctgaccctgcagaaggagaagctgcagaagctgctgaaggacagtgaaaatgacacctacttcaagaagtacaacagcctgctgtccttcatggagagcttcaatgaggagaagaagagcttcctggatgtgctgagcatcaagagggacctggatgagctggacaaggaccacctgcagctgcgggaggcctgggatggcctggaccaccagatcaatgcctggaagatcaagctgaactatgccctgcccccacccctgcaccagacagaggcctggctgcaggaggtggaggagctgatggatgaggacctgagcgccagccaggaccacagccaggccgtgaccctcatccaggagaagatgaccctcttcaagagcctgatggacagatttgagcaccacagcaacatcctgctgacctttgagaacaaggatgagaaccacctgcccctggtgccccccaacaagctggaggagatgaagaggcgcatcaacaacatcctggagaagaagttcatcctgctgctggagttccactactacaagtgcctggtgctgggcctggtggatgaggtgaagagcaagctggacatctggaacatcaagtatggcagccgggagagcgtggagctgctgctggaggactggcacaagttcatcgaggagaaggagttcctggcccggctggacaccagcttccagaagtgtggggagatctacaagaacctggccggggagtgccagaacatcaacaagcagtacatgatggtgaagagtgatgtgtgcatgtacaggaagaacatctacaacgtgaagagcaccctgcagaaggtgctggcctgctgggccacctacgtggagaacctgcggctgctgcgggcctgctttgaggagaccaagaaggaggagatcaaggaggtgccctttgagaccctggcccagtggaacctggagcacgccaccctgaatgaagctggcaacttcctggtggaggtgtccaatgatgtggtgggcagcagcatcagcaaggagctgcggcggctgaacaagcgctggaggaagctggtgtccaagacccagctggagatgaacctgcccctgatgatcaagaagcaggaccagcccacctttgacaacagcggcaacatcctgagcaaggaggagaaggccaccgtggagttcagcacagacatgtctgtggagctgcctgagaactacaaccagaacatcaaggccggggagaagcatgagaaggaaaatgaggagttcaccggccagctgaaggtggccaaggatgtggagaagctgattggccaggtggagatctgggaggccgaggccaagtctgtgctggaccaggatgatgtggacacctccatggaggagagcctgaagcacctgattgccaagggctccatgtttgatgagctgatggcccggtctgaggacatgctgcagatggacatccagaacatcagcagccaggagagcttccagcacgtgctgaccaccggcctgcaggccaagatccaggaggccaaggagaaggtgcagatcaacgtggtgaagctgattgctgccctgaagaacctgacagatgtgtccccagacctggacatccggctgaagatggaggagagccagaaggagctggagagctacatgatgagggcccagcagctgctgggccagcgggagagccctggagagctgatcagcaagcacaaggaggccctgatcatcagcaacaccaagagcctggccaagtacctgaaggctgtggaggagctgaagaacaacgtgacagaggacatcaagatgagcctggaggagaagagcagagatgtgtgtgccaagtgggagagcctgcaccacgagctgagcctgtatgtgcagcagctgaagattgacatcgagaagggcaagctgagtgacaacatcctgaagctggagaagcagatcaacaaggagaagaagctgatccggcggggccgcaccaagggcctcatcaaggagcacgaggcctgcttcagcgaggagggctgcctgtaccagctgaaccaccacatggaggtgctgcgggagctgtgtgaggagctgcccagccagaagagccagcaggaggtgaagaggctgctgaaggactatgagcagaagattgaaaggctgctgaagtgtgccagcgagatccacatgaccctgcagcccacagctgggggcaccagcaagaatgaaggcaccatcaccaccagcgagaacagaggaggagacccccacagcgaggccccctttgccaagagtgacaaccagcccagcacagagaaggccatggagcccaccatgaagttcagcctggcctctgtgctgcggcccctgcaggaggagagcatcatggagaaggactacagcgccagcatcaacagcctgctggagagatatgacacctacagagacatcctggagcaccacctgcagaacaacaagttccgcatcaccagtgacttcagcagtgaagaagatagaagcagcagctgcctgcaggccaagctgacagacctgcaggtgatcaagaatgaaacagatgcccgctggaaggagtttgagatcatcagcctgaagctggagaaccacgtgaatgacatcaagaagccctttgtgatcaaggagcgggacaccctgaaggagcgggagcgggagctgcagatgaccctgaacaccaggatggagagcctggagacagccctgcggctggtgctgcctgtggagaaggccagcctgctgctgtgtggcagtgacctgcccctgcacaagatggccatccagggcttccacctgattgatgctgaccgcatctaccagcacctgaggaacatccaggacagcatcgccaagcagatcgagatctgcaaccggctggaggagcccggcaactttgtgctgaaggagctgcacccctttgacctgcacgccatgcagaacatcatcctgaagtacaagacccagtttgagggcatgaaccaccgggtgcagaggtctgaggacaccctgaaggccctggaggacttcctggccagcctgaggacagccaagctgtctgctgagcctgtgacagacctgagcgccagtgacacccaggtggcccaggagaacaccctgactgtgaagaacaaggagggggagatccacctgatgaaggacaaggccaagcacctggacaagtgcctgaagatgctggacatgtccttcaaggatgctgagagaggagatgacaccagctgtgagaacctgctggatgccttcagcatcaagctgtctgagacccacggctacggcgtgcaggaggagttcacagaggagaacaagctgctggaggcctgcatcttcaagaacaatgagctgctgaagaacatccaggatgtgcagagccagatcagcaagattggcctgaaggaccccaccgtgcctgctgtgaagcacaggaagaagagcctcatccggctggacaaggtgctggatgaatatgaggaggagaagaggcacctgcaggagatggccaacagcctgccccacttcaaggatggccgggagaagacagtgaaccagcagtgccagaacacagtggtgctgtgggagaacaccaaggccctggtgacagaatgtctggagcagtgtggccgggtgctggagctgctgaagcagtaccagaacttcaagagcatcctgaccaccctcatccagaaggaggagagcgtcatcagcctgcaggccagctacatgggcaaggagaacctgaagaagagaattgctgagattgaaattgtgaaggaggagttcaatgagcacctggaggtggtggacaagatcaaccaggtgtgcaagaacctgcagttctacctgaacaagatgaagacctttgaggagcccccatttgagaaggaggccaacatcatcgtggaccgctggctggacatcaatgagaagacagaggactactatgagaacctgggccgggccctggccctgtgggacaagctgttcaacctgaagaatgtgattgatgagtggacagagaaggccctgcagaagatggagctgcaccagctgacagaagaagatcgggagcggctgaaggaggagctgcaggtgcatgagcagaagaccagcgagttcagccggcgggtggccgagatccagttcctgctgcagagcagcgagatccccctggagctgcaggtgatggagagcagcatcctgaacaagatggagcacgtgcagaagtgcctgactggagagagcaactgccacgccctgagcggcagcacagctgagctgcgggaggacctggaccaggccaagacccagatcggcatgacagagagcctgctgaaggccctgagccccagcgacagcctggagatcttcaccaagctggaggagatccagcagcagatcctgcagcagaagcacagcatgatcctgctggagaaccagatcggctgcctgaccccagagctgtctgagctgaagaagcagtatgagagcgtgtctgacctcttcaacaccaagaagtctgtgctgcaggaccacttcagcaagctgctgaatgaccagtgcaagaacttcaatgactggttcagcaacatcaaggtgaacctgaaggagtgctttgagagcagcgagaccaagaagtctgtggagcagaagctgcagaagctgagtgacttcctgaccctggagggcaggaacagcaagatcaagcaggtggacagcgtgctgaagcacgtgaagaagcacctgcccaaggcccacgtgaaggagctgatctcctggctggtgggccaggagtttgagctggagaagatggagagcatctgccaggcccgggccaaggagctggaggacagcctgcagcagctgctgcggctgcaggatgaccacaggaacctgaggaagtggctgaccaaccaggaggagaagtggaagggcatggaggagcccggggagaagacagagctgttctgccaggccctggccaggaagcgggagcagtttgagagcgtggcccagctgaacaacagcctgaaggagtatggcttcacagaggaggaggagatcatcatggaggccacctgcctgatggaccgctaccagaccctgctgcggcagctgtctgaaattgaggaggaggacaagctgctgcccacagaggaccagagcttcaatgacctggcccatgatgtgatccactggatcaaggagatcaaggagagcctgatggtgctgaacagcagcgagggcaagatgcccctggaggagcgcatccagaagatcaaggagatcatcctgctgaagccagaaggagatgccagaattgagaccatcatgaagcaggccgagagcagcgaggcccccctggtgcagaagaccctgacagacatcagcaaccagtgggacaacaccctgcacctggccagcacctacctgagccaccaggagaagctgctgctggagggggagaagtacctgcagagcaaggaggacctgcggctgatgctgattgagctgaagaagaagcaggaggccggctttgccctgcagcacggcctgcaggagaagaaggcccagctgaagatctacaagaagttcctgaagaaggcccaggacctgaccagcctgctgaaggagctgaagagccagggcaactacctgctggagtgcaccaagaaccccagcttcagcgaggagccctggctggagatcaagcacctgcacgagagcctgctgcagcagctgcaggacagcgtgcagaacctggatggccacgtgcgggagcatgacagctaccaggtgtgtgtgacagacctgaacaccaccctggacaacttcagcaaggagtttgtgtccttcagtgacaagcctgtggaccagattgctgtggaggagaagctgcagaagctgcaggagctggagaaccggctgagcctgcaggacggcaccctgaagaagatcctggccctggccaagtctgtgaagcagaacaccagctctgtgggccagaagatcatcaaggatgacatcaagagcctgcagtgcaagcagaaggacctggagaaccggctggccagcgccaagcaggagatggagtgctgcctgaacagcatcctgaagagcaagaggagcacagagaagaagggcaagttcaccctgcccggccgggagaagcaggccaccagtgatgtgcaggagagcacccaggagagcgctgctgtggagaagctggaggaggactgggagatcaacaaggacagcgctgtggagatggccatgagcaagcagctgagcctgaatgcccaggagagcatgaagaacacagaagatgagaggaaggtgaatgagctgcagaaccagcccctggagctggacaccatgctgagaaatgagcagctggaggagattgagaagctgtacacccagctggaggccaagaaggccgccatcaagcccctggagcagacagaatgtctgaacaagacagagaccggggccctggtgctgcacaacatcggctacagcgcccagcacctggacaacctgctgcaggccctgatcaccctgaagaagaacaaggagagccagtactgtgtgctgcgggacttccaggagtacctggccgctgtggagagctccatgaaggccctgctgacagacaaggagagcctgaaggtgggccccctggacagcgtgacctacctggacaagatcaagaagttcatcgccagcattgagaaggagaaggacagcctgggcaacctgaagatcaagtgggagaacctgagcaaccacgtgacagacatggacaagaagctgctggagagccagatcaagcagctggagcacggctgggagcaggtggagcagcagatccagaagaagtacagccagcaggtggtggagtatgatgagttcaccaccctgatgaacaaggtgcaggacacagagatcagcctgcagcagcagcagcagcacctgcagctgcggctgaagagccctgaggagcgggccggcaaccagagcatgattgccctgaccacagacctgcaggccaccaagcacggcttctctgtgctgaagggccaggccgagctgcagatgaagaggatctggggcgagaaggagaagaagaacctggaggatggcatcaacaacctgaagaagcagtgggagaccctggagcccctgcacctggaggccgagaaccagatcaagaagtgtgacatccggaacaagatgaaggagaccatcctgtgggccaagaacctgctgggggagctgaaccccagcatccccctgctgcctgatgacatcctgagccagatcaggaagtgcaaggtgacccatgatggcatcctggcccggcagcagagcgtggagagcctggccgaggaggtgaaggacaaggtgcccagcctgaccacctatgagggcagtgacctgaacaacaccctggaggacctgaggaaccagtaccagatgctggtgctgaagagcacccagaggagccagcagctggagttcaagctggaggagaggagcaacttctttgccatcatcaggaagttccagctgatggtgcaggagagcgagaccctcatcatcccccgggtggagacagctgccacagaggccgagctgaagcaccaccacgtgaccctggaggccagccagaaggagctgcaggagattgattctggcatcagcacccacctgcaggagctgaccaacatctatgaggagctgaatgtgtttgagcggctcttcctggaggaccagctgaagaacctgaagatccgcaccaaccgcatccagcgcttcatccagaacacctgcaatgaggtggagcacaagatcaagttctgccggcagttccacgagaagaccagcgccctgcaggaggaggccgacagcatccagagaaatgagctgctgctgaaccaggaggtgaacaagggcgtgaaggaggagatctacaacctgaaggaccggctgacagccatcaagtgctgcatcctgcaggtgctgaagctgaagaaggtgtttgactacatcggcctgaactgggacttcagccagctggaccagctgcagacccaggtgtttgagaaggagaaggagctggaggagaagatcaagcagctggacacctttgaggaggagcacggcaagtaccaggccctgctgagcaagatgagggccatcgacctgcagatcaagaagatgacagaggtggtgctgaaggccccagacagcagccctgagagccggcggctgaatgcccagatcctgagccagagaattgagaaggccaagtgcctgtgtgatgagatcatcaagaagctgaatgaaaacaagacctttgatgacagcttcaaggagaaggagatcctgcagatcaagctgaatgcagaagaaaatgacaagctgtacaaggtgctgcagaacatggtgctggagctgagccccaaggagctggatgagaagaactgccaggacaagctggagaccagcctgcacgtgctgaaccagatcaagagccagctgcagcagcccctgctgatcaacctggagatcaagcacatccagaatgagaaggacaactgtgaggccttccaggagcaggtgtgggccgagatgtgcagcatcaaggctgtgacagccatcgagaagcagcgggaggagaacagcagcgaggccagtgatgtggagaccaagctgcgggagtttgaggacctgcagatgcagctgaacaccagcattgacctgcggaccaacgtgctgaatgatgcctatgagaacctgacccgctacaaggaggccgtgaccagggctgtggagagcatcaccagcctggaggccatcatcatcccctacagagtggatgtgggcaaccctgaggagagcctggagatgcccctgaggaagcaggaggagctggagagcacagtggcccacatccaggacctgacagagaagctgggcatgatcagcagccctgaggccaagctgcagctgcagtacaccctgcaggagctggtgtccaagaacagcgccatgaaggaggccttcaaggcccaggagacagaggccgagcgctacctggagaactacaagtgctacaggaagatggaggaggacatctacaccaacctgagcaagatggagaccgtgctgggccagagcatgagcagcctgcccctgagctaccgggaggccctggagcggctggagcagagcaaggccctggtgagcaacctgatcagcaccaaggaggagctgatgaagctgcggcagatcctgcggctgctgcggctgcgctgcacagaaaatgatggcatctgcctgctgaagatcgtgtctgccctgtgggagaagtggctgagcctgctggaggccgccaaggagtgggagatgtggtgtgaggagctgaagcaggagtggaagtttgtgtctgaggagattgaaagagaggccatcatcctggacaacctgcaggaggagctgcctgagatcagcaagaccaaggaggccgccaccacagaggagctgtctgagctgctggactgcctgtgccagtatggagaaaatgtggagaagcagcagctgctgctgaccctgctgctgcagaggatccgcagcatccagaatgtgcctgagagcagtggagctgtggagaccgtgcctgccttccaggagatcacctccatgaaggagcgctgcaacaagctgctgcagaaggtgcagaagaacaaggagctggtgcagacagagatccaggagcggcacagcttcaccaaggagatcatcgccctgaagaacttcttccagcagaccaccaccagcttccagaacatggccttccaggaccaccctgagaagtctgagcagtttgaggagctgcagagcatcctgaagaagggcaagctgacctttgagaacatcatggagaagctgcgcatcaagtacagcgagatgtacaccatcgtgcctgctgagattgagagccaggtggaggagtgcaggaaggccctggaggacattgatgagaagatcagcaatgaggtgctgaagagcagccccagctatgccatgaggaggaagattgaggagatcaacaacggcctgcacaacgtggagaagatgctgcagcagaagagcaagaacatcgagaaggcccaggagatccagaagaagatgtgggatgagctggacctgtggcacagcaagctgaatgagctggacagcgaggtgcaggacatcgtggagcaggaccccggccaggcccaggagtggatggacaacctgatgatccccttccagcagtaccagcaggtgtcccagagagctgagtgcaggaccagccagctgaacaaggccaccgtgaagatggaggagtacagcgacctgctgaagagcacagaggcctggattgagaacaccagccacctgctggccaacccagctgactatgacagcctgcggaccctgagccaccacgccagcacagtgcagatggccctggaggacagcgagcagaagcacaacctgctgcacagcatcttcatggacctggaggacctgagcatcatctttgaaacagatgagctgacccagagcatccaggagctgagcaaccaggtgacagccctgcagcagaagatcatggagagcctgccccagatccagaggatggctgatgatgtggtggccattgaaagtgaggtgaagtccatggagaagagggtgtccaagatcaagaccatcctgctgagcaaggagatctttgacttcagccctgaggagcacctgaagcatggagaggtgatcctggagaacatccggcccatgaagaagaccatcgccgagatcgtgtcctaccaggtggagctgcggctgccccagacaggcatgaagcccctgcctgtgttccagaggaccaaccagctgctgcaggacatcaagctgctggagaatgtgacccaggagcagaatgagctgctgaaggtggtgatcaagcagaccaatgagtgggatgaggagattgagaacctgaagcagatcctgaacaactacagcgcccagttcagcctggagcacatgagcccagaccaggccgacaagctgccccagctgcagggcgagattgaaagaatggagaagcagatcctgagcctgaaccagaggaaggaggacctgctggtggacctgaaggccaccgtgctgaacctgcaccagcacctgaagcaggagcaggagggcgtggagcgggaccggctgcctgctgtgaccagcgaggagggcggcgtggccgagagagatgccagcgagaggaagctgaacagaagaggctccatgagctacctggccgctgtggaggaggaggtggaggagagctctgtgaagagtgacaatggagatgagaaggccgagcccagcccccagagctggagcagcctgtggaagcatgacaaggacatggaggaggaccgggccagcagcagcagcggcaccatcgtgcaggaggcctacggcaagatcagcaccagtgacaacagcatggcccagatcctgaccccagacagcctgaacacagagcagggcccagaatgttccctgcggcccaaccagacagaggagggcaccaccccacccattgaagctgacaccctggacagcagtgatgcccagggcggcctggagccccgggtggagaagaccaggcctgagcccacagaggtgctgcacgcctgcaagacccaggtggccgagctggagctgtggctgcagcaggccaacgtggccgtggagcctgagaccctgaatgctgacatgcagcaggtgctggagcagcagctggtgggctgccaggccatgctgacagaaattgagcacaaggtggccttcctgctggagacctgcaaggaccagggcctgggggacaatggagccacccagcacgaggccgaggccctgagcctgaagctgaagacagtgaagtgcaacctggagaaggtgcagatgatgctgcaggagaagcacagcgaggaccagcaccccaccatcctgaagaagagcagcgagcctgagcaccaggaggccctgcagcctgtgaacctgtctgagctggagagcatcgtgacagagcggccccagttcagccggcagaaggacttccagcagcagcaggtgctggagctgaagcccatggagcagaaggacttcatcaagttcatcgagttcaatgccaagaagatgtggccccagtactgccagcacgacaatgacaccacccaggagagcagcgccagcaaccaggccagcagcccagaaaatgatgtgcctgacagcatcctgagcccccagggccagaatggagacaagtggcagtacctgcaccacgagctgagcagcaagatcaagctgcccctgccccagctggtggagccccaggtgtccaccaacatgggcatcctgcccagcgtgaccatgtacaacttccgctaccccaccacagaggagctgaagacctacaccacccagctggaggacctgcggcaggaggccagcaacctgcagacccaggagaacatgacagaggaggcctacatcaacctggacaagaagctgtttgagctgttcctgaccctgagccagtgcctgagctctgtggaggagatgctggagatgccccggctgtacagagaagatggcagcggccagcaggtgcactatgagaccctggccctggagctgaagaagctgtacctggccctgagtgacaagaagggggacctgctgaaggccatgacctggccaggagagaacaccaacctgctgctggagtgctttgacaacctgcaggtgtgcctggagcacacccaggccgctgctgtgtgccgcagcaagagcctgaaggccggcctggactacaacagaagctaccagaatgagatcaagaggctgtaccaccagctgatcaagagcaagaccagcctgcagcagagcctgaatgagatcagcggccagagcgtggccgagcagctgcagaaggcagatgcctacacagtggagctggagaatgctgagagccgggtggccaagctgagagatgaaggagagcggctgcacctgccctatgccctgctgcaggaggtgtacaagctggaggatgtgctggacagcatgtggggcatgctgcgggcccgctacacagagctgagcagcccctttgtgacagagagccagcaggatgccctgctgcagggcatggtggagctggtgaagattggcaaggagaagctggcccacggccacctgaagcagaccaagagcaaggtggccctgcaggcccagatcgagaaccacaaggtgttcttccagaagctggtggccgacatgctgctgatccaggcctacagcgccaagatcctgcccagcctgctgcagaaccgggagaccttctgggccgagcaggtgacagaggtgaagatcctggaggagaagagccggcagtgtggcatgaagctgcagagcctgctgcagaagtgggaggagtttgatgaaaattatgccagcctggagaaggacctggagatcctgatcagcaccctgcccagcgtgtccctggtggaggagacagaggagcggctggtggagcgcatctccttctaccagcagatcaagaggaacatcggcggcaagcacgcccggctgtaccagaccctgaatgaaggcaagcagctggtggcctctgtgtcctgcccagagctggagggccagatcgccaagctggaggagcagtggctgagcctgaacaagaagattgaccacgagctgcaccggctgcaggccctgctgaagcacctgctgagctacaacagagacagcgaccagctgaccaagtggctggagagcagccagcacaccctgaactactggaaggagcagagcctgaatgtgtcccaggacctggacaccatccgcagcaacatcaacaacttctttgagttcagcaaggaggtggatgagaagagcagcctgaagacagctgtgatcagcatcggcaaccagctgctgcacctgaaggagacagacacagccaccctgcgggccagcctggcccagtttgagcagaagtggaccatgctgatcacccagctgcctgacatccaggagaagctgcaccagctgcagatggagaagctgcccagcaggaaggccatcacagagatgatctcctggatgaacaacgtggagcaccagaccagtgatgaggacagcgtgcacagccccagcagcgccagccaggtgaagcacctgctgcagaagcacaaggagttcaggatggagatggactacaagcagtggatcgtggactttgtgaaccagagcctgctgcagctgagcacctgtgatgtggagagcaagagatatgaaagaacagaatttgctgagcacctgggggagatgaaccggcagtggcaccgggtgcacggcatgctgaacaggaagatccagcacctggagcagctgctggagagcatcacagaaagtgagaacaagatccagatcctgaacaactggctggaggcccaggaggagcggctgaagaccctgcagaagccagagagcgtcatctctgtgcagaagctgctgctggactgccaggacatcgagaaccagctggccatcaagagcaaggccctggatgagctgaagcagagctacctgaccctggagagcggggctgtgcccctgctggaggacacagccagcagaattgatgagctgttccagaagaggagctctgtgctgacccaggtgaaccagctgaagacctccatgcagagcgtgctgcaggagtggaagatctatgaccagctgtatgatgaggtgaacatgatgaccatccgcttctggtactgcatggagcacagcaagcctgtggtgctgagcctggagaccctgcgctgccaggtggagaacctgcagagcctgcaggatgaagctgagagcagcgagggctcctgggagaagctgcaggaggtgattggcaagctgaagggcctgtgccccagcgtggccgagatcatcgaggagaagtgccagaacacccacaagcgctggacccaggtgaaccaggccatcgctgaccagctgcagaaggcccagagcctgctgcagctgtggaaggcctacagcaatgcccacggggaggccgccgcccggctgaagcagcaggaggccaagttccagcagctggccaacatctccatgagcggcaacaacctggccgagatcctgcccccagccctgcaggacatcaaggagctgcagcatgatgtgcagaagaccaaggaggccttcctgcagaacagctctgtgctggaccggctgccccagcctgctgagagcagcacccacatgctgctgcccggccccctgcacagcctgcagagagctgcctacctggagaagatgctgctggtgaaggccaatgaatttgaatttgtgctgagccagttcaaggactttggagtgcggctggagagcctgaagggcctcatcatgcatgaggaggagaacctggaccggctgcaccagcaggagaaggaaaatccagacagcttcctgaaccacgtgctggccctgacagcccagagcccagacatcgagcacctgaatgaggtgtccctgaagctgcccctgagtgatgtggccgtgaagaccctgcagaacatgaaccggcagtggatccgggccacagccacagccctggagcgctgcagcgagctgcagggcatcggcctgaatgagaagttcctgtactgctgtgagaagtggatccagctgctggagaagattgaggaggccctgaaggtggatgtggccaacagcctgcctgagctgctggagcagcagaagacctacaagatgctggaggccgaggtgtccatcaaccagaccatcgctgacagctatgtgacccagagcctgcagctgctggacaccacagaaattgaaaatagacctgagttcatcacagagttcagcaagctgacagaccgctggcagaatgctgtgcagggcgtgcggcagaggaaaggagatgtggatggcctggtgcggcagtggcaggacttcaccacctctgtggagaacctcttccgcttcctgacagacaccagccacctgctgtctgctgtgaagggccaggagcgcttcagcctgtaccagaccaggagcctcatccacgagctgaagaacaaggagatccacttccagaggaggaggaccacctgtgccctgaccctggaggccggggagaagctgctgctgaccacagacctgaagaccaaggagagcgtgggccgccgcatcagccagctgcaggacagctggaaggacatggagccccagctggccgagatgatcaagcagttccagagcacagtggagacctgggaccagtgtgagaagaagatcaaggagctgaagagccggctgcaggtgctgaaggcccagagcgaggaccccctgcctgagctgcacgaggacctgcacaatgagaaggagctgatcaaggagctggagcagagcctggcctcctggacccagaacctgaaggagctgcagaccatgaaggctgacctgaccaggcatgtgctggtggaggatgtgatggtgctgaaggagcagatcgagcacctgcaccggcagtgggaggacctgtgcctgcgggtggccatcaggaagcaggagattgaagatcggctgaacacctgggtggtgttcaatgagaagaacaaggagctgtgtgcctggctggtgcagatggagaacaaggtgctgcagacagctgacatcagcattgaggagatgattgagaagctgcagaaggactgcatggaggagatcaacctcttcagcgagaacaagctgcagctgaagcagatgggagaccagctgatcaaggccagcaacaagagcagagctgctgagattgatgacaagctgaacaagatcaatgaccgctggcagcacctgtttgatgtgattggcagccgggtgaagaagctgaaggagacctttgccttcatccagcagctggacaagaacatgagcaacctgcggacctggctggccagaattgaaagtgagctgagcaagcctgtggtgtatgatgtgtgtgatgaccaggagatccagaagaggctggccgagcagcaggacctgcagagggacatcgagcagcacagcgctggggtggagagcgtcttcaacatctgtgatgtgctgctgcatgacagtgatgcctgtgccaatgaaacagaatgtgacagcatccagcagaccaccaggagcctggaccggcgctggaggaacatctgtgccatgtccatggagaggaggatgaagattgaggagacctggaggctgtggcagaagttcctggatgactacagcagatttgaggactggctgaagtctgctgagaggacagctgcctgccccaacagcagcgaggtgctgtacaccagcgccaaggaggagctgaagagatttgaggccttccagaggcagatccacgagcggctgacccagctggagctgatcaacaagcagtacagaaggctggcccgggagaacagaacagacacagccagccggctgaagcagatggtgcatgagggcaaccagcgctgggacaacctgcagaggagagtgacagctgtgctgcggcggctgcggcacttcaccaaccagcgggaggagtttgagggcacccgggagagcatcctggtgtggctgacagagatggacctgcagctgaccaacgtggagcacttcagcgagagtgatgctgatgacaagatgaggcagctgaatggcttccagcaggagatcaccctgaacaccaacaagattgaccagctgattgtgtttggagagcagctgatccagaagtctgagcccctggatgctgtgctgattgaagatgagctggaggagctgcaccgctactgccaggaggtgtttggccgggtgagccgcttccaccggcggctgaccagctgcaccccaggcctggaggatgagaaggaggcctctgaaaatgaaacagacatggaggacccccgggagatccagacagacagctggaggaagagaggagagagcgaggagcccagcagcccccagagcctgtgccacctggtggcccctggccacgagaggagcggctgtgagacccctgtgtctgtggacagcatccccctggagtgggaccacactggagatgtgggcggcagcagcagccatgaagaagatgaggagggcccctactacagcgccctgagtgatgtggagatccctgagaaccctgaggcctacctgaagatgaccaccaagaccctgaaggccagcagcggcaagagcatcagtgatggccacagctggcacgtgcctgacagccccagctgcccagagcaccactacaagcagatggagggggacagaaatgtgccccctgtgcccccagccagcagcaccccctacaagccaccctacggcaagctgctgctgcccccaggcacagatggcggcaaggagggcccccgggtgctgaatggaaacccccagcaggaggatggcggcctggccggcatcacagagcagcagagcggggcctttgaccgctgggagatgatccaggcccaggagctgcacaacaagctgaagatcaagcagaacctgcagcagctgaacagcgacatcagcgccatcaccacctggctgaagaagacagaagctgagctggagatgctgaagatggccaagcccccaagtgacatccaggagattgagctgcgggtgaagaggctgcaggagatcctgaaggcctttgacacctacaaggccctggtggtgtctgtgaatgtgagcagcaaggagttcctgcagacagagagccctgagagcacagagctgcagagccggctgcggcagctgagcctgctgtgggaggccgcccagggcgctgtggacagctggaggggcggcctgcggcagagcctgatgcagtgccaggacttccaccagctgagccagaacctgctgctgtggctggccagcgccaagaacagacggcagaaggcccacgtgacagaccccaaggctgacccccgggccctgctggagtgccggcgggagctgatgcagctggagaaggagctggtggagcggcagccccaggtggacatgctgcaggagatcagcaacagcctgctgatcaagggccacggggaggactgcattgaagctgaggagaaggtgcacgtgattgagaagaagctgaagcagctgcgggagcaggtgtcccaggacctgatggccctgcagggcacccagaacccagccagccccctgcccagctttgatgaggtggacagcggggaccagcccccagccacctctgtgcctgccccccgggccaagttccgggctgtgaggaccacagaaggagaggaggagacagagagccgggtgcccggcagcacccggccccagaggagcttcctgagccgggtggtgcgggccgccctgcccctgcagctgctgctgctgctgctgctgctgctggcctgcctgctgcccagcagcgaggaggactacagctgcacccaggccaacaactttgcccgctccttctaccccatgctgcgctacaccaacggccccccacccacctag

SEQ ID NO: 171281 - DNA, 9813 bp, synthetic construct; identical to SEQ ID NO: 171279
  misc_feature 1..9813: note = Description of Artificial Sequence: Synthetic coding sequence
  source 1..9813: mol_type = other DNA

SEQ ID NO: 171282 - DNA, 1290 bp, synthetic construct
  misc_feature 1..1290: note = Description of Artificial Sequence: Synthetic coding sequence
  source 1..1290: mol_type = other DNA
atggagggggacagaaatgtgccccctgtgcccccagccagcagcaccccctacaagccaccctacggcaagctgctgctgcccccaggcacagatggcggcaaggagggcccccgggtgctgaatggaaacccccagcaggaggatggcggcctggccggcatcacagagcagcagagcggggcctttgaccgctgggagatgatccaggcccaggagctgcacaacaagctgaagatcaagcagaacctgcagcagctgaacagcgacatcagcgccatcaccacctggctgaagaagacagaagctgagctggagatgctgaagatggccaagcccccaagtgacatccaggagattgagctgcgggtgaagaggctgcaggagatcctgaaggcctttgacacctacaaggccctggtggtgtctgtgaatgtgagcagcaaggagttcctgcagacagagagccctgagagcacagagctgcagagccggctgcggcagctgagcctgctgtgggaggccgcccagggcgctgtggacagctggaggggcggcctgcggcagagcctgatgcagtgccagggcagcaagacccggcccaggagtgatgtgctcttcttcaaggacttccaccagctgagccagaacctgctgctgtggctggccagcgccaagaacagacggcagaaggcccacgtgacagaccccaaggctgacccccgggccctgctggagtgccggcgggagctgatgcagctggagaaggagctggtggagcggcagccccaggtggacatgctgcaggagatcagcaacagcctgctgatcaagggccacggggaggactgcattgaagctgaggagaaggtgcacgtgattgagaagaagctgaagcagctgcgggagcaggtgtcccaggacctgatggccctgcagggcacccagaacccagccagccccctgcccagctttgatgaggtggacagcggggaccagcccccagccacctctgtgcctgccccccgggccaagttccgggctgtgaggaccacagaaggagaggaggagacagagagccgggtgcccggcagcacccggccccagaggagcttcctgagccgggtggtgcgggccgccctgcccctgcagctgctgctgctgctgctgctgctgctggcctgcctgctgcccagcagcgaggaggactacagctgcacccaggccaacaactttgcccgctccttctaccccatgctgcgctacaccaacggccccccacccacctag

SEQ ID NO: 171283 - DNA, 1671 bp, synthetic construct
  misc_feature 1..1671: note = Description of Artificial Sequence: Synthetic coding sequence
  source 1..1671: mol_type = other DNA
atggaggacccccgggagatccagacagacagctggaggaagagaggagagagcgaggagcccagcagcccccagagcctgtgccacctggtggcccctggccacgagaggagcggctgtgagacccctgtgtctgtggacagcatccccctggagtgggaccacactggagatgtgggcggcagcagcagccatgaagaagatgaggagggcccctactacagcgccctgagtgatgtggagatccctgagaaccctgaggcctacctgaagatgaccaccaagaccctgaaggccagcagcggcaagagcatcagtgatggccacagctggcacgtgcctgacagccccagctgcccagagcaccactacaagcagatggagggggacagaaatgtgccccctgtgcccccagccagcagcaccccctacaagccaccctacggcaagctgctgctgcccccaggcacagatggcggcaaggagggcccccgggtgctgaatggaaacccccagcaggaggatggcggcctggccggcatcacagagcagcagagcggggcctttgaccgctgggagatgatccaggcccaggagctgcacaacaagctgaagatcaagcagaacctgcagcagctgaacagcgacatcagcgccatcaccacctggctgaagaagacagaagctgagctggagatgctgaagatggccaagcccccaagtgacatccaggagattgagctgcgggtgaagaggctgcaggagatcctgaaggcctttgacacctacaaggccctggtggtgtctgtgaatgtgagcagcaaggagttcctgcagacagagagccctgagagcacagagctgcagagccggctgcggcagctgagcctgctgtgggaggccgcccagggcgctgtggacagctggaggggcggcctgcggcagagcctgatgcagtgccagggcagcaagacccggcccaggagtgatgtgctcttcttcaaggacttccaccagctgagccagaacctgctgctgtggctggccagcgccaagaacagacggcagaaggcccacgtgacagaccccaaggctgacccccgggccctgctggagtgccggcgggagctgatgcagctggagaaggagctggtggagcggcagccccaggtggacatgctgcaggagatcagcaacagcctgctgatcaagggccacggggaggactgcattgaagctgaggagaaggtgcacgtgattgagaagaagctgaagcagctgcgggagcaggtgtcccaggacctgatggccctgcagggcacccagaacccagccagccccctgcccagctttgatgaggtggacagcggggaccagcccccagccacctctgtgcctgccccccgggccaagcagttccgggctgtgaggaccacagaaggagaggaggagacagagagccgggtgcccggcagcacccggccccagaggagcttcctgagccgggtggtgcgggccgccctgcccctgcagctgctgctgctgctgctgctgctgctggcctgcctgctgcccagcagcgaggaggactacagctgcacccaggccaacaactttgcccggagcttctaccccatgctgcgctacaccaatggacctccacccacctag

SEQ ID NO: 171284 - DNA, 2007 bp, synthetic construct
  misc_feature 1..2007: note = Description of Artificial Sequence: Synthetic coding sequence
  source 1..2007: mol_type = other DNA
atggtgcatgagggcaaccagcgctgggacaacctgcagaggagagtgacagctgtgctgcggcggctgcggcacttcaccaaccagcgggaggagtttgagggcacccgggagagcatcctggtgtggctgacagagatggacctgcagctgaccaacgtggagcacttcagcgagagtgatgctgatgacaagatgaggcagctgaatggcttccagcaggagatcaccctgaacaccaacaagattgaccagctgattgtgtttggagagcagctgatccagaagtctgagcccctggatgctgtgctgattgaagatgagctggaggagctgcaccgctactgccaggaggtgtttggccgggtgagccgcttccaccggcggctgaccagctgcaccccaggcctggaggatgagaaggaggcctctgaaaatgaaacagacatggaggacccccgggagatccagacagacagctggaggaagagaggagagagcgaggagcccagcagcccccagagcctgtgccacctggtggcccctggccacgagaggagcggctgtgagacccctgtgtctgtggacagcatccccctggagtgggaccacactggagatgtgggcggcagcagcagccatgaggaggatgaggagggcccctactacagcgccctgagcggcaagagcatcagtgatggccacagctggcacgtgcctgacagccccagctgcccagagcaccactacaagcagatggagggggacagaaatgtgccccctgtgcccccagccagcagcaccccctacaagccaccctacggcaagctgctgctgcccccaggcacagatggcggcaaggagggcccccgggtgctgaatggaaacccccagcaggaggatggcggcctggccggcatcacagagcagcagagcggggcctttgaccgctgggagatgatccaggcccaggagctgcacaacaagctgaagatcaagcagaacctgcagcagctgaacagcgacatcagcgccatcaccacctggctgaagaagacagaagctgagctggagatgctgaagatggccaagcccccaagtgacatccaggagattgagctgcgggtgaagaggctgcaggagatcctgaaggcctttgacacctacaaggccctggtggtgtctgtgaatgtgagcagcaaggagttcctgcagacagagagccctgagagcacagagctgcagagccggctgcggcagctgagcctgctgtgggaggccgcccagggcgctgtggacagctggaggggcggcctgcggcagagcctgatgcagtgccaggacttccaccagctgagccagaacctgctgctgtggctggccagcgccaagaacagacggcagaaggcccacgtgacagaccccaaggctgacccccgggccctgctggagtgccggcgggagctgatgcagctggagaaggagctggtggagcggcagccccaggtggacatgctgcaggagatcagcaacagcctgctgatcaagggccacggggaggactgcattgaagctgaggagaaggtgcacgtgattgagaagaagctgaagcagctgcgggagcaggtgtcccaggacctgatggccctgcagggcacccagaacccagccagccccctgcccagctttgatgaggtggacagcggggaccagcccccagccacctctgtgcctgccccccgggccaagcagttccgggctgtgaggaccacagaaggagaggaggagacagagagccgggtgcccggcagcacccggccccagaggagcttcctgagccgggtggtgcgggccgccctgcccctgcagctgctgctgctgctgctgctgctgctggcctgcctgctgcccagcagcgaggaggactacagctgcacccaggccaacaactttgcccggagcttctaccccatgctgcgctacaccaatggacctccacccacctag

SEQ ID NO: 171285 - DNA, 10626 bp, synthetic construct
  misc_feature 1..10626: note = Description of Artificial Sequence: Synthetic coding sequence
  source 1..10626: mol_type = other DNA
atggaggaggacatctacaccaacctgagcaagatggagaccgtgctgggccagagcatgagcagcctgcccctgagctaccgggaggccctggagcggctggagcagagcaaggccctggtgagcaacctgatcagcaccaaggaggagctgatgaagctgcggcagatcctgcggctgctgcggctgcgctgcacagaaaatgatggcatctgcctgctgaagatcgtgtctgccctgtgggagaagtggctgagcctgctggaggccgccaaggagtgggagatgtggtgtgaggagctgaagcaggagtggaagtttgtgtctgaggagattgaaagagaggccatcatcctggacaacctgcaggaggagctgcctgagatcagcaagaccaaggaggccgccaccacagaggagctgtctgagctgctggactgcctgtgccagtatggagaaaatgtggagaagcagcagctgctgctgaccctgctgctgcagaggatccgcagcatccagaatgtgcctgagagcagtggagctgtggagaccgtgcctgccttccaggagatcacctccatgaaggagcgctgcaacaagctgctgcagaaggtgcagaagaacaaggagctggtgcagacagagatccaggagcggcacagcttcaccaaggagatcatcgccctgaagaacttcttccagcagaccaccaccagcttccagaacatggccttccaggaccaccctgagaagtctgagcagtttgaggagctgcagagcatcctgaagaagggcaagctgacctttgagaacatcatggagaagctgcgcatcaagtacagcgagatgtacaccatcgtgcctgctgagattgagagccaggtggaggagtgcaggaaggccctggaggacattgatgagaagatcagcaatgaggtgctgaagagcagccccagctatgccatgaggaggaagattgaggagatcaacaacggcctgcacaacgtggagaagatgctgcagcagaagagcaagaacatcgagaaggcccaggagatccagaagaagatgtgggatgagctggacctgtggcacagcaagctgaatgagctggacagcgaggtgcaggacatcgtggagcaggaccccggccaggcccaggagtggatggacaacctgatgatccccttccagcagtaccagcaggtgtcccagagagctgagtgcaggaccagccagctgaacaaggccaccgtgaagatggaggagtacagcgacctgctgaagagcacagaggcctggattgagaacaccagccacctgctggccaacccagctgactatgacagcctgcggaccctgagccaccacgccagcacagtgcagatggccctggaggacagcgagcagaagcacaacctgctgcacagcatcttcatggacctggaggacctgagcatcatctttgaaacagatgagctgacccagagcatccaggagctgagcaaccaggtgacagccctgcagcagaagatcatggagagcctgccccagatccagaggatggctgatgatgtggtggccattgaaagtgaggtgaagtccatggagaagagggtgtccaagatcaagaccatcctgctgagcaaggagatctttgacttcagccctgaggagcacctgaagcatggagaggtgatcctggagaacatccggcccatgaagaagaccatcgccgagatcgtgtcctaccaggtggagctgcggctgccccagacaggcatgaagcccctgcctgtgttccagaggaccaaccagctgctgcaggacatcaagctgctggagaatgtgacccaggagcagaatgagctgctgaaggtggtgatcaagcagaccaatgagtgggatgaggagattgagaacctgaagcagatcctgaacaactacagcgcccagttcagcctggagcacatgagcccagaccaggccgacaagctgccccagctgcagggcgagattgaaagaatggagaagcagatcctgagcctgaaccagaggaaggaggacctgctggtggacctgaaggccaccgtgctgaacctgcaccagcacctgaagcaggagcaggagggcgtggagcgggaccggctgcctgctgtgaccagcgaggagggcggcgtggccgagagagatgccagcgagaggaagctgaacagaagaggctccatgagctacctggccgctgtggaggaggaggtggaggagagctctgtgaagagtgacaatggagatgagaaggccgagcccagcccccagagctggagcagcctgtggaagcatgacaaggacatggaggaggaccgggccagcagcagcagcggcaccatcgtgcaggaggcctacggcaagatcagcaccagtgacaacagcatggcccagatcctgaccccagacagcctgaacacagagcagggcccagaatgttccctgcggcccaaccagacagaggagggcaccaccccacccattgaagctgacaccctggacagcagtgatgcccagggcggcctggagccccgggtggagaagaccaggcctgagcccacagaggtgctgcacgcctgcaagacccaggtggccgagctggagctgtggctgcagcaggccaacgtggccgtggagcctgagaccctgaatgctgacatgcagcaggtgctggagcagcagctggtgggctgccaggccatgctgacagaaattgagcacaaggtggccttcctgctggagacctgcaaggaccagggcctgggggacaatggagccacccagcacgaggccgaggccctgagcctgaagctgaagacagtgaagtgcaacctggagaaggtgcagatgatgctgcaggagaagcacagcgaggaccagcaccccaccatcctgaagaagagcagcgagcctgagcaccaggaggccctgcagcctgtgaacctgtctgagctggagagcatcgtgacagagcggccccagttcagccggcagaaggacttccagcagcagcaggtgctggagctgaagcccatggagcagaaggacttcatcaagttcatcgagttcaatgccaagaagatgtggccccagtactgccagcacgacaatgacaccacccaggagagcagcgccagcaaccaggccagcagcccagaaaatgatgtgcctgacagcatcctgagcccccagggccagaatggagacaagtggcagtacctgcaccacgagctgagcagcaagatcaagctgcccctgccccagctggtggagccccaggtgtccaccaacatgggcatcctgcccagcgtgaccatgtacaacttccgctaccccaccacagaggagctgaagacctacaccacccagctggaggacctgcggcaggaggccagcaacctgcagacccaggagaacatgacagaggaggcctacatcaacctggacaagaagctgtttgagctgttcctgaccctgagccagtgcctgagctctgtggaggagatgctggagatgccccggctgtacagagaagatggcagcggccagcaggtgcactatgagaccctggccctggagctgaagaagctgtacctggccctgagtgacaagaagggggacctgctgaaggccatgacctggccaggagagaacaccaacctgctgctggagtgctttgacaacctgcaggtgtgcctggagcacacccaggccgctgctgtgtgccgcagcaagagcctgaaggccggcctggactacaacagaagctaccagaatgagatcaagaggctgtaccaccagctgatcaagagcaagaccagcctgcagcagagcctgaatgagatcagcggccagagcgtggccgagcagctgcagaaggcagatgcctacacagtggagctggagaatgctgagagccgggtggccaagctgagagatgaaggagagcggctgcacctgccctatgccctgctgcaggaggtgtacaagctggaggatgtgctggacagcatgtggggcatgctgcgggcccgctacacagagctgagcagcccctttgtgacagagagccagcaggatgccctgctgcagggcatggtggagctggtgaagattggcaaggagaagctggcccacggccacctgaagcagaccaagagcaaggtggccctgcaggcccagatcgagaaccacaaggtgttcttccagaagctggtggccgacatgctgctgatccaggcctacagcgccaagatcctgcccagcctgctgcagaaccgggagaccttctgggccgagcaggtgacagaggtgaagatcctggaggagaagagccggcagtgtggcatgaagctgcagagcctgctgcagaagtgggaggagtttgatgaaaattatgccagcctggagaaggacctggagatcctgatcagcaccctgcccagcgtgtccctggtggaggagacagaggagcggctggtggagcgcatctccttctaccagcagatcaagaggaacatcggcggcaagcacgcccggctgtaccagaccctgaatgaaggcaagcagctggtggcctctgtgtcctgcccagagctggagggccagatcgccaagctggaggagcagtggctgagcctgaacaagaagattgaccacgagctgcaccggctgcaggccctgctgaagcacctgctgagctacaacagagacagcgaccagctgaccaagtggctggagagcagccagcacaccctgaactactggaaggagcagagcctgaatgtgtcccaggacctggacaccatccgcagcaacatcaacaacttctttgagttcagcaaggaggtggatgagaagagcagcctgaagacagctgtgatcagcatcggcaaccagctgctgcacctgaaggagacagacacagccaccctgcgggccagcctggcccagtttgagcagaagtggaccatgctgatcacccagctgcctgacatccaggagaagctgcaccagctgcagatggagaagctgcccagcaggaaggccatcacagagatgatctcctggatgaacaacgtggagcaccagaccagtgatgaggacagcgtgcacagccccagcagcgccagccaggtgaagcacctgctgcagaagcacaaggagttcaggatggagatggactacaagcagtggatcgtggactttgtgaaccagagcctgctgcagctgagcacctgtgatgtggagagcaagagatatgaaagaacagaatttgctgagcacctgggggagatgaaccggcagtggcaccgggtgcacggcatgctgaacaggaagatccagcacctggagcagctgctggagagcatcacagaaagtgagaacaagatccagatcctgaacaactggctggaggcccaggaggagcggctgaagaccctgcagaagccagagagcgtcatctctgtgcagaagctgctgctggactgccaggacatcgagaaccagctggccatcaagagcaaggccctggatgagctgaagcagagctacctgaccctggagagcggggctgtgcccctgctggaggacacagccagcagaattgatgagctgttccagaagaggagctctgtgctgacccaggtgaaccagctgaagacctccatgcagagcgtgctgcaggagtggaagatctatgaccagctgtatgatgaggtgaacatgatgaccatccgcttctggtactgcatggagcacagcaagcctgtggtgctgagcctggagaccctgcgctgccaggtggagaacctgcagagcctgcaggatgaagctgagagcagcgagggctcctgggagaagctgcaggaggtgattggcaagctgaagggcctgtgccccagcgtggccgagatcatcgaggagaagtgccagaacacccacaagcgctggacccaggtgaaccaggccatcgctgaccagctgcagaaggcccagagcctgctgcagctgtggaaggcctacagcaatgcccacggggaggccgccgcccggctgaagcagcaggaggccaagttccagcagctggccaacatctccatgagcggcaacaacctggccgagatcctgcccccagccctgcaggacatcaaggagctgcagcatgatgtgcagaagaccaaggaggccttcctgcagaacagctctgtgctggaccggctgccccagcctgctgagagcagcacccacatgctgctgcccggccccctgcacagcctgcagagagctgcctacctggagaagatgctgctggtgaaggccaatgaatttgaatttgtgctgagccagttcaaggactttggagtgcggctggagagcctgaagggcctcatcatgcatgaggaggagaacctggaccggctgcaccagcaggagaaggaaaatccagacagcttcctgaaccacgtgctggccctgacagcccagagcccagacatcgagcacctgaatgaggtgtccctgaagctgcccctgagtgatgtggccgtgaagaccctgcagaacatgaaccggcagtggatccgggccacagccacagccctggagcgctgcagcgagctgcagggcatcggcctgaatgagaagttcctgtactgctgtgagaagtggatccagctgctggagaagattgaggaggccctgaaggtggatgtggccaacagcctgcctgagctgctggagcagcagaagacctacaagatgctggaggccgaggtgtccatcaaccagaccatcgctgacagctatgtgacccagagcctgcagctgctggacaccacagaaattgaaaatagacctgagttcatcacagagttcagcaagctgacagaccgctggcagaatgctgtgcagggcgtgcggcagaggaaaggagatgtggatggcctggtgcggcagtggcaggacttcaccacctctgtggagaacctcttccgcttcctgacagacaccagccacctgctgtctgctgtgaagggccaggagcgcttcagcctgtaccagaccaggagcctcatccacgagctgaagaacaaggagatccacttccagaggaggaggaccacctgtgccctgaccctggaggccggggagaagctgctgctgaccacagacctgaagaccaaggagagcgtgggccgccgcatcagccagctgcaggacagctggaaggacatggagccccagctggccgagatgatcaagcagttccagagcacagtggagacctgggaccagtgtgagaagaagatcaaggagctgaagagccggctgcaggtgctgaaggcccagagcgaggaccccctgcctgagctgcacgaggacctgcacaatgagaaggagctgatcaaggagctggagcagagcctggcctcctggacccagaacctgaaggagctgcagaccatgaaggctgacctgaccaggcatgtgctggtggaggatgtgatggtgctgaaggagcagatcgagcacctgcaccggcagtgggaggacctgtgcctgcgggtggccatcaggaagcaggagattgaagatcggctgaacacctgggtggtgttcaatgagaagaacaaggagctgtgtgcctggctggtgcagatggagaacaaggtgctgcagacagctgacatcagcattgaggagatgattgagaagctgcagaaggactgcatggaggagatcaacctcttcagcgagaacaagctgcagctgaagcagatgggagaccagctgatcaaggccagcaacaagagcagagctgctgagattgatgacaagctgaacaagatcaatgaccgctggcagcacctgtttgatgtgattggcagccgggtgaagaagctgaaggagacctttgccttcatccagcagctggacaagaacatgagcaacctgcggacctggctggccagaattgaaagtgagctgagcaagcctgtggtgtatgatgtgtgtgatgaccaggagatccagaagaggctggccgagcagcaggacctgcagagggacatcgagcagcacagcgctggggtggagagcgtcttcaacatctgtgatgtgctgctgcatgacagtgatgcctgtgccaatgaaacagaatgtgacagcatccagcagaccaccaggagcctggaccggcgctggaggaacatctgtgccatgtccatggagaggaggatgaagattgaggagacctggaggctgtggcagaagttcctggatgactacagcagatttgaggactggctgaagtctgctgagaggacagctgcctgccccaacagcagcgaggtgctgtacaccagcgccaaggaggagctgaagagatttgaggccttccagaggcagatccacgagcggctgacccagctggagctgatcaacaagcagtacagaaggctggcccgggagaacagaacagacacagccagccggctgaagcagatggtgcatgagggcaaccagcgctgggacaacctgcagaggagagtgacagctgtgctgcggcggctgcggcacttcaccaaccagcgggaggagtttgagggcacccgggagagcatcctggtgtggctgacagagatggacctgcagctgaccaacgtggagcacttcagcgagagtgatgctgatgacaagatgaggcagctgaatggcttccagcaggagatcaccctgaacaccaacaagattgaccagctgattgtgtttggagagcagctgatccagaagtctgagcccctggatgctgtgctgattgaagatgagctggaggagctgcaccgctactgccaggaggtgtttggccgggtgagccgcttccaccggcggctgaccagctgcaccccaggcctggaggatgagaaggaggcctctgaaaatgaaacagacatggaggacccccgggagatccagacagacagctggaggaagagaggagagagcgaggagcccagcagcccccagagcctgtgccacctggtggcccctggccacgagaggagcggctgtgagacccctgtgtctgtggacagcatccccctggagtgggaccacactggagatgtgggcggcagcagcagccatgaagaagatgaggagggcccctactacagcgccctgagtgatgtggagatccctgagaaccctgaggcctacctgaagatgaccaccaagaccctgaaggccagcagcggcaagagcatcagtgatggccacagctggcacgtgcctgacagccccagctgcccagagcaccactacaagcagatggagggggacagaaatgtgccccctgtgcccccagccagcagcaccccctacaagccaccctacggcaagctgctgctgcccccaggcacagatggcggcaaggagggcccccgggtgctgaatggaaacccccagcaggaggatggcggcctggccggcatcacagagcagcagagcggggcctttgaccgctgggagatgatccaggcccaggagctgcacaacaagctgaagatcaagcagaacctgcagcagctgaacagcgacatcagcgccatcaccacctggctgaagaagacagaagctgagctggagatgctgaagatggccaagcccccaagtgacatccaggagattgagctgcgggtgaagaggctgcaggagatcctgaaggcctttgacacctacaaggccctggtggtgtctgtgaatgtgagcagcaaggagttcctgcagacagagagccctgagagcacagagctgcagagccggctgcggcagctgagcctgctgtgggaggccgcccagggcgctgtggacagctggaggggcggcctgcggcagagcctgatgcagtgccaggacttccaccagctgagccagaacctgctgctgtggctggccagcgccaagaacagacggcagaaggcccacgtgacagaccccaaggctgacccccgggccctgctggagtgccggcgggagctgatgcagctggagaaggagctggtggagcggcagccccaggtggacatgctgcaggagatcagcaacagcctgctgatcaagggccacggggaggactgcattgaagctgaggagaaggtgcacgtgattgagaagaagctgaagcagctgcgggagcaggtgtcccaggacctgatggccctgcagggcacccagaacccagccagccccctgcccagctttgatgaggtggacagcggggaccagcccccagccacctctgtgcctgccccccgggccaagttccgggctgtgaggaccacagaaggagaggaggagacagagagccgggtgcccggcagcacccggccccagaggagcttcctgagccgggtggtgcgggccgccctgcccctgcagctgctgctgctgctgctgctgctgctggcctgcctgctgcccagcagcgaggaggactacagctgcacccaggccaacaactttgcccgctccttctaccccatgctgcgctacaccaacggccccccacccacctag

SEQ ID NO: 171286 - DNA, 2292 bp, synthetic construct
  misc_feature 1..2292: note = Description of Artificial Sequence: Synthetic coding sequence
  source 1..2292: mol_type = other DNA
atgtccatggagaggaggatgaagattgaggagacctggaggctgtggcagaagttcctggatgactacagcagatttgaggactggctgaagtctgctgagaggacagctgcctgccccaacagcagcgaggtgctgtacaccagcgccaaggaggagctgaagagatttgaggccttccagaggcagatccacgagcggctgacccagctggagctgatcaacaagcagtacagaaggctggcccgggagaacagaacagacacagccagccggctgaagcagatggtgcatgagggcaaccagcgctgggacaacctgcagaggagagtgacagctgtgctgcggcggctgcggcacttcaccaaccagcgggaggagtttgagggcacccgggagagcatcctggtgtggctgacagagatggacctgcagctgaccaacgtggagcacttcagcgagagtgatgctgatgacaagatgaggcagctgaatggcttccagcaggagatcaccctgaacaccaacaagattgaccagctgattgtgtttggagagcagctgatccagaagtctgagcccctggatgctgtgctgattgaagatgagctggaggagctgcaccgctactgccaggaggtgtttggccgggtgagccgcttccaccggcggctgaccagctgcaccccaggcctggaggatgagaaggaggcctctgaaaatgaaacagacatggaggacccccgggagatccagacagacagctggaggaagagaggagagagcgaggagcccagcagcccccagagcctgtgccacctggtggcccctggccacgagaggagcggctgtgagacccctgtgtctgtggacagcatccccctggagtgggaccacactggagatgtgggcggcagcagcagccatgaagaagatgaggagggcccctactacagcgccctgagcggcaagagcatcagtgatggccacagctggcacgtgcctgacagccccagctgcccagagcaccactacaagcagatggagggggacagaaatgtgccccctgtgcccccagccagcagcaccccctacaagccaccctacggcaagctgctgctgcccccaggcacagatggcggcaaggagggcccccgggtgctgaatggaaacccccagcaggaggatggcggcctggccggcatcacagagcagcagagcggggcctttgaccgctgggagatgatccaggcccaggagctgcacaacaagctgaagatcaagcagaacctgcagcagctgaacagcgacatcagcgccatcaccacctggctgaagaagacagaggccgagctggagatgctgaagatggccaagccacccagcgacatccaggagattgagctgcgggtgaagaggctgcaggagatcctgaaggcctttgacacctacaaggccctggtggtgtctgtgaatgtgagcagcaaggagttcctgcagacagagagccctgagagcacagagctgcagagccggctgcggcagctgagcctgctgtgggaggccgcccagggcgctgtggacagctggaggggcggcctgcggcagagcctgatgcagtgccaggacttccaccagctgagccagaacctgctgctgtggctggccagcgccaagaacagacggcagaaggcccacgtgacagaccccaaggctgacccccgggccctgctggagtgcagaagagagctgatgcagctggagaaggagctggtggagcggcagccccaggtggacatgctgcaggagatcagcaacagcctgctgatcaagggccatggagaggactgcatcgaggccgaggagaaggtgcacgtgattgagaagaagctgaagcagctgcgggagcaggtgtcccaggacctgatggccctgcagggcacccagaacccagccagccccctgcccagctttgatgaggtggacagcggggaccagcccccagccacctctgtgcctgccccccgggccaagcagttccgggctgtgaggaccacagaaggagaggaggagacagagagccgggtgcccggcagcacccggccccagaggagcttcctgagccgggtggtgcgggccgccctgcccctgcagctgctgctgctgctgctgctgctgctggcctgcctgctgcccagcagcgaggaggactacagctgcacccaggccaacaactttgcccgctccttctaccccatgctgcgctacaccaacggccccccacccacctag

SEQ ID NO: 171287 - DNA, 7251 bp, synthetic construct
  misc_feature 1..7251: note = Description of Artificial Sequence: Synthetic coding sequence
  source 1..7251: mol_type = other DNA
atggagcagttccccaaggagaccgtggtggagagcagcggccccaaggtgctggagacagctgaggagatccaggagcggcggcaggaggtgctgacccgctaccagagcttcaaggagcgggtggccgagcggggccagaagctggaggacagctaccacctgcaggtgttcaagagagatgctgatgacctgggcaagtggatcatggagaaggtgaacatcctgacagacaagagctatgaggaccccaccaacatccagggcaagtaccagaagcaccagagcctggaggccgaggtgcagaccaagagccggctgatgtctgagctggagaagacccgggaggagcgcttcaccatgggccacagcgcccacgaggagaccaaggcccacatcgaggagctgcggcacctgtgggacctgctgctggagctgaccctggagaagggggaccagctgctgcgggccctgaagttccagcagtatgtgcaggagtgtgccgacatcctggagtggattggagacaaggaggccatcgccacctctgtggagctgggggaggactgggagaggacagaggtgctgcacaagaagtttgaggacttccaggtggagctggtggccaaggagggccgggtggtggaggtgaaccagtatgccaatgaatgtgccgaggagaaccacccagacctgcccctcatccagagcaagcagaatgaggtgaatgctgcctgggagcggctgcggggcctggccctgcagaggcagaaggccctgagcaatgctgccaacctgcagcgcttcaagagagatgtgacagaggccatccagtggatcaaggagaaggagcctgtgctgaccagcgaggactatggcaaggacctggtggccagcgagggcctcttccacagccacaagggcctggagaggaacctggccgtgatgtctgacaaggtgaaggagctgtgtgccaaggccgagaagctgaccctgagccaccccagtgatgccccccagatccaggagatgaaggaggacctggtgtcctcctgggagcacatccgggccctggccaccagccgctatgagaagctgcaggccacctactggtaccaccgcttcagcagtgactttgatgagctgagcggctggatgaatgagaagacagctgccatcaatgctgatgagctgcccacagatgtggccggcggggaggtgctgctggacagacaccagcagcacaagcatgaaattgacagctatgatgaccgcttccagagcgcagatgagaccggccaggacctggtgaatgccaaccacgaggccagtgatgaggtgcgggagaagatggagatcctggacaacaactggacagccctgctggagctgtgggatgagcggcaccggcagtatgagcagtgcctggacttccacctgttctacagagattctgagcaggtggacagctggatgagccggcaggaggccttcctggagaatgaagacctgggcaacagcctgggcagcgctgaggccctgctgcagaagcatgaagattttgaggaggccttcaccgcccaggaggagaagatcatcaccgtggacaagacagccaccaagctgattggagatgaccactatgacagcgagaacatcaaggccatcagagatggcctgctggccaggagagatgccctgcgggagaaggccgccacccggcggcggctgctgaaggagagcctgctgctgcagaagctgtatgaagattctgatgacctgaagaactggatcaacaagaagaagaagctggctgatgatgaggactacaaggacatccagaacctgaagagccgggtgcagaagcagcaggtgtttgagaaggagctggccgtgaacaagacccagctggagaacatccagaagacaggccaggagatgattgagggcggccactacgccagtgacaacgtgaccacccggctgtctgaggtggccagcctgtgggaggagctgctggaggccaccaagcagaagggcacccagctgcacgaggccaaccagcagctgcagtttgaaaataatgctgaggacctgcagcgctggctggaggatgtggagtggcaggtgaccagtgaagattatggcaagggcctggccgaggtgcagaaccggctgaggaagcacggcctgctggagagcgctgtggccgcccggcaggaccaggtggacatcctgacagacctggccgcctactttgaggagatcggccacccagacagcaaggacatccgggcccggcaggagagcctggtgtgccgctttgaggccctgaaggagcccctggccaccaggaagaagaagctgctggacctgctgcacctgcagctgatctgccgggacacagaagatgaggaggcctggatccaggagacagagcccagcgccaccagcacctacctgggcaaggacctgattgccagcaagaagctgctgaacagacacagggtcatcctggagaacatcgccagccatgagccccgcatccaggagatcacagagcggggcaacaagatggtggaggagggccactttgctgctgaagatgtggccagccgggtgaagagcctgaaccagaacatggagagcctgcgggcccgggccgcccggcggcagaatgacctggaggccaacgtgcagttccagcagtacctggccgacctgcatgaagctgagacctggatccgggagaaggagcccatcgtggacaacaccaactatggagcagatgaggaggccgccggggccctgctgaagaagcatgaggccttcctgctggacctgaacagctttggagacagcatgaaggccctgaggaaccaggccaatgcctgccagcagcagcaggccgcccctgtggagggcgtggccggggagcagagggtgatggccctgtatgacttccaggcccggagcccccgggaggtgaccatgaagaagggagatgtgctgaccctgctgagcagcatcaacaaggactggtggaaggtggaggccgctgaccaccagggcatcgtgcctgctgtgtatgtgcggcggctggcccatgatgagttccccatgctgccccagaggcggcgggaggagcccggcaacatcacccagaggcaggagcagatcgagaaccagtaccgcagcctgctggacagagctgaggagaggagaagaaggctgctgcagcgctacaatgagttcctgctggcctatgaagctggggacatgctggagtggatccaggagaagaaggccgagaacacaggagtggagctggatgatgtgtgggagctgcagaagaagtttgatgagttccagaaggacctgaacaccaatgagccccggctgcgggacatcaacaaggtggctgatgacctgctgtttgagggcctgctgaccccagagggcgcccagatccggcaggagctgaacagccgctggggcagcctgcagaggctggctgatgagcagaggcagctgctgggcagcgcccatgctgtggaggtgttccaccgggaggctgatgacaccaaggagcagatcgagaagaagtgccaggccctgtctgctgctgaccccggcagtgacctcttctctgtgcaggccctgcagaggagacatgagggctttgagcgggacctggtgcccctgggggacaaggtgaccatcctgggggagacagctgagcggctgtctgagagccacccagatgccacagaggacctgcagaggcagaagatggagctgaatgaggcctgggaggacctgcagggccgcaccaaggacaggaaggagagcctgaatgaggcccagaagttctacctgttcctgagcaaggcccgggacctgcagaactggatcagcagcatcggcggcatggtgagcagccaggagctggccgaggacctgaccggcatcgagatcctgctggagcggcaccaggagcacagagctgacatggaggccgaggcccccaccttccaggccctggaggacttctctgctgagctgattgacagcggccaccacgccagccctgagattgagaagaagctgcaggccgtgaagctggagagagatgacctggagaaggcctgggagaagaggaagaagatcctggaccagtgcctggagctgcagatgttccagggcaactgtgaccaggtggagagctggatggtggcccgggagaacagcctgcggagtgatgacaagagcagcctggacagcctggaggccctgatgaagaagagagatgacctggacaaggccatcacagcccaggagggcaagatcacagacctggagcactttgctgagagcctgattgctgatgagcactacgccaaggaggagatcgccacccggctgcagagggtgctggaccgctggaaggccctgaaggcccagctgattgatgagaggaccaagctgggggactatgccaacctgaagcagttctacagagacctggaggagctggaggagtggatcagcgagatgctgcccacagcctgtgatgagagctacaaggatgccaccaacatccagaggaagtacctgaagcaccagacctttgcccacgaggtggatggccgctctgagcaggtgcacggcgtcatcaacctgggcaacagcctgattgaatgttctgcctgtgatggaaatgaggaggccatgaaggagcagctggagcagctgaaggagcactgggaccacctgctggagaggaccaatgacaagggcaagaagctgaatgaggccagccggcagcagcgcttcaacaccagcatccgggactttgagttctggctgtctgaggccgagaccctgctggccatgaaggaccaggcccgggacctggccagcgctggcaacctgctgaagaagcaccagctgctggagcgggagatgctggcccgggaggatgccctgaaggacctgaacaccctggccgaggacctgctgagcagcggcaccttcaacgtggaccagatcgtgaagaagaaggacaacgtgaacaagcgcttcctgaatgtgcaggagctggccgccgcccaccacgagaagctgaaggaggcctatgccctcttccagttcttccaggacctggatgatgaggagagctggattgaggagaagctgatccgggtgagcagccaggactatggccgggacctgcagggcgtgcagaacctgctgaagaagcacaagaggctggagggggagctggtggcccacgagcccgccatccagaatgtgctggacatggccgagaagctgaaggacaaggctgctgtgggccaggaggagatccagctgcggctggcccagtttgtggagcactgggagaagctgaaggagctggccaaggcccggggcctgaagctggaggagagcctggagtacctgcagttcatgcagaatgctgaggaggaggaggcctggatcaatgagaagaatgccctggccgtgcggggggactgtggggacaccctggccgccacccagagcctgctgatgaagcatgaggccctggagaatgactttgctgtgcatgagaccagggtgcagaatgtgtgtgcccagggcgaggacatcctgaacaaggaggagagccagaacaaggagatcagcagcaagattgaggccctgaatgagaagacccccagcctggccaaggccatcgccgcctggaagctgcagctggaggatgattatgccttccaggagttcaactggaaggcagatgtggtggaggcctggattgctgacaaggagaccagcctgaagaccaatggaaatggagctgacctgggggacttcctgaccctgctggccaagcaggacaccctggatgccagcctgcagagcttccagcaggagcggctgcctgagatcacagacctgaaggacaagctgatcagcgcccagcacaaccagagcaaggccatcgaggagagatatgctgccctgctgaagcgctgggagcagctgctggaggccagcgctgtgcaccggcagaagctgctggagaagcagctgcccctgcagaaggccgaggacctgtttgtggagtttgcccacaaggccagcgccctgaacaactggtgtgagaagatggaggagaacctgtctgagcctgtgcactgtgtgtccctgaatgagatccggcagctgcagaaggaccacgaggacttcctggccagcctggcccgggcccaggccgacttcaagtgcctgctggagctggaccagcagatcaaggccctgggcgtgcccagcagcccctacacctggctgactgtggaggtgctggagaggacctggaagcacctgagtgacatcatcgaggagcgggagcaggagctgcagaaggaggaggcccggcaggtgaagaactttgagatgtgccaggagtttgagcagaatgccagcaccttcctgcagtggatcctggagacccgggcctacttcctggatggcagcctgctgaaggagaccggcaccctggagagccagctggaggccaacaagaggaagcagaaggagatccaggccatgaagaggcagctgaccaagatcgtggacctgggggacaacctggaggatgccctgatcctggacatcaagtacagcaccatcggcctggcccagcagtgggaccagctgtaccagctgggcctgaggatgcagcacaacctggagcagcagatccaggccaaggacatcaagggcgtgtctgaggagaccctgaaggagttcagcaccatctacaagcactttgatgagaacctgaccggccgcctgacccacaaggagttccgcagctgcctgcggggcctgaactactacctgcccatggtggaggaggatgagcacgagcccaagtttgagaagttcctggatgctgtggaccccggcaggaagggctacgtgtccctggaggactacacagccttcctgattgacaaggagagcgagaacatcaagagcagtgatgaaattgaaaatgccttccaggccctggccgagggcaagagctacatcaccaaggaggacatgaagcaggccctgaccccagagcaggtgtccttctgtgccacccacatgcagcagtacatggacccccggggccgcagccacctgagcggctatgactatgtgggcttcaccaacagctacttcggcaactag

SEQ ID NO: 171288 - DNA, 7260 bp, synthetic construct
  misc_feature 1..7260: note = Description of Artificial Sequence: Synthetic coding sequence
  source 1..7260: mol_type = other DNA
atggagcagttccccaaggagaccgtggtggagagcagcggccccaaggtgctggagacagctgaggagatccaggagcggcggcaggaggtgctgacccgctaccagagcttcaaggagcgggtggccgagcggggccagaagctggaggacagctaccacctgcaggtgttcaagagagatgctgatgacctgggcaagtggatcatggagaaggtgaacatcctgacagacaagagctatgaggaccccaccaacatccagggcaagtaccagaagcaccagagcctggaggccgaggtgcagaccaagagccggctgatgtctgagctggagaagacccgggaggagcgcttcaccatgggccacagcgcccacgaggagaccaaggcccacatcgaggagctgcggcacctgtgggacctgctgctggagctgaccctggagaagggggaccagctgctgcgggccctgaagttccagcagtatgtgcaggagtgtgccgacatcctggagtggattggagacaaggaggccatcgccacctctgtggagctgggggaggactgggagaggacagaggtgctgcacaagaagtttgaggacttccaggtggagctggtggccaaggagggccgggtggtggaggtgaaccagtatgccaatgaatgtgccgaggagaaccacccagacctgcccctcatccagagcaagcagaatgaggtgaatgctgcctgggagcggctgcggggcctggccctgcagaggcagaaggccctgagcaatgctgccaacctgcagcgcttcaagagagatgtgacagaggccatccagtggatcaaggagaaggagcctgtgctgaccagcgaggactatggcaaggacctggtggccagcgagggcctcttccacagccacaagggcctggagaggaacctggccgtgatgtctgacaaggtgaaggagctgtgtgccaaggccgagaagctgaccctgagccaccccagtgatgccccccagatccaggagatgaaggaggacctggtgtcctcctgggagcacatccgggccctggccaccagccgctatgagaagctgcaggccacctactggtaccaccgcttcagcagtgactttgatgagctgagcggctggatgaatgagaagacagctgccatcaatgctgatgagctgcccacagatgtggccggcggggaggtgctgctggacagacaccagcagcacaagcatgaaattgacagctatgatgaccgcttccagagcgcagatgagaccggccaggacctggtgaatgccaaccacgaggccagtgatgaggtgcgggagaagatggagatcctggacaacaactggacagccctgctggagctgtgggatgagcggcaccggcagtatgagcagtgcctggacttccacctgttctacagagattctgagcaggtggacagctggatgagccggcaggaggccttcctggagaatgaagacctgggcaacagcctgggcagcgctgaggccctgctgcagaagcatgaagattttgaggaggccttcaccgcccaggaggagaagatcatcaccgtggacaagacagccaccaagctgattggagatgaccactatgacagcgagaacatcaaggccatcagagatggcctgctggccaggagagatgccctgcgggagaaggccgccacccggcggcggctgctgaaggagagcctgctgctgcagaagctgtatgaagattctgatgacctgaagaactggatcaacaagaagaagaagctggctgatgatgaggactacaaggacatccagaacctgaagagccgggtgcagaagcagcaggtgtttgagaaggagctggccgtgaacaagacccagctggagaacatccagaagacaggccaggagatgattgagggcggccactacgccagtgacaacgtgaccacccggctgtctgaggtggccagcctgtgggaggagctgctggaggccaccaagcagaagggcacccagctgcacgaggccaaccagcagctgcagtttgaaaataatgctgaggacctgcagcgctggctggaggatgtggagtggcaggtgaccagtgaagattatggcaagggcctggccgaggtgcagaaccggctgaggaagcacggcctgctggagagcgctgtggccgcccggcaggaccaggtggacatcctgacagacctggccgcctactttgaggagatcggccacccagacagcaaggacatccgggcccggcaggagagcctggtgtgccgctttgaggccctgaaggagcccctggccaccaggaagaagaagctgctggacctgctgcacctgcagctgatctgccgggacacagaagatgaggaggcctggatccaggagacagagcccagcgccaccagcacctacctgggcaaggacctgattgccagcaagaagctgctgaacagacacagggtcatcctggagaacatcgccagccatgagccccgcatccaggagatcacagagcggggcaacaagatggtggaggagggccactttgctgctgaagatgtggccagccgggtgaagagcctgaaccagaacatggagagcctgcgggcccgggccgcccggcggcagaatgacctggaggccaacgtgcagttccagcagtacctggccgacctgcatgaagctgagacctggatccgggagaaggagcccatcgtggacaacaccaactatggagcagatgaggaggccgccggggccctgctgaagaagcatgaggccttcctgctggacctgaacagctttggagacagcatgaaggccctgaggaaccaggccaatgcctgccagcagcagcaggccgcccctgtggagggcgtggccggggagcagagggtgatggccctgtatgacttccaggcccggagcccccgggaggtgaccatgaagaagggagatgtgctgaccctgctgagcagcatcaacaaggactggtggaaggtggaggccgctgaccaccagggcatcgtgcctgctgtgtatgtgcggcggctggcccatgatgagttccccatgctgccccagaggcggcgggaggagcccggcaacatcacccagaggcaggagcagatcgagaaccagtaccgcagcctgctggacagagctgaggagaggagaagaaggctgctgcagcgctacaatgagttcctgctggcctatgaagctggggacatgctggagtggatccaggagaagaaggccgagaacacaggagtggagctggatgatgtgtgggagctgcagaagaagtttgatgagttccagaaggacctgaacaccaatgagccccggctgcgggacatcaacaaggtggctgatgacctgctgtttgagggcctgctgaccccagagggcgcccagatccggcaggagctgaacagccgctggggcagcctgcagaggctggctgatgagcagaggcagctgctgggcagcgcccatgctgtggaggtgttccaccgggaggctgatgacaccaaggagcagatcgagaagaagtgccaggccctgtctgctgctgaccccggcagtgacctcttctctgtgcaggccctgcagaggagacatgagggctttgagcgggacctggtgcccctgggggacaaggtgaccatcctgggggagacagctgagcggctgtctgagagccacccagatgccacagaggacctgcagaggcagaagatggagctgaatgaggcctgggaggacctgcagggccgcaccaaggacaggaaggagagcctgaatgaggcccagaagttctacctgttcctgagcaaggcccgggacctgcagaactggatcagcagcatcggcggcatggtgagcagccaggagctggccgaggacctgaccggcatcgagatcctgctggagcggcaccaggagcacagagctgacatggaggccgaggcccccaccttccaggccctggaggacttctctgctgagctgattgacagcggccaccacgccagccctgagattgagaagaagctgcaggccgtgaagctggagagagatgacctggagaaggcctgggagaagaggaagaagatcctggaccagtgcctggagctgcagatgttccagggcaactgtgaccaggtggagagctggatggtggcccgggagaacagcctgcggagtgatgacaagagcagcctggacagcctggaggccctgatgaagaagagagatgacctggacaaggccatcacagcccaggagggcaagatcacagacctggagcactttgctgagagcctgattgctgatgagcactacgccaaggaggagatcgccacccggctgcagagggtgctggaccgctggaaggccctgaaggcccagctgattgatgagaggaccaagctgggggactatgccaacctgaagcagttctacagagacctggaggagctggaggagtggatcagcgagatgctgcccacagcctgtgatgagagctacaaggatgccaccaacatccagaggaagtacctgaagcaccagacctttgcccacgaggtggatggccgctctgagcaggtgcacggcgtcatcaacctgggcaacagcctgattgaatgttctgcctgtgatggaaatgaggaggccatgaaggagcagctggagcagctgaaggagcactgggaccacctgctggagaggaccaatgacaagggcaagaagctgaatgaggccagccggcagcagcgcttcaacaccagcatccgggactttgagttctggctgtctgaggccgagaccctgctggccatgaaggaccaggcccgggacctggccagcgctggcaacctgctgaagaagcaccagctgctggagcgggagatgctggcccgggaggatgccctgaaggacctgaacaccctggccgaggacctgctgagcagcggcaccttcaacgtggaccagatcgtgaagaagaaggacaacgtgaacaagcgcttcctgaatgtgcaggagctggccgccgcccaccacgagaagctgaaggaggcctatgccctcttccagttcttccaggacctggatgatgaggagagctggattgaggagaagctgatccgggtgagcagccaggactatggccgggacctgcagggcgtgcagaacctgctgaagaagcacaagaggctggagggggagctggtggcccacgagcccgccatccagaatgtgctggacatggccgagaagctgaaggacaaggctgctgtgggccaggaggagatccagctgcggctggcccagtttgtggagcactgggagaagctgaaggagctggccaaggcccggggcctgaagctggaggagagcctggagtacctgcagttcatgcagaatgctgaggaggaggaggcctggatcaatgagaagaatgccctggccgtgcggggggactgtggggacaccctggccgccacccagagcctgctgatgaagcatgaggccctggagaatgactttgctgtgcatgagaccagggtgcagaatgtgtgtgcccagggcgaggacatcctgaacaaggtgctgcaggaggagagccagaacaaggagatcagcagcaagattgaggccctgaatgagaagacccccagcctggccaaggccatcgccgcctggaagctgcagctggaggatgattatgccttccaggagttcaactggaaggcagatgtggtggaggcctggattgctgacaaggagaccagcctgaagaccaatggaaatggagctgacctgggggacttcctgaccctgctggccaagcaggacaccctggatgccagcctgcagagcttccagcaggagcggctgcctgagatcacagacctgaaggacaagctgatcagcgcccagcacaaccagagcaaggccatcgaggagagatatgctgccctgctgaagcgctgggagcagctgctggaggccagcgctgtgcaccggcagaagctgctggagaagcagctgcccctgcagaaggccgaggacctgtttgtggagtttgcccacaaggccagcgccctgaacaactggtgtgagaagatggaggagaacctgtctgagcctgtgcactgtgtgtccctgaatgagatccggcagctgcagaaggaccacgaggacttcctggccagcctggcccgggcccaggccgacttcaagtgcctgctggagctggaccagcagatcaaggccctgggcgtgcccagcagcccctacacctggctgactgtggaggtgctggagaggacctggaagcacctgagtgacatcatcgaggagcgggagcaggagctgcagaaggaggaggcccggcaggtgaagaactttgagatgtgccaggagtttgagcagaatgccagcaccttcctgcagtggatcctggagacccgggcctacttcctggatggcagcctgctgaaggagaccggcaccctggagagccagctggaggccaacaagaggaagcagaaggagatccaggccatgaagaggcagctgaccaagatcgtggacctgggggacaacctggaggatgccctgatcctggacatcaagtacagcaccatcggcctggcccagcagtgggaccagctgtaccagctgggcctgaggatgcagcacaacctggagcagcagatccaggccaaggacatcaagggcgtgtctgaggagaccctgaaggagttcagcaccatctacaagcactttgatgagaacctgaccggccgcctgacccacaaggagttccgcagctgcctgcggggcctgaactactacctgcccatggtggaggaggatgaacatgagcccaagtttgagaagttcctggatgctgtggaccccggcaggaagggctacgtgtccctggaggactacacagccttcctgattgacaaggagagcgagaacatcaagagcagtgatgaaattgaaaatgccttccaggccctggccgagggcaagagctacatcaccaaggaggacatgaagcaggccctgaccccagagcaggtgtccttctgtgccacccacatgcagcagtacatggacccccggggccgcagccacctgagcggctatgactatgtgggcttcaccaacagctactttggaaattag

SEQ ID NO: 171289 - DNA, 7434 bp, synthetic construct
  misc_feature 1..7434: note = Description of Artificial Sequence: Synthetic coding sequence
  source 1..7434: mol_type = other DNA
atggaccccagcggcgtgaaggtgctggagacagctgaggacatccaggagcggcggcagcaggtgctggaccgctaccaccgcttcaaggagctgagcaccctgcggcggcagaagctggaggacagctaccgcttccagttcttccagagagatgctgaggagctggagaagtggatccaggagaagctgcagatcgccagtgatgagaactacaaggaccccaccaacctgcagggcaagctgcagaagcaccaggcctttgaggccgaggtgcaggccaacagcggggccatcgtgaagctggatgaaacaggcaacctgatgatcagcgagggccactttgccagcgagaccatccgcacccggctgatggagctgcaccggcagtgggagctgctgctggagaagatgagggagaagggcatcaagctgctgcaggcccagaagctggtgcagtacctgagagaatgtgaagatgtgatggactggatcaatgacaaggaggccatcgtgaccagcgaggagctgggccaggacctggagcacgtggaggtgctgcagaagaagtttgaggagttccagacagacatggccgcccacgaggagcgggtgaatgaggtgaaccagtttgctgccaagctgatccaggagcagcaccctgaggaggagctgatcaagaccaagcaggatgaggtgaatgctgcctggcagaggctgaagggcctggccctgcagaggcagggcaagctgtttggagctgctgaggtgcagcgcttcaacagagatgtggatgagaccatctcctggatcaaggagaaggagcagctgatggccagtgatgactttggccgggacctggcctctgtgcaggccctgctgaggaagcatgagggcctggagcgggacctggccgccctggaggacaaggtgaaggccctgtgtgccgaggccgaccggctgcagcagagccaccccctgagcgccacccagatccaggtgaagcgggaggagctgatcaccaactgggagcagatccgcaccctggccgctgagagacatgcccggctgaatgacagctaccgcctgcagcgcttcctggccgacttccgggacctgacctcctgggtgacagagatgaaggccctgatcaatgctgatgagctggccagtgatgtggccggggctgaggccctgctggacagacaccaggagcacaagggggagattgatgcccacgaggacagcttcaagtctgcagatgaaagtggccaggccctgctggccgccggccactacgccagtgatgaggtgcgggagaagctgactgtgctgtctgaggagcgggccgccctgctggagctgtgggagctgcggcggcagcagtatgagcagtgcatggacctgcagctgttctacagagacacagagcaggtggacaactggatgagcaagcaggaggccttcctgctgaatgaagacctgggggacagcctggacagcgtggaggccctgctgaagaagcatgaggactttgagaagagcctgagcgcccaggaggagaagatcacagccctggatgaatttgccaccaagctgatccagaacaaccactacgccatggaggatgtggccaccaggagagatgccctgctgagcagaagaaatgccctgcacgagcgggccatgagaagaagagcccagctggccgacagcttccacctgcagcagttcttccgggacagtgatgagctgaagtcctgggtgaatgagaagatgaagacagccacagatgaggcctacaaggaccccagcaacctgcagggcaaggtgcagaagcaccaggcctttgaagctgagctgagcgccaaccagagcagaattgatgccctggagaaggccggccagaagctgattgatgtgaaccactacgccaaggatgaggtggccgccaggatgaatgaggtgatcagcctgtggaagaagctgctggaggccacagagctgaagggcatcaagctgcgggaggccaaccagcagcagcagttcaacagaaatgtggaggacatcgagctgtggctgtatgaggtggagggccacctggccagtgatgattatggcaaggacctgaccaacgtgcagaacctgcagaagaagcacgccctgctggaggctgatgtggccgcccaccaggacagaattgatggcatcaccatccaggcccggcagttccaggatgctggccactttgatgctgagaacatcaagaagaagcaggaggccctggtggcccgctatgaggccctgaaggagcccatggtggccaggaagcagaagctggccgacagcctgcggctgcagcagctgttcagagatgtggaggatgaggagacctggatccgggagaaggagcccatcgccgccagcaccaacagaggcaaggacctgattggagtgcagaacctgctgaagaagcaccaggccctgcaggccgagattgctggccacgagccccgcatcaaggctgtgacccagaagggaaatgccatggtggaggagggccactttgctgctgaagatgtgaaggccaagctgcacgagctgaaccagaagtgggaggccctgaaggccaaggccagccagaggcggcaggacctggaggacagcctgcaggcccagcagtactttgctgatgccaatgaggccgagagctggatgagggagaaggagcccatcgtgggcagcacagattatggcaaggatgaggacagcgctgaggccctgctgaagaagcatgaggccctgatgtctgacctgagcgcctacggcagcagcatccaggccctgcgggagcaggcccagagctgccggcagcaggtggcccccacagatgatgaaacaggcaaggagctggtgctggccctgtatgactaccaggagaagagcccccgggaggtgaccatgaagaagggggacatcctgaccctgctgaacagcaccaacaaggactggtggaaggtggaggtgaatgaccggcagggctttgtgcctgctgcctacgtgaagaagctggaccctgcccagagcgccagccgggagaacctgctggaggagcagggcagcatcgccctgcggcaggagcagattgacaaccagacccgcatcaccaaggaggccggctctgtgtccctgaggatgaagcaggtggaggagctgtaccacagcctgctggagctgggggagaagaggaagggcatgctggagaagagctgcaagaagttcatgctgttccgggaggccaatgagctgcagcagtggatcaatgagaaggaggccgccctgaccagcgaggaggtgggcgctgacctggagcaggtggaggtgctgcagaagaagtttgatgacttccagaaggacctgaaggccaatgaaagccggctgaaggacatcaacaaggtggccgaggacctggagagcgagggcctgatggccgaggaggtgcaggccgtgcagcagcaggaggtgtatggcatgatgcccagagatgaaacagacagcaagacagccagcccctggaagagcgcccggctgatggtgcacacagtggccaccttcaacagcatcaaggagctgaatgaacgctggaggagcctgcagcagctggccgaggagaggagccagctgctgggcagcgcccacgaggtgcagcgcttccacagagatgctgatgagaccaaggagtggattgaggagaagaaccaggccctgaacacagacaactacggccatgacctggcctctgtgcaggccctgcagaggaagcatgagggctttgagcgggacctggccgccctgggggacaaggtgaacagcctgggggagacagctgagcggctcatccagagccaccctgagagcgctgaggacctgcaggagaagtgcacagagctgaaccaggcctggagcagcctgggcaagagagctgaccagaggaaggccaagctgggggacagccatgacctgcagcgcttcctgagtgacttccgggacctgatgtcctggatcaatggcatccggggcctggtgtccagtgatgagctggccaaggatgtgactggagctgaggccctgctggagcggcaccaggagcacaggacagaaattgatgcccgggccggcaccttccaggcctttgagcagtttggccagcagctgctggcccacggccactacgccagccctgagatcaagcagaagctggacatcctggaccaggagagagctgacctggagaaggcctgggtgcagaggaggatgatgctggaccagtgcctggagctgcagctgttccaccgggactgtgagcaggccgagaactggatggccgcccgggaggccttcctgaacacagaagataaaggagacagcctggacagcgtggaggccctgatcaagaagcatgaggactttgacaaggccatcaacgtgcaggaggagaagattgctgccctgcaggcctttgctgaccagctgattgctgctggccactacgccaagggggacatcagcagcagaagaaatgaggtgctggaccgctggaggcggctgaaggcccagatgattgagaagaggagcaagctgggggagagccagaccctgcagcagttcagcagagatgtggatgaaattgaggcctggatcagcgagaagctgcagacagccagtgatgagagctacaaggaccccaccaacatccaggtgtccctgatgctgagcaagcaccagaagcaccaggcctttgaggccgagctgcacgccaatgctgaccgcatccggggcgtgattgacatgggcaacagcctcatcgagcggggggcctgtgccggctctgaagatgctgtgaaggcccggctggccgccctggccgaccagtggcagttcctggtgcagaagtctgctgagaagagccagaagctgaaggaggccaacaagcagcagaacttcaacacaggcatcaaggactttgacttctggctgtctgaggtggaggccctgctggcctctgaagattatggcaaggacctggcctctgtgaacaacctgctgaagaagcaccagctgctggaggccgacatcagcgcccacgaggaccggctgaaggacctgaacagccaggccgacagcctgatgaccagcagcgcctttgacaccagccaggtgaaggacaagagggacaccatcaatggccgcttccagaagatcaagtccatggccgccagcagaagagccaagctgaatgaaagccaccggctgcaccagttcttccgggacatggatgatgaggagagctggatcaaggagaagaagctgctggtgggctctgaagattatggccgggacctgactggagtgcagaacctgaggaagaagcacaagaggctggaggccgagctggccgcccacgagcccgccatccagggcgtgctggacaccgggaagaagctgagtgatgacaacaccatcggcaaggaggagatccagcagaggctggcccagtttgtggagcactggaaggagctgaagcagctggccgccgcccggggccagaggctggaggagagcctggagtaccagcagtttgtggccaacgtggaggaggaggaggcctggatcaatgagaagatgaccctggtggcctctgaagattatggagacaccctggccgccatccagggcctgctgaagaagcatgaggcctttgaaacagacttcaccgtgcacaaggacagagtgaatgatgtgtgcaccaacggccaggacctgatcaagaagaacaaccaccacgaggagaacatcagcagcaagatgaagggcctgaatggcaaggtgtctgacctggagaaggccgccgcccagaggaaggccaagctggatgaaaattctgccttcctgcagttcaactggaaggcagatgtggtggagagctggattggagagaaggagaacagcctgaagacagatgattatggccgggacctgagctctgtgcagaccctgctgaccaagcaggagacctttgatgctggcctgcaggccttccagcaggagggcatcgccaacatcacagccctgaaggaccagctgctggccgccaagcacgtgcagagcaaggccatcgaggcccggcatgccagcctgatgaagcgctggagccagctgctggccaacagcgctgccaggaagaagaagctgctggaggcccagagccacttcaggaaggtggaggacctcttcctgacctttgccaagaaggccagcgccttcaacagctggtttgaaaatgctgaggaggacctgacagatcctgtgcgctgcaacagcctggaggagatcaaggccctgcgggaggcccatgatgccttccgcagcagcctgagcagcgcccaggccgacttcaaccagctggccgagctggaccggcagatcaagagcttccgggtggccagcaacccctacacctggttcaccatggaggccctggaggagacctggaggaacctgcagaagatcatcaaggagcgggagctggagctgcagaaggagcagaggcggcaggaggagaatgacaagctgcggcaggagtttgcccagcacgccaatgccttccaccagtggatccaggagacccgctgccagcctgctggggccagctgcatggtggaggagagcggcaccctggagagccagctggaggccaccaagaggaagcaccaggagatccgggccatgaggagccagctgaagaagattgaggacctgggcgccgccatggaggaggccctgatcctggacaacaagtacacagagcacagcacagtgggcctggcccagcagtgggaccagctggaccagctgggcatgaggatgcagcacaacctggagcagcagatccaggccaggaacaccactggagtgacagaggaggccctgaaggagttctccatgatgttcaagcactttgacaaggacaagagcggccgcctgaaccaccaggagttcaagagctgcctgcggagcctgggctatgacctgcccatggtggaggagggggagccagaccctgagtttgaggccatcctggacacagtggaccccaacagagatggccacgtgtccctgcaggagtacatggccttcatgatcagccgggagacagaaaatgtgaagagcagcgaggagattgagagcgccttccgggccctgagcagcgagggcaagccctacgtgaccaaggaggagctgtaccagaacctgacccgggagcaggccgactactgtgtgagccacatgaagccctacgtggatggcaagggccgggagctgcccacagcctttgattatgtggagttcaccaggagcctgtttgtgaactag

SEQ ID NO: 171290 - DNA, 7359 bp, synthetic construct
  misc_feature 1..7359: note = Description of Artificial Sequence: Synthetic coding sequence
  source 1..7359: mol_type = other DNA
atggaccccagcggcgtgaaggtgctggagacagctgaggacatccaggagcggcggcagcaggtgctggaccgctaccaccgcttcaaggagctgagcaccctgcggcggcagaagctggaggacagctaccgcttccagttcttccagagagatgctgaggagctggagaagtggatccaggagaagctgcagatcgccagtgatgagaactacaaggaccccaccaacctgcagggcaagctgcagaagcaccaggcctttgaggccgaggtgcaggccaacagcggggccatcgtgaagctggatgaaacaggcaacctgatgatcagcgagggccactttgccagcgagaccatccgcacccggctgatggagctgcaccggcagtgggagctgctgctggagaagatgagggagaagggcatcaagctgctgcaggcccagaagctggtgcagtacctgagagaatgtgaagatgtgatggactggatcaatgacaaggaggccatcgtgaccagcgaggagctgggccaggacctggagcacgtggaggtgctgcagaagaagtttgaggagttccagacagacatggccgcccacgaggagcgggtgaatgaggtgaaccagtttgctgccaagctgatccaggagcagcaccctgaggaggagctgatcaagaccaagcaggatgaggtgaatgctgcctggcagaggctgaagggcctggccctgcagaggcagggcaagctgtttggagctgctgaggtgcagcgcttcaacagagatgtggatgagaccatctcctggatcaaggagaaggagcagctgatggccagtgatgactttggccgggacctggcctctgtgcaggccctgctgaggaagcatgagggcctggagcgggacctggccgccctggaggacaaggtgaaggccctgtgtgccgaggccgaccggctgcagcagagccaccccctgagcgccacccagatccaggtgaagcgggaggagctgatcaccaactgggagcagatccgcaccctggccgctgagagacatgcccggctgaatgacagctaccgcctgcagcgcttcctggccgacttccgggacctgacctcctgggtgacagagatgaaggccctgatcaatgctgatgagctggccagtgatgtggccggggctgaggccctgctggacagacaccaggagcacaagggggagattgatgcccacgaggacagcttcaagtctgcagatgaaagtggccaggccctgctggccgccggccactacgccagtgatgaggtgcgggagaagctgactgtgctgtctgaggagcgggccgccctgctggagctgtgggagctgcggcggcagcagtatgagcagtgcatggacctgcagctgttctacagagacacagagcaggtggacaactggatgagcaagcaggaggccttcctgctgaatgaagacctgggggacagcctggacagcgtggaggccctgctgaagaagcatgaggactttgagaagagcctgagcgcccaggaggagaagatcacagccctggatgaatttgccaccaagctgatccagaacaaccactacgccatggaggatgtggccaccaggagagatgccctgctgagcagaagaaatgccctgcacgagcgggccatgagaagaagagcccagctggccgacagcttccacctgcagcagttcttccgggacagtgatgagctgaagtcctgggtgaatgagaagatgaagacagccacagatgaggcctacaaggaccccagcaacctgcagggcaaggtgcagaagcaccaggcctttgaagctgagctgagcgccaaccagagcagaattgatgccctggagaaggccggccagaagctgattgatgtgaaccactacgccaaggatgaggtggccgccaggatgaatgaggtgatcagcctgtggaagaagctgctggaggccacagagctgaagggcatcaagctgcgggaggccaaccagcagcagcagttcaacagaaatgtggaggacatcgagctgtggctgtatgaggtggagggccacctggccagtgatgattatggcaaggacctgaccaacgtgcagaacctgcagaagaagcacgccctgctggaggctgatgtggccgcccaccaggacagaattgatggcatcaccatccaggcccggcagttccaggatgctggccactttgatgctgagaacatcaagaagaagcaggaggccctggtggcccgctatgaggccctgaaggagcccatggtggccaggaagcagaagctggccgacagcctgcggctgcagcagctgttcagagatgtggaggatgaggagacctggatccgggagaaggagcccatcgccgccagcaccaacagaggcaaggacctgattggagtgcagaacctgctgaagaagcaccaggccctgcaggccgagattgctggccacgagccccgcatcaaggctgtgacccagaagggaaatgccatggtggaggagggccactttgctgctgaagatgtgaaggccaagctgcacgagctgaaccagaagtgggaggccctgaaggccaaggccagccagaggcggcaggacctggaggacagcctgcaggcccagcagtactttgctgatgccaatgaggccgagagctggatgagggagaaggagcccatcgtgggcagcacagattatggcaaggatgaggacagcgctgaggccctgctgaagaagcatgaggccctgatgtctgacctgagcgcctacggcagcagcatccaggccctgcgggagcaggcccagagctgccggcagcaggtggcccccacagatgatgaaacaggcaaggagctggtgctggccctgtatgactaccaggagaagagcccccgggaggtgaccatgaagaagggggacatcctgaccctgctgaacagcaccaacaaggactggtggaaggtggaggtgaatgaccggcagggctttgtgcctgctgcctacgtgaagaagctggaccctgcccagagcgccagccgggagaacctgctggaggagcagggcagcatcgccctgcggcaggagcagattgacaaccagtaccacagcctgctggagctgggggagaagaggaagggcatgctggagaagagctgcaagaagttcatgctgttccgggaggccaatgagctgcagcagtggatcaatgagaaggaggccgccctgaccagcgaggaggtgggcgctgacctggagcaggtggaggtgctgcagaagaagtttgatgacttccagaaggacctgaaggccaatgaaagccggctgaaggacatcaacaaggtggccgaggacctggagagcgagggcctgatggccgaggaggtgcaggccgtgcagcagcaggaggtgtatggcatgatgcccagagatgaaacagacagcaagacagccagcccctggaagagcgcccggctgatggtgcacacagtggccaccttcaacagcatcaaggagctgaatgaacgctggaggagcctgcagcagctggccgaggagaggagccagctgctgggcagcgcccacgaggtgcagcgcttccacagagatgctgatgagaccaaggagtggattgaggagaagaaccaggccctgaacacagacaactacggccatgacctggcctctgtgcaggccctgcagaggaagcatgagggctttgagcgggacctggccgccctgggggacaaggtgaacagcctgggggagacagctgagcggctcatccagagccaccctgagagcgctgaggacctgcaggagaagtgcacagagctgaaccaggcctggagcagcctgggcaagagagctgaccagaggaaggccaagctgggggacagccatgacctgcagcgcttcctgagtgacttccgggacctgatgtcctggatcaatggcatccggggcctggtgtccagtgatgagctggccaaggatgtgactggagctgaggccctgctggagcggcaccaggagcacaggacagaaattgatgcccgggccggcaccttccaggcctttgagcagtttggccagcagctgctggcccacggccactacgccagccctgagatcaagcagaagctggacatcctggaccaggagagagctgacctggagaaggcctgggtgcagaggaggatgatgctggaccagtgcctggagctgcagctgttccaccgggactgtgagcaggccgagaactggatggccgcccgggaggccttcctgaacacagaagataaaggagacagcctggacagcgtggaggccctgatcaagaagcatgaggactttgacaaggccatcaacgtgcaggaggagaagattgctgccctgcaggcctttgctgaccagctgattgctgctggccactacgccaagggggacatcagcagcagaagaaatgaggtgctggaccgctggaggcggctgaaggcccagatgattgagaagaggagcaagctgggggagagccagaccctgcagcagttcagcagagatgtggatgaaattgaggcctggatcagcgagaagctgcagacagccagtgatgagagctacaaggaccccaccaacatccagagcaagcaccagaagcaccaggcctttgaagctgagctgcacgccaatgctgaccgcatccggggcgtcatcgacatgggcaacagcctgattgagcggggggcctgtgccggctctgaagatgctgtgaaggcccggctggccgccctggccgaccagtggcagttcctggtgcagaagtctgctgagaagagccagaagctgaaggaggccaacaagcagcagaacttcaacacaggcatcaaggactttgacttctggctgtctgaggtggaggccctgctggccagcgaggactatggcaaggacctggcctctgtgaacaacctgctgaagaagcaccagctgctggaggccgacatcagcgcccatgaagatcggctgaaggacctgaacagccaggccgacagcctgatgaccagcagcgcctttgacaccagccaggtgaaggacaagagggacaccatcaatggccgcttccagaagatcaagtccatggccgccagccggcgggccaagctgaatgaaagccaccggctgcaccagttcttccgggacatggatgatgaggagagctggatcaaggagaagaagctgctggtgggcagcgaggactatggccgggacctgactggagtgcagaacctgaggaagaagcacaagaggctggaggccgagctggccgcccacgagcccgccatccagggcgtgctggacaccgggaagaagctgagtgatgacaacaccatcggcaaggaggagatccagcagaggctggcccagtttgtggagcactggaaggagctgaagcagctggccgccgcccggggccagaggctggaggagagcctggagtaccagcagtttgtggccaacgtggaggaggaggaggcctggatcaatgagaagatgaccctggtggccagcgaggactatggagacaccctggccgccatccagggcctgctgaagaagcatgaggcctttgaaacagacttcaccgtgcacaaggacagagtgaatgatgtgtgcaccaacggccaggacctgatcaagaagaacaaccaccacgaggagaacatcagcagcaagatgaagggcctgaatggcaaggtgtctgacctggagaaggctgctgcccagaggaaggccaagctggatgagaacagcgccttcctgcagttcaactggaaggcagatgtggtggagagctggattggagagaaggagaacagcctgaagacagatgattatggccgggacctgagctctgtgcagaccctgctgaccaagcaggagacctttgatgctggcctgcaggccttccagcaggagggcatcgccaacatcacagccctgaaggaccagctgctggccgccaagcacgtgcagagcaaggccatcgaggcccggcatgccagcctgatgaagcgctggagccagctgctggccaacagcgctgccaggaagaagaagctgctggaggcccagagccacttcaggaaggtggaggacctcttcctgacctttgccaagaaggccagcgccttcaacagctggtttgaaaatgctgaggaggacctgacagatcctgtgcgctgcaacagcctggaggagatcaaggccctgcgggaggcccatgatgccttccgcagcagcctgagcagcgcccaggccgacttcaaccagctggccgagctggaccggcagatcaagagcttccgggtggccagcaacccctacacctggttcaccatggaggccctggaggagacctggaggaacctgcagaagatcatcaaggagcgggagctggagctgcagaaggagcagaggcggcaggaggagaatgacaagctgcggcaggagtttgcccagcacgccaatgccttccaccagtggatccaggagacccgctgccagcctgctggggccagctgcatggtggaggagagcggcaccctggagagccagctggaggccaccaagaggaagcaccaggagatccgggccatgaggagccagctgaagaagattgaggacctgggcgccgccatggaggaggccctgatcctggacaacaagtacacagagcacagcacagtgggcctggcccagcagtgggaccagctggaccagctgggcatgaggatgcagcacaacctggagcagcagatccaggccaggaacaccaccggggtgacagaggaggccctgaaggagttctccatgatgttcaagcactttgacaaggacaagagcggccgcctgaaccaccaggagttcaagagctgcctgcggagcctgggctatgacctgcccatggtggaggagggggagccagaccctgagtttgaggccatcctggacacagtggaccccaacagagatggccacgtgtccctgcaggagtacatggccttcatgatcagccgggagacagaaaatgtgaagagcagcgaggagattgaaagtgccttccgggccctgagcagcgagggcaagccctacgtgaccaaggaggagctgtaccagaacctgacccgggagcaggccgactactgtgtgagccacatgaagccctacgtggatggcaagggccgggagctgcccacagcctttgattatgtggagttcaccaggagcctgtttgtgaactag

SEQ ID NO: 171291 - DNA, 1485 bp, synthetic construct
  misc_feature 1..1485: note = Description of Artificial Sequence: Synthetic coding sequence
  source 1..1485: mol_type = other DNA
atggccgccagcagaagagccaagctgaatgaaagccaccggctgcaccagttcttccgggacatggatgatgaggagagctggatcaaggagaagaagctgctggtgggctctgaagattatggccgggacctgactggagtgcagaacctgaggaagaagcacaagaggctggaggccgagctggccgcccacgagcccgccatccagggcgtgctggacaccgggaagaagctgagtgatgacaacaccatcggcaaggaggagatccagcagaggctggcccagtttgtggagcactggaaggagctgaagcagctggccgccgcccggggccagaggctggaggagagcctggagtaccagcagtttgtggccaacgtggaggaggaggaggcctggatcaatgagaagatgaccctggtggcctctgaagattatggagacaccctggccgccatccagggcctgctgaagaagcatgaggcctttgaaacagacttcaccgtgcacaaggacagagtgaatgatgtgtgcaccaacggccaggacctgatcaagaagaacaaccaccacgaggagaacatcagcagcaagatgaagggcctgaatggcaaggtgtctgacctggagaaggccgccgcccagaggaaggccaagctggatgaaaattctgccttcctgcagttcaactggaaggcagatgtggtggagagctggattggagagaaggagaacagcctgaagacagatgattatggccgggacctgagctctgtgcagaccctgctgaccaagcaggagacctttgatgctggcctgcaggccttccagcaggagggcatcgccaacatcacagccctgaaggaccagctgctggccgccaagcacgtgcagagcaaggccatcgaggcccggcatgccagcctgatgaagcgctggagccagctgctggccaacagcgctgccaggaagaagaagctgctggaggcccagagccacttcaggaaggtggaggacctcttcctgacctttgccaagaaggccagcgccttcaacagctggtttgaaaatgctgaggaggacctgacagatcctgtgcgctgcaacagcctggaggagatcaaggccctgcgggaggcccatgatgccttccgcagcagcctgagcagcgcccaggccgacttcaaccagctggccgagctggaccggcagatcaagagcttccgggtggccagcaacccctacacctggttcaccatggaggccctggaggagacctggaggaacctgcagaagatcatcaaggagcgggagctggagctgcagaaggagcagaggcggcaggaggagaatgacaagctgcggcaggagtttgcccagcacgccaatgccttccaccagtggatccaggagacccgctgccagaggaaggatggccagctgcagggcggccgggtgggggacccccgcatcccagcctag

SEQ ID NO: 171292 - DNA, 7419 bp, synthetic construct
  misc_feature 1..7419: note = Description of Artificial Sequence: Synthetic coding sequence
  source 1..7419: mol_type = other DNA
atggaccccagcggcgtgaaggtgctggagacagctgaggacatccaggagcggcggcagcaggtgctggaccgctaccaccgcttcaaggagctgagcaccctgcggcggcagaagctggaggacagctaccgcttccagttcttccagagagatgctgaggagctggagaagtggatccaggagaagctgcagatcgccagtgatgagaactacaaggaccccaccaacctgcagggcaagctgcagaagcaccaggcctttgaggccgaggtgcaggccaacagcggggccatcgtgaagctggatgaaacaggcaacctgatgatcagcgagggccactttgccagcgagaccatccgcacccggctgatggagctgcaccggcagtgggagctgctgctggagaagatgagggagaagggcatcaagctgctgcaggcccagaagctggtgcagtacctgagagaatgtgaagatgtgatggactggatcaatgacaaggaggccatcgtgaccagcgaggagctgggccaggacctggagcacgtggaggtgctgcagaagaagtttgaggagttccagacagacatggccgcccacgaggagcgggtgaatgaggtgaaccagtttgctgccaagctgatccaggagcagcaccctgaggaggagctgatcaagaccaagcaggatgaggtgaatgctgcctggcagaggctgaagggcctggccctgcagaggcagggcaagctgtttggagctgctgaggtgcagcgcttcaacagagatgtggatgagaccatctcctggatcaaggagaaggagcagctgatggccagtgatgactttggccgggacctggcctctgtgcaggccctgctgaggaagcatgagggcctggagcgggacctggccgccctggaggacaaggtgaaggccctgtgtgccgaggccgaccggctgcagcagagccaccccctgagcgccacccagatccaggtgaagcgggaggagctgatcaccaactgggagcagatccgcaccctggccgctgagagacatgcccggctgaatgacagctaccgcctgcagcgcttcctggccgacttccgggacctgacctcctgggtgacagagatgaaggccctgatcaatgctgatgagctggccagtgatgtggccggggctgaggccctgctggacagacaccaggagcacaagggggagattgatgcccacgaggacagcttcaagtctgcagatgaaagtggccaggccctgctggccgccggccactacgccagtgatgaggtgcgggagaagctgactgtgctgtctgaggagcgggccgccctgctggagctgtgggagctgcggcggcagcagtatgagcagtgcatggacctgcagctgttctacagagacacagagcaggtggacaactggatgagcaagcaggaggccttcctgctgaatgaagacctgggggacagcctggacagcgtggaggccctgctgaagaagcatgaggactttgagaagagcctgagcgcccaggaggagaagatcacagccctggatgaatttgccaccaagctgatccagaacaaccactacgccatggaggatgtggccaccaggagagatgccctgctgagcagaagaaatgccctgcacgagcgggccatgagaagaagagcccagctggccgacagcttccacctgcagcagttcttccgggacagtgatgagctgaagtcctgggtgaatgagaagatgaagacagccacagatgaggcctacaaggaccccagcaacctgcagggcaaggtgcagaagcaccaggcctttgaagctgagctgagcgccaaccagagcagaattgatgccctggagaaggccggccagaagctgattgatgtgaaccactacgccaaggatgaggtggccgccaggatgaatgaggtgatcagcctgtggaagaagctgctggaggccacagagctgaagggcatcaagctgcgggaggccaaccagcagcagcagttcaacagaaatgtggaggacatcgagctgtggctgtatgaggtggagggccacctggccagtgatgattatggcaaggacctgaccaacgtgcagaacctgcagaagaagcacgccctgctggaggctgatgtggccgcccaccaggacagaattgatggcatcaccatccaggcccggcagttccaggatgctggccactttgatgctgagaacatcaagaagaagcaggaggccctggtggcccgctatgaggccctgaaggagcccatggtggccaggaagcagaagctggccgacagcctgcggctgcagcagctgttcagagatgtggaggatgaggagacctggatccgggagaaggagcccatcgccgccagcaccaacagaggcaaggacctgattggagtgcagaacctgctgaagaagcaccaggccctgcaggccgagattgctggccacgagccccgcatcaaggctgtgacccagaagggaaatgccatggtggaggagggccactttgctgctgaagatgtgaaggccaagctgcacgagctgaaccagaagtgggaggccctgaaggccaaggccagccagaggcggcaggacctggaggacagcctgcaggcccagcagtactttgctgatgccaatgaggccgagagctggatgagggagaaggagcccatcgtgggcagcacagattatggcaaggatgaggacagcgctgaggccctgctgaagaagcatgaggccctgatgtctgacctgagcgcctacggcagcagcatccaggccctgcgggagcaggcccagagctgccggcagcaggtggcccccacagatgatgaaacaggcaaggagctggtgctggccctgtatgactaccaggagaagagcccccgggaggtgaccatgaagaagggggacatcctgaccctgctgaacagcaccaacaaggactggtggaaggtggaggtgaatgaccggcagggctttgtgcctgctgcctacgtgaagaagctggaccctgcccagagcgccagccgggagaacctgctggaggagcagggcagcatcgccctgcggcaggagcagattgacaaccagacccgcatcaccaaggaggccggctctgtgtccctgaggatgaagcaggtggaggagctgtaccacagcctgctggagctgggggagaagaggaagggcatgctggagaagagctgcaagaagttcatgctgttccgggaggccaatgagctgcagcagtggatcaatgagaaggaggccgccctgaccagcgaggaggtgggcgctgacctggagcaggtggaggtgctgcagaagaagtttgatgacttccagaaggacctgaaggccaatgaaagccggctgaaggacatcaacaaggtggccgaggacctggagagcgagggcctgatggccgaggaggtgcaggccgtgcagcagcaggaggtgtatggcatgatgcccagagatgaaacagacagcaagacagccagcccctggaagagcgcccggctgatggtgcacacagtggccaccttcaacagcatcaaggagctgaatgaacgctggaggagcctgcagcagctggccgaggagaggagccagctgctgggcagcgcccacgaggtgcagcgcttccacagagatgctgatgagaccaaggagtggattgaggagaagaaccaggccctgaacacagacaactacggccatgacctggcctctgtgcaggccctgcagaggaagcatgagggctttgagcgggacctggccgccctgggggacaaggtgaacagcctgggggagacagctgagcggctcatccagagccaccctgagagcgctgaggacctgcaggagaagtgcacagagctgaaccaggcctggagcagcctgggcaagagagctgaccagaggaaggccaagctgggggacagccatgacctgcagcgcttcctgagtgacttccgggacctgatgtcctggatcaatggcatccggggcctggtgtccagtgatgagctggccaaggatgtgactggagctgaggccctgctggagcggcaccaggagcacaggacagaaattgatgcccgggccggcaccttccaggcctttgagcagtttggccagcagctgctggcccacggccactacgccagccctgagatcaagcagaagctggacatcctggaccaggagagagctgacctggagaaggcctgggtgcagaggaggatgatgctggaccagtgcctggagctgcagctgttccaccgggactgtgagcaggccgagaactggatggccgcccgggaggccttcctgaacacagaagataaaggagacagcctggacagcgtggaggccctgatcaagaagcatgaggactttgacaaggccatcaacgtgcaggaggagaagattgctgccctgcaggcctttgctgaccagctgattgctgctggccactacgccaagggggacatcagcagcagaagaaatgaggtgctggaccgctggaggcggctgaaggcccagatgattgagaagaggagcaagctgggggagagccagaccctgcagcagttcagcagagatgtggatgaaattgaggcctggatcagcgagaagctgcagacagccagtgatgagagctacaaggaccccaccaacatccagagcaagcaccagaagcaccaggcctttgaagctgagctgcacgccaatgctgaccgcatccggggcgtcatcgacatgggcaacagcctgattgagcggggggcctgtgccggctctgaagatgctgtgaaggcccggctggccgccctggccgaccagtggcagttcctggtgcagaagtctgctgagaagagccagaagctgaaggaggccaacaagcagcagaacttcaacacaggcatcaaggactttgacttctggctgtctgaggtggaggccctgctggccagcgaggactatggcaaggacctggcctctgtgaacaacctgctgaagaagcaccagctgctggaggccgacatcagcgcccatgaagatcggctgaaggacctgaacagccaggccgacagcctgatgaccagcagcgcctttgacaccagccaggtgaaggacaagagggacaccatcaatggccgcttccagaagatcaagtccatggccgccagccggcgggccaagctgaatgaaagccaccggctgcaccagttcttccgggacatggatgatgaggagagctggatcaaggagaagaagctgctggtgggcagcgaggactatggccgggacctgactggagtgcagaacctgaggaagaagcacaagaggctggaggccgagctggccgcccacgagcccgccatccagggcgtgctggacaccgggaagaagctgagtgatgacaacaccatcggcaaggaggagatccagcagaggctggcccagtttgtggagcactggaaggagctgaagcagctggccgccgcccggggccagaggctggaggagagcctggagtaccagcagtttgtggccaacgtggaggaggaggaggcctggatcaatgagaagatgaccctggtggccagcgaggactatggagacaccctggccgccatccagggcctgctgaagaagcatgaggcctttgaaacagacttcaccgtgcacaaggacagagtgaatgatgtgtgcaccaacggccaggacctgatcaagaagaacaaccaccacgaggagaacatcagcagcaagatgaagggcctgaatggcaaggtgtctgacctggagaaggctgctgcccagaggaaggccaagctggatgagaacagcgccttcctgcagttcaactggaaggcagatgtggtggagagctggattggagagaaggagaacagcctgaagacagatgattatggccgggacctgagctctgtgcagaccctgctgaccaagcaggagacctttgatgctggcctgcaggccttccagcaggagggcatcgccaacatcacagccctgaaggaccagctgctggccgccaagcacgtgcagagcaaggccatcgaggcccggcatgccagcctgatgaagcgctggagccagctgctggccaacagcgctgccaggaagaagaagctgctggaggcccagagccacttcaggaaggtggaggacctcttcctgacctttgccaagaaggccagcgccttcaacagctggtttgaaaatgctgaggaggacctgacagatcctgtgcgctgcaacagcctggaggagatcaaggccctgcgggaggcccatgatgccttccgcagcagcctgagcagcgcccaggccgacttcaaccagctggccgagctggaccggcagatcaagagcttccgggtggccagcaacccctacacctggttcaccatggaggccctggaggagacctggaggaacctgcagaagatcatcaaggagcgggagctggagctgcagaaggagcagaggcggcaggaggagaatgacaagctgcggcaggagtttgcccagcacgccaatgccttccaccagtggatccaggagaccaggacctacctgctggatggcagctgcatggtggaggagagcggcaccctggagagccagctggaggccaccaagaggaagcaccaggagatccgggccatgaggagccagctgaagaagattgaggacctgggcgccgccatggaggaggccctgatcctggacaacaagtacacagagcacagcacagtgggcctggcccagcagtgggaccagctggaccagctgggcatgaggatgcagcacaacctggagcagcagatccaggccaggaacaccaccggggtgacagaggaggccctgaaggagttctccatgatgttcaagcactttgacaaggacaagagcggccgcctgaaccaccaggagttcaagagctgcctgcggagcctgggctatgacctgcccatggtggaggagggggagccagaccctgagtttgaggccatcctggacacagtggaccccaacagagatggccacgtgtccctgcaggagtacatggccttcatgatcagccgggagacagaaaatgtgaagagcagcgaggagattgaaagtgccttccgggccctgagcagcgagggcaagccctacgtgaccaaggaggagctgtaccagaacctgacccgggagcaggccgactactgtgtgagccacatgaagccctacgtggatggcaagggccgggagctgcccacagcctttgattatgtggagttcaccaggagcctgtttgtgaactag

SEQ ID NO: 171293 - DNA, 7434 bp, synthetic construct
  misc_feature 1..7434: note = Description of Artificial Sequence: Synthetic coding sequence
  source 1..7434: mol_type = other DNA
atggaccccagcggcgtgaaggtgctggagacagctgaggacatccaggagcggcggcagcaggtgctggaccgctaccaccgcttcaaggagctgagcaccctgcggcggcagaagctggaggacagctaccgcttccagttcttccagagagatgctgaggagctggagaagtggatccaggagaagctgcagatcgccagtgatgagaactacaaggaccccaccaacctgcagggcaagctgcagaagcaccaggcctttgaggccgaggtgcaggccaacagcggggccatcgtgaagctggatgaaacaggcaacctgatgatcagcgagggccactttgccagcgagaccatccgcacccggctgatggagctgcaccggcagtgggagctgctgctggagaagatgagggagaagggcatcaagctgctgcaggcccagaagctggtgcagtacctgagagaatgtgaagatgtgatggactggatcaatgacaaggaggccatcgtgaccagcgaggagctgggccaggacctggagcacgtggaggtgctgcagaagaagtttgaggagttccagacagacatggccgcccacgaggagcgggtgaatgaggtgaaccagtttgctgccaagctgatccaggagcagcaccctgaggaggagctgatcaagaccaagcaggatgaggtgaatgctgcctggcagaggctgaagggcctggccctgcagaggcagggcaagctgtttggagctgctgaggtgcagcgcttcaacagagatgtggatgagaccatctcctggatcaaggagaaggagcagctgatggccagtgatgactttggccgggacctggcctctgtgcaggccctgctgaggaagcatgagggcctggagcgggacctggccgccctggaggacaaggtgaaggccctgtgtgccgaggccgaccggctgcagcagagccaccccctgagcgccacccagatccaggtgaagcgggaggagctgatcaccaactgggagcagatccgcaccctggccgctgagagacatgcccggctgaatgacagctaccgcctgcagcgcttcctggccgacttccgggacctgacctcctgggtgacagagatgaaggccctgatcaatgctgatgagctggccagtgatgtggccggggctgaggccctgctggacagacaccaggagcacaagggggagattgatgcccacgaggacagcttcaagtctgcagatgaaagtggccaggccctgctggccgccggccactacgccagtgatgaggtgcgggagaagctgactgtgctgtctgaggagcgggccgccctgctggagctgtgggagctgcggcggcagcagtatgagcagtgcatggacctgcagctgttctacagagacacagagcaggtggacaactggatgagcaagcaggaggccttcctgctgaatgaagacctgggggacagcctggacagcgtggaggccctgctgaagaagcatgaggactttgagaagagcctgagcgcccaggaggagaagatcacagccctggatgaatttgccaccaagctgatccagaacaaccactacgccatggaggatgtggccaccaggagagatgccctgctgagcagaagaaatgccctgcacgagcgggccatgagaagaagagcccagctggccgacagcttccacctgcagcagttcttccgggacagtgatgagctgaagtcctgggtgaatgagaagatgaagacagccacagatgaggcctacaaggaccccagcaacctgcagggcaaggtgcagaagcaccaggcctttgaagctgagctgagcgccaaccagagcagaattgatgccctggagaaggccggccagaagctgattgatgtgaaccactacgccaaggatgaggtggccgccaggatgaatgaggtgatcagcctgtggaagaagctgctggaggccacagagctgaagggcatcaagctgcgggaggccaaccagcagcagcagttcaacagaaatgtggaggacatcgagctgtggctgtatgaggtggagggccacctggccagtgatgattatggcaaggacctgaccaacgtgcagaacctgcagaagaagcacgccctgctggaggctgatgtggccgcccaccaggacagaattgatggcatcaccatccaggcccggcagttccaggatgctggccactttgatgctgagaacatcaagaagaagcaggaggccctggtggcccgctatgaggccctgaaggagcccatggtggccaggaagcagaagctggccgacagcctgcggctgcagcagctgttcagagatgtggaggatgaggagacctggatccgggagaaggagcccatcgccgccagcaccaacagaggcaaggacctgattggagtgcagaacctgctgaagaagcaccaggccctgcaggccgagattgctggccacgagccccgcatcaaggctgtgacccagaagggaaatgccatggtggaggagggccactttgctgctgaagatgtgaaggccaagctgcacgagctgaaccagaagtgggaggccctgaaggccaaggccagccagaggcggcaggacctggaggacagcctgcaggcccagcagtactttgctgatgccaatgaggccgagagctggatgagggagaaggagcccatcgtgggcagcacagattatggcaaggatgaggacagcgctgaggccctgctgaagaagcatgaggccctgatgtctgacctgagcgcctacggcagcagcatccaggccctgcgggagcaggcccagagctgccggcagcaggtggcccccacagatgatgaaacaggcaaggagctggtgctggccctgtatgactaccaggagaagagcccccgggaggtgaccatgaagaagggggacatcctgaccctgctgaacagcaccaacaaggactggtggaaggtggaggtgaatgaccggcagggctttgtgcctgctgcctacgtgaagaagctggaccctgcccagagcgccagccgggagaacctgctggaggagcagggcagcatcgccctgcggcaggagcagattgacaaccagacccgcatcaccaaggaggccggctctgtgtccctgaggatgaagcaggtggaggagctgtaccacagcctgctggagctgggggagaagaggaagggcatgctggagaagagctgcaagaagttcatgctgttccgggaggccaatgagctgcagcagtggatcaatgagaaggaggccgccctgaccagcgaggaggtgggcgctgacctggagcaggtggaggtgctgcagaagaagtttgatgacttccagaaggacctgaaggccaatgaaagccggctgaaggacatcaacaaggtggccgaggacctggagagcgagggcctgatggccgaggaggtgcaggccgtgcagcagcaggaggtgtatggcatgatgcccagagatgaaacagacagcaagacagccagcccctggaagagcgcccggctgatggtgcacacagtggccaccttcaacagcatcaaggagctgaatgaacgctggaggagcctgcagcagctggccgaggagaggagccagctgctgggcagcgcccacgaggtgcagcgcttccacagagatgctgatgagaccaaggagtggattgaggagaagaaccaggccctgaacacagacaactacggccatgacctggcctctgtgcaggccctgcagaggaagcatgagggctttgagcgggacctggccgccctgggggacaaggtgaacagcctgggggagacagctgagcggctcatccagagccaccctgagagcgctgaggacctgcaggagaagtgcacagagctgaaccaggcctggagcagcctgggcaagagagctgaccagaggaaggccaagctgggggacagccatgacctgcagcgcttcctgagtgacttccgggacctgatgtcctggatcaatggcatccggggcctggtgtccagtgatgagctggccaaggatgtgactggagctgaggccctgctggagcggcaccaggagcacaggacagaaattgatgcccgggccggcaccttccaggcctttgagcagtttggccagcagctgctggcccacggccactacgccagccctgagatcaagcagaagctggacatcctggaccaggagagagctgacctggagaaggcctgggtgcagaggaggatgatgctggaccagtgcctggagctgcagctgttccaccgggactgtgagcaggccgagaactggatggccgcccgggaggccttcctgaacacagaagataaaggagacagcctggacagcgtggaggccctgatcaagaagcatgaggactttgacaaggccatcaacgtgcaggaggagaagattgctgccctgcaggcctttgctgaccagctgattgctgctggccactacgccaagggggacatcagcagcagaagaaatgaggtgctggaccgctggaggcggctgaaggcccagatgattgagaagaggagcaagctgggggagagccagaccctgcagcagttcagcagagatgtggatgaaattgaggcctggatcagcgagaagctgcagacagccagtgatgagagctacaaggaccccaccaacatccagctgagcaagctgctgagcaagcaccagaagcaccaggcctttgaggccgagctgcacgccaatgctgaccgcatccggggcgtgattgacatgggcaacagcctcatcgagcggggggcctgtgccggctctgaagatgctgtgaaggcccggctggccgccctggccgaccagtggcagttcctggtgcagaagtctgctgagaagagccagaagctgaaggaggccaacaagcagcagaacttcaacacaggcatcaaggactttgacttctggctgtctgaggtggaggccctgctggcctctgaagattatggcaaggacctggcctctgtgaacaacctgctgaagaagcaccagctgctggaggccgacatcagcgcccacgaggaccggctgaaggacctgaacagccaggccgacagcctgatgaccagcagcgcctttgacaccagccaggtgaaggacaagagggacaccatcaatggccgcttccagaagatcaagtccatggccgccagcagaagagccaagctgaatgaaagccaccggctgcaccagttcttccgggacatggatgatgaggagagctggatcaaggagaagaagctgctggtgggctctgaagattatggccgggacctgactggagtgcagaacctgaggaagaagcacaagaggctggaggccgagctggccgcccacgagcccgccatccagggcgtgctggacaccgggaagaagctgagtgatgacaacaccatcggcaaggaggagatccagcagaggctggcccagtttgtggagcactggaaggagctgaagcagctggccgccgcccggggccagaggctggaggagagcctggagtaccagcagtttgtggccaacgtggaggaggaggaggcctggatcaatgagaagatgaccctggtggcctctgaagattatggagacaccctggccgccatccagggcctgctgaagaagcatgaggcctttgaaacagacttcaccgtgcacaaggacagagtgaatgatgtgtgcaccaacggccaggacctgatcaagaagaacaaccaccacgaggagaacatcagcagcaagatgaagggcctgaatggcaaggtgtctgacctggagaaggccgccgcccagaggaaggccaagctggatgaaaattctgccttcctgcagttcaactggaaggcagatgtggtggagagctggattggagagaaggagaacagcctgaagacagatgattatggccgggacctgagctctgtgcagaccctgctgaccaagcaggagacctttgatgctggcctgcaggccttccagcaggagggcatcgccaacatcacagccctgaaggaccagctgctggccgccaagcacgtgcagagcaaggccatcgaggcccggcatgccagcctgatgaagcgctggagccagctgctggccaacagcgctgccaggaagaagaagctgctggaggcccagagccacttcaggaaggtggaggacctcttcctgacctttgccaagaaggccagcgccttcaacagctggtttgaaaatgctgaggaggacctgacagatcctgtgcgctgcaacagcctggaggagatcaaggccctgcgggaggcccatgatgccttccgcagcagcctgagcagcgcccaggccgacttcaaccagctggccgagctggaccggcagatcaagagcttccgggtggccagcaacccctacacctggttcaccatggaggccctggaggagacctggaggaacctgcagaagatcatcaaggagcgggagctggagctgcagaaggagcagaggcggcaggaggagaatgacaagctgcggcaggagtttgcccagcacgccaatgccttccaccagtggatccaggagaccaggacctacctgctggatggcagctgcatggtggaggagagcggcaccctggagagccagctggaggccaccaagaggaagcaccaggagatccgggccatgaggagccagctgaagaagattgaggacctgggcgccgccatggaggaggccctgatcctggacaacaagtacacagagcacagcacagtgggcctggcccagcagtgggaccagctggaccagctgggcatgaggatgcagcacaacctggagcagcagatccaggccaggaacaccactggagtgacagaggaggccctgaaggagttctccatgatgttcaagcactttgacaaggacaagagcggccgcctgaaccaccaggagttcaagagctgcctgcggagcctgggctatgacctgcccatggtggaggagggggagccagaccctgagtttgaggccatcctggacacagtggaccccaacagagatggccacgtgtccctgcaggagtacatggccttcatgatcagccgggagacagaaaatgtgaagagcagcgaggagattgagagcgccttccgggccctgagcagcgagggcaagccctacgtgaccaaggaggagctgtaccagaacctgacccgggagcaggccgactactgtgtgagccacatgaagccctacgtggatggcaagggccgggagctgcccacagcctttgattatgtggagttcaccaggagcctgtttgtgaactag

SEQ ID NO: 171294 - DNA, 3444 bp, synthetic construct
  misc_feature 1..3444: note = Description of Artificial Sequence: Synthetic coding sequence
  source 1..3444: mol_type = other DNA
atggagaacaacagagacaaggtgctgagccctgtggacagcggcaacaagctggtggccgagggcaacctgtacagcgacaagatcaaggagaaggtgcagctgattgaagatagacacaggaagaacaatgagaaggcccaggaggcctctgtgctgctgcgggacaacctggagctgcagaacttcctgcagaactgccaggagctgaccctgtggatcaatgacaagctgctgaccagccaggatgtgtcctatgatgaggccaggaacctgcacaacaagtggctgaagcaccaggcctttgtggccgagctggccagccatgagggctggctggagaacattgatgctgagggcaagcagctgatggatgagaagccccagttcaccgccctggtgtcccagaagctggaggccctgcaccggctgtgggatgagctgcaggccaccaccaaggagaagacccagcacctgtctgctgcccggagcagtgacctgcggctgcagacccatgctgacctgaacaagtggatcagcgccatggaggaccagctgcggagtgatgatcctgggaaggacctgacctctgtgaacaggatgctggccaagctgaagagggtggaggaccaggtgaatgtgaggaaggaggagctgggggagctgtttgcccaggtgcccagcatgggagaggagggcggagatgctgacctgagcattgagaagcgcttcctggacctgctggagcccctgggccgcaggaagaagcagctggagagcagccgggccaagctgcagatcagccgggacctggaggatgagaccctgtgggtggaggagcggctgcccctggcccagagcgctgactatggcaccaacctgcagacagtgcagctgttcatgaagaagaaccagaccctgcagaatgagatcctgggccacaccccccgggtggaggatgtgctgcagaggggccagcagctggtggaggccgctgagattgactgccaggacctggaggagcggctgggccacctgcagagctcctgggaccggctgcgggaggccgccgccggccgcctgcagaggctgagagatgccaatgaggcccagcagtactacctggatgctgatgaggccgaggcctggattggagagcaggagctgtatgtgatcagtgatgagatccccaaggatgaggagggcgccatcgtgatgctgaagaggcacctgcggcagcagagagctgtggaggactatggcaggaacatcaagcagctggccagccgggcccagggcctgctgtctgctggccaccctgagggggagcagatcatccggctgcagggccaggtggacaagcactacgccggcctgaaggatgtggccgaggagaggaagaggaagctggagaacatgtaccacctgttccagctgaagcgggagacagatgacctggagcagtggatcagcgagaaggagctggtggccagcagccctgagatgggccaggactttgaccacgtgaccctgctgcgggacaagttccgggactttgcccgggagactggagccatcggccaggagcgggtggacaacgtgaatgccttcatcgagcggctgattgatgctggccacagcgaggccgccaccatcgccgagtggaaggatggcctgaatgagatgtgggccgacctgctggagctgattgacaccaggatgcagctgctggccgccagctatgacctgcaccgctacttctacacaggagctgagatcctgggcctgattgatgagaagcaccgggagctgcctgaagatgtgggcctggatgccagcacagctgagagcttccaccgggtgcacacagcctttgagcgggagctgcacctgctgggcgtgcaggtgcagcagttccaggatgtggccacccggctgcagacagcctatgctggggagaaggccgaggccatccagaacaaggagcaggaggtgtctgctgcctggcaggccctgctggatgcctgtgccggccgccgcacccagctggtggacacagctgacaagttccgcttcttctccatggcccgggacctgctgtcctggatggagagcatcatccggcagatcgagacccaggagcggcccagagatgtgtcctctgtggagctgctgatgaagtaccaccagggcatcaatgctgagattgagaccaggagcaagaacttcagcgcctgcctggagctgggggagagcctgctgcagaggcagcaccaggccagcgaggagatccgggagaagctgcagcaggtgatgagcaggaggaaggagatgaatgagaagtgggaggcccgctgggagcggctgaggatgctgctggaggtgtgccagttcagcagagatgcctctgtggccgaggcctggctgattgcccaggagccctacctggccagcggggactttggccacacagtggacagcgtggagaagctgatcaagagacatgaggcctttgagaagagcacagcctcctgggccgagagatttgctgccctggagaagcccaccaccctggagctgaaggagcggcagattgctgagaggcctgctgaggagaccggcccccaggaggaggagggggagacagctggggaggcccctgtgagccaccacgccgccacagagaggaccagccctggagaggaggagggcacctggccccagaacctgcagcagcccccacctcctggccagcacaaggatggccagaagagcactggagatgagcggcccaccacagagcccctcttcaaggtgctggacacccccctgtctgaaggagatgagcccgccaccctgcctgccccccgggaccacggccagagcgtgcagatggagggctacctgggcaggaagcatgacctggagggccccaacaagaaggccagcaacagcaagggggaggagggggaggagcggcgggagacagaggaggaggatgaggaggaggaggagacagagagcgtggccgtggagatgcagcagcacgccagccacgtgtcctggaacaacctgtactgtgtgctgaggaacagcgagctgaccttctacaaggatgccaagaacctggccctgggcatgccctaccacggggaggagcccctggccctgcggcatgccatctgtgaaattgctgccaactacaagaagaagaagcacgtgttcaagctgcggctgagcaatggaagtgagtggctgttccacggcaaggatgaggaggagatgctgtcctggctgcagggcgtgtccacagccatcaatgaaagccagagcatccgggtgaaggcccagagcctgcccctgcccagcctgagcggcccagatgccagcctgggcaagaaggacaaggagaagcgcttctccttcttccccaagaagaagtag

SEQ ID NO: 171295 - DNA, 6321 bp, synthetic construct
  misc_feature 1..6321: note = Description of Artificial Sequence: Synthetic coding sequence
  source 1..6321: mol_type = other DNA
atgaccagcgccacagaatttgaaaatgtgggcaaccagcccccctacagccgcatcaatgcccgctgggatgccccagatgatgagctggacaatgacaacagcagcgcccggctgtttgagaggagccgcatcaaggccctggctgatgagcgggaggtggtgcagaagaagaccttcaccaagtgggtgaacagccacctggcccgggtgtcctgccgcatcacagacctgtacaaggacctgagagatggccgcatgctgatcaagctgctggaggtgctgagcggggagatgctgcccaagcccaccaagggcaagatgaggatccactgcctggagaatgtggacaaggccctgcagttcctgaaggagcagagggtgcacctggagaacatgggcagccatgacatcgtggatggcaaccaccggctggtgctgggcctcatctggaccatcatcctgcgcttccagatccaggacatcgtggtgcagacccaggagggccgggagaccaggtctgccaaggatgccctgctgctgtggtgccagatgaagacagctggctacccccacgtgaatgtgaccaacttcaccagctcctggaaggatggcctggccttcaatgccctgatccacaagcacaggccagacctgattgactttgacaagctgaaggacagcaatgcccggcacaacctggagcacgccttcaacgtggccgagcggcagctgggcatcatccccctgctggaccctgaagatgtgttcacagaaaatccagatgagaagagcatcatcacctacgtggtggccttctaccactacttcagcaagatgaaggtgctggccgtggagggcaagagggtgggcaaggtgattgaccacgccatcgagacagagaagatgattgagaagtacagcggcctggccagtgacctgctgacctggattgagcagaccatcaccgtgctgaacagcaggaagtttgccaacagcctgactggagtgcagcagcagctgcaggccttcagcacctacagaacagtggagaagccacccaagttccaggagaagggcaacctggaggtgctgctcttcaccatccagagcaggatgagggccaacaaccagaaggtgtacacccctcatgatggcaagctggtgtctgacatcaacagagcctgggagagcctggaggaggccgagtacagaagagagctggccctgagaaatgagctgatccggcaggagaagctggagcagctggccaggagatttgacaggaaggccgccatgagggagacctggctgtctgagaaccagaggctggtggcccaggacaactttggctatgacctggccgctgtggaggccgccaagaagaagcatgaggccattgaaacagacacagctgcctatgaggagcgggtgcgggccctggaggacctggcccaggagctggagaaggagaactaccatgaccagaagaggatcacagccaggaaggacaacatcctgcggctgtggagctacctgcaggagctgctgcagagccggcggcagaggctggagaccaccctggccctgcagaagctgttccaggacatgctgcacagcattgactggatggatgagatcaaggcccacctgctgtctgctgagtttgggaagcacctgctggaggtggaggacctgctgcagaagcacaagctgatggaggccgacatcgccatccagggcgacaaggtgaaggccatcacagctgccaccctgaagttcacagagggcaagggctaccagccctgtgacccccaggtgatccaggaccgcatcagccacctggagcagtgctttgaggagctgagcaacatggctgctggcaggaaggcccagctggagcagagcaagaggctgtggaagttcttctgggagatggatgaagctgagagctggatcaaggagaaggagcagatctacagcagcctggactatggcaaggacctgacctctgtgctgatcctgcagaggaagcacaaggcctttgaagatgagctgcggggcctggatgcccacctggagcagatcttccaggaggcccacggcatggtggccaggaagcagtttggccacccccagatcgaggcccgcatcaaggaggtgtctgcccagtgggaccagctgaaggacctggccgccttctgcaagaagaacctgcaggatgctgagaacttcttccagttccagggagatgctgatgacctgaaggcctggctgcaggatgcccaccggctgctgtctggagaagatgtgggccaggatgagggcgccacccgggccctgggcaagaagcacaaggacttcctggaggagctggaggagagcagaggagtgatggagcacctggagcagcaggcccagggcttccctgaggagttccgggacagcccagatgtgacccaccggctgcaggccctgcgggagctgtaccagcaggtggtggcccaggccgacctgcggcagcagaggctgcaggaggccctggacctgtacacagtgtttggagaaacagatgcctgtgagctgtggatgggagagaaggagaagtggctggccgagatggagatgccagacaccctggaggacctggaggtggtgcagcacagatttgacatcctggaccaggagatgaagaccctgatgacccagattgatggagtgaacctggccgccaacagcctggtggagagcggccaccccaggagccgggaggtgaagcagtaccaggaccacctgaacacccgctggcaggccttccagaccctggtgtctgagcggcgggaggccgtggacagcgccctgcgggtgcacaactactgtgtggactgtgaggagaccagcaagtggatcacagacaagaccaaggtggtggagagcaccaaggacctgggccgggacctggccggcatcatcgccatccagaggaagctgagcggcctggagagagatgtggccgccatccaggcccgggtggatgccctggagcgggagagccagcagctgatggacagccaccctgagcagaaggaggacatcggccagaggcagaagcacctggaggagctgtggcagggcctgcagcagagcctgcagggccaggaggacctgctgggggaggtgtcccagctgcaggccttcctgcaggacctggatgacttccaggcctggctgagcatcacccagaaggctgtggccagcgaggacatgcctgagagcctgcctgaggccgagcagctgctgcagcagcacgccggcatcaaggatgaaattgatggccaccaggacagctaccagagggtgaaggagagcggggagaaggtgatccagggccagacagatcctgagtacctgctgctgggccagaggctggagggcctggacaccggctggaatgccctgggccgcatgtgggagagccgcagccacaccctggcccagtgcctgggcttccaggagttccagaaggatgccaagcaggccgaggccatcctgagcaaccaggagtacaccctggcccacctggagcccccagacagcctggaggccgctgaggccggcatcaggaagtttgaggacttcctgggctccatggagaacaacagagacaaggtgctgagccctgtggacagcggcaacaagctggtggccgagggcaacctgtacagcgacaagatcaaggagaaggtgcagctgattgaagatagacacaggaagaacaatgagaaggcccaggaggcctctgtgctgctgcgggacaacctggagctgcagaacttcctgcagaactgccaggagctgaccctgtggatcaatgacaagctgctgaccagccaggatgtgtcctatgatgaggccaggaacctgcacaacaagtggctgaagcaccaggcctttgtggccgagctggccagccatgagggctggctggagaacattgatgctgagggcaagcagctgatggatgagaagccccagttcaccgccctggtgtcccagaagctggaggccctgcaccggctgtgggatgagctgcaggccaccaccaaggagaagacccagcacctgtctgctgcccggagcagtgacctgcggctgcagacccatgctgacctgaacaagtggatcagcgccatggaggaccagctgcggagtgatgatcctgggaaggacctgacctctgtgaacaggatgctggccaagctgaagagggtggaggaccaggtgaatgtgaggaaggaggagctgggggagctgtttgcccaggtgcccagcatgggagaggagggcggagatgctgacctgagcattgagaagcgcttcctggacctgctggagcccctgggccgcaggaagaagcagctggagagcagccgggccaagctgcagatcagccgggacctggaggatgagaccctgtgggtggaggagcggctgcccctggcccagagcgctgactatggcaccaacctgcagacagtgcagctgttcatgaagaagaaccagaccctgcagaatgagatcctgggccacaccccccgggtggaggatgtgctgcagaggggccagcagctggtggaggccgctgagattgactgccaggacctggaggagcggctgggccacctgcagagctcctgggaccggctgcgggaggccgccgccggccgcctgcagaggctgagagatgccaatgaggcccagcagtactacctggatgctgatgaggccgaggcctggattggagagcaggagctgtatgtgatcagtgatgagatccccaaggatgaggagggcgccatcgtgatgctgaagaggcacctgcggcagcagagagctgtggaggactatggcaggaacatcaagcagctggccagccgggcccagggcctgctgtctgctggccaccctgagggggagcagatcatccggctgcagggccaggtggacaagcactacgccggcctgaaggatgtggccgaggagaggaagaggaagctggagaacatgtaccacctgttccagctgaagcgggagacagatgacctggagcagtggatcagcgagaaggagctggtggccagcagccctgagatgggccaggactttgaccacgtgaccctgctgcgggacaagttccgggactttgcccgggagactggagccatcggccaggagcgggtggacaacgtgaatgccttcatcgagcggctgattgatgctggccacagcgaggccgccaccatcgccgagtggaaggatggcctgaatgagatgtgggccgacctgctggagctgattgacaccaggatgcagctgctggccgccagctatgacctgcaccgctacttctacacaggagctgagatcctgggcctgattgatgagaagcaccgggagctgcctgaagatgtgggcctggatgccagcacagctgagagcttccaccgggtgcacacagcctttgagcgggagctgcacctgctgggcgtgcaggtgcagcagttccaggatgtggccacccggctgcagacagcctatgctggggagaaggccgaggccatccagaacaaggagcaggaggtgtctgctgcctggcaggccctgctggatgcctgtgccggccgccgcacccagctggtggacacagctgacaagttccgcttcttctccatggcccgggacctgctgtcctggatggagagcatcatccggcagatcgagacccaggagcggcccagagatgtgtcctctgtggagctgctgatgaagtaccaccagggcatcaatgctgagattgagaccaggagcaagaacttcagcgcctgcctggagctgggggagagcctgctgcagaggcagcaccaggccagcgaggagatccgggagaagctgcagcaggtgatgagcaggaggaaggagatgaatgagaagtgggaggcccgctgggagcggctgaggatgctgctggaggtgtgccagttcagcagagatgcctctgtggccgaggcctggctgattgcccaggagccctacctggccagcggggactttggccacacagtggacagcgtggagaagctgatcaagagacatgaggcctttgagaagagcacagcctcctgggccgagagatttgctgccctggagaagcccaccacagccagcagaggaggaagaagagacagccggggcggcagcagcttccccccctgtggccacagagaaaatgtgcccggccagagcctggtgtcctttgtgtag

SEQ ID NO: 171296 - DNA, 6414 bp, synthetic construct
  misc_feature 1..6414: note = Description of Artificial Sequence: Synthetic coding sequence
  source 1..6414: mol_type = other DNA
atgaccagcgccacagaatttgaaaatgtgggcaaccagcccccctacagccgcatcaatgcccgctgggatgccccagatgatgagctggacaatgacaacagcagcgcccggctgtttgagaggagccgcatcaaggccctggctgatgagcgggaggtggtgcagaagaagaccttcaccaagtgggtgaacagccacctggcccgggtgtcctgccgcatcacagacctgtacaaggacctgagagatggccgcatgctgatcaagctgctggaggtgctgagcggggagatgctgcccaagcccaccaagggcaagatgaggatccactgcctggagaatgtggacaaggccctgcagttcctgaaggagcagagggtgcacctggagaacatgggcagccatgacatcgtggatggcaaccaccggctggtgctgggcctcatctggaccatcatcctgcgcttccagatccaggacatcgtggtgcagacccaggagggccgggagaccaggtctgccaaggatgccctgctgctgtggtgccagatgaagacagctggctacccccacgtgaatgtgaccaacttcaccagctcctggaaggatggcctggccttcaatgccctgatccacaagcacaggccagacctgattgactttgacaagctgaaggacagcaatgcccggcacaacctggagcacgccttcaacgtggccgagcggcagctgggcatcatccccctgctggaccctgaagatgtgttcacagaaaatccagatgagaagagcatcatcacctacgtggtggccttctaccactacttcagcaagatgaaggtgctggccgtggagggcaagagggtgggcaaggtgattgaccacgccatcgagacagagaagatgattgagaagtacagcggcctggccagtgacctgctgacctggattgagcagaccatcaccgtgctgaacagcaggaagtttgccaacagcctgactggagtgcagcagcagctgcaggccttcagcacctacagaacagtggagaagccacccaagttccaggagaagggcaacctggaggtgctgctcttcaccatccagagcaggatgagggccaacaaccagaaggtgtacacccctcatgatggcaagctggtgtctgacatcaacagagcctgggagagcctggaggaggccgagtacagaagagagctggccctgagaaatgagctgatccggcaggagaagctggagcagctggccaggagatttgacaggaaggccgccatgagggagacctggctgtctgagaaccagaggctggtggcccaggacaactttggctatgacctggccgctgtggaggccgccaagaagaagcatgaggccattgaaacagacacagctgcctatgaggagcgggtgcgggccctggaggacctggcccaggagctggagaaggagaactaccatgaccagaagaggatcacagccaggaaggacaacatcctgcggctgtggagctacctgcaggagctgctgcagagccggcggcagaggctggagaccaccctggccctgcagaagctgttccaggacatgctgcacagcattgactggatggatgagatcaaggcccacctgctgtctgctgagtttgggaagcacctgctggaggtggaggacctgctgcagaagcacaagctgatggaggccgacatcgccatccagggcgacaaggtgaaggccatcacagctgccaccctgaagttcacagagggcaagggctaccagccctgtgacccccaggtgatccaggaccgcatcagccacctggagcagtgctttgaggagctgagcaacatggctgctggcaggaaggcccagctggagcagagcaagaggctgtggaagttcttctgggagatggatgaagctgagagctggatcaaggagaaggagcagatctacagcagcctggactatggcaaggacctgacctctgtgctgatcctgcagaggaagcacaaggcctttgaagatgagctgcggggcctggatgcccacctggagcagatcttccaggaggcccacggcatggtggccaggaagcagtttggccacccccagatcgaggcccgcatcaaggaggtgtctgcccagtgggaccagctgaaggacctggccgccttctgcaagaagaacctgcaggatgctgagaacttcttccagttccagggagatgctgatgacctgaaggcctggctgcaggatgcccaccggctgctgtctggagaagatgtgggccaggatgagggcgccacccgggccctgggcaagaagcacaaggacttcctggaggagctggaggagagcagaggagtgatggagcacctggagcagcaggcccagggcttccctgaggagttccgggacagcccagatgtgacccaccggctgcaggccctgcgggagctgtaccagcaggtggtggcccaggccgacctgcggcagcagaggctgcaggaggccctggacctgtacacagtgtttggagaaacagatgcctgtgagctgtggatgggagagaaggagaagtggctggccgagatggagatgccagacaccctggaggacctggaggtggtgcagcacagatttgacatcctggaccaggagatgaagaccctgatgacccagattgatggagtgaacctggccgccaacagcctggtggagagcggccaccccaggagccgggaggtgaagcagtaccaggaccacctgaacacccgctggcaggccttccagaccctggtgtctgagcggcgggaggccgtggacagcgccctgcgggtgcacaactactgtgtggactgtgaggagaccagcaagtggatcacagacaagaccaaggtggtggagagcaccaaggacctgggccgggacctggccggcatcatcgccatccagaggaagctgagcggcctggagagagatgtggccgccatccaggcccgggtggatgccctggagcgggagagccagcagctgatggacagccaccctgagcagaaggaggacatcggccagaggcagaagcacctggaggagctgtggcagggcctgcagcagagcctgcagggccaggaggacctgctgggggaggtgtcccagctgcaggccttcctgcaggacctggatgacttccaggcctggctgagcatcacccagaaggctgtggccagcgaggacatgcctgagagcctgcctgaggccgagcagctgctgcagcagcacgccggcatcaaggatgaaattgatggccaccaggacagctaccagagggtgaaggagagcggggagaaggtgatccagggccagacagatcctgagtacctgctgctgggccagaggctggagggcctggacaccggctggaatgccctgggccgcatgtgggagagccgcagccacaccctggcccagtgcctgggcttccaggagttccagaaggatgccaagcaggccgaggccatcctgagcaaccaggagtacaccctggcccacctggagcccccagacagcctggaggccgctgaggccggcatcaggaagtttgaggacttcctgggctccatggagaacaacagagacaaggtgctgagccctgtggacagcggcaacaagctggtggccgagggcaacctgtacagcgacaagatcaaggagaaggtgcagctgattgaagatagacacaggaagaacaatgagaaggcccaggaggcctctgtgctgctgcgggacaacctggagctgcagaacttcctgcagaactgccaggagctgaccctgtggatcaatgacaagctgctgaccagccaggatgtgtcctatgatgaggccaggaacctgcacaacaagtggctgaagcaccaggcctttgtggccgagctggccagccatgagggctggctggagaacattgatgctgagggcaagcagctgatggatgagaagccccagttcaccgccctggtgtcccagaagctggaggccctgcaccggctgtgggatgagctgcaggccaccaccaaggagaagacccagcacctgtctgctgcccggagcagtgacctgcggctgcagacccatgctgacctgaacaagtggatcagcgccatggaggaccagctgcggagtgatgatcctgggaaggacctgacctctgtgaacaggatgctggccaagctgaagagggtggaggaccaggtgaatgtgaggaaggaggagctgggggagctgtttgcccaggtgcccagcatgggagaggagggcggagatgctgacctgagcattgagaagcgcttcctggacctgctggagcccctgggccgcaggaagaagcagctggagagcagccgggccaagctgcagatcagccgggacctggaggatgagaccctgtgggtggaggagcggctgcccctggcccagagcgctgactatggcaccaacctgcagacagtgcagctgttcatgaagaagaaccagaccctgcagaatgagatcctgggccacaccccccgggtggaggatgtgctgcagaggggccagcagctggtggaggccgctgagattgactgccaggacctggaggagcggctgggccacctgcagagctcctgggaccggctgcgggaggccgccgccggccgcctgcagaggctgagagatgccaatgaggcccagcagtactacctggatgctgatgaggccgaggcctggattggagagcaggagctgtatgtgatcagtgatgagatccccaaggatgaggagggcgccatcgtgatgctgaagaggcacctgcggcagcagagagctgtggaggactatggcaggaacatcaagcagctggccagccgggcccagggcctgctgtctgctggccaccctgagggggagcagatcatccggctgcagggccaggtggacaagcactacgccggcctgaaggatgtggccgaggagaggaagaggaagctggagaacatgtaccacctgttccagctgaagcgggagacagatgacctggagcagtggatcagcgagaaggagctggtggccagcagccctgagatgggccaggactttgaccacgtgaccctgctgcgggacaagttccgggactttgcccgggagactggagccatcggccaggagcgggtggacaacgtgaatgccttcatcgagcggctgattgatgctggccacagcgaggccgccaccatcgccgagtggaaggatggcctgaatgagatgtgggccgacctgctggagctgattgacaccaggatgcagctgctggccgccagctatgacctgcaccgctacttctacacaggagctgagatcctgggcctgattgatgagaagcaccgggagctgcctgaagatgtgggcctggatgccagcacagctgagagcttccaccgggtgcacacagcctttgagcgggagctgcacctgctgggcgtgcaggtgcagcagttccaggatgtggccacccggctgcagacagcctatgctggggagaaggccgaggccatccagaacaaggagcaggaggtgtctgctgcctggcaggccctgctggatgcctgtgccggccgccgcacccagctggtggacacagctgacaagttccgcttcttctccatggcccgggacctgctgtcctggatggagagcatcatccggcagatcgagacccaggagcggcccagagatgtgtcctctgtggagctgctgatgaagtaccaccagggcatcaatgctgagattgagaccaggagcaagaacttcagcgcctgcctggagctgggggagagcctgctgcagaggcagcaccaggccagcgaggagatccgggagaagctgcagcaggtgatgagcaggaggaaggagatgaatgagaagtgggaggcccgctgggagcggctgaggatgctgctggaggtgtgccagttcagcagagatgcctctgtggccgaggcctggctgattgcccaggagccctacctggccagcggggactttggccacacagtggacagcgtggagaagctgatcaagagacatgaggcctttgagaagagcacagcctcctgggccgagagatttgctgccctggagaagcccaccaccctggagctgaaggagcggcagattgctgagaggcctgctgaggagaccggcccccaggaggaggagggggagacagctggggaggcccctgtgagccaccacgccgccacagagaggaccagccctgtgtccctgtggagccggctgagcagctcctgggagagcctgcagcctgagcccagccacccctactag

SEQ ID NO: 171297 - DNA, 6987 bp, synthetic construct
  misc_feature 1..6987: note = Description of Artificial Sequence: Synthetic coding sequence
  source 1..6987: mol_type = other DNA
atgaccagcgccacagaatttgaaaatgtgggcaaccagcccccctacagccgcatcaatgcccgctgggatgccccagatgatgagctggacaatgacaacagcagcgcccggctgtttgagaggagccgcatcaaggccctggctgatgagcgggaggtggtgcagaagaagaccttcaccaagtgggtgaacagccacctggcccgggtgtcctgccgcatcacagacctgtacaaggacctgagagatggccgcatgctgatcaagctgctggaggtgctgagcggggagatgctgcccaagcccaccaagggcaagatgaggatccactgcctggagaatgtggacaaggccctgcagttcctgaaggagcagagggtgcacctggagaacatgggcagccatgacatcgtggatggcaaccaccggctggtgctgggcctcatctggaccatcatcctgcgcttccagatccaggacatcgtggtgcagacccaggagggccgggagaccaggtctgccaaggatgccctgctgctgtggtgccagatgaagacagctggctacccccacgtgaatgtgaccaacttcaccagctcctggaaggatggcctggccttcaatgccctgatccacaagcacaggccagacctgattgactttgacaagctgaaggacagcaatgcccggcacaacctggagcacgccttcaacgtggccgagcggcagctgggcatcatccccctgctggaccctgaagatgtgttcacagaaaatccagatgagaagagcatcatcacctacgtggtggccttctaccactacttcagcaagatgaaggtgctggccgtggagggcaagagggtgggcaaggtgattgaccacgccatcgagacagagaagatgattgagaagtacagcggcctggccagtgacctgctgacctggattgagcagaccatcaccgtgctgaacagcaggaagtttgccaacagcctgactggagtgcagcagcagctgcaggccttcagcacctacagaacagtggagaagccacccaagttccaggagaagggcaacctggaggtgctgctcttcaccatccagagcaggatgagggccaacaaccagaaggtgtacacccctcatgatggcaagctggtgtctgacatcaacagagcctgggagagcctggaggaggccgagtacagaagagagctggccctgagaaatgagctgatccggcaggagaagctggagcagctggccaggagatttgacaggaaggccgccatgagggagacctggctgtctgagaaccagaggctggtggcccaggacaactttggctatgacctggccgctgtggaggccgccaagaagaagcatgaggccattgaaacagacacagctgcctatgaggagcgggtgcgggccctggaggacctggcccaggagctggagaaggagaactaccatgaccagaagaggatcacagccaggaaggacaacatcctgcggctgtggagctacctgcaggagctgctgcagagccggcggcagaggctggagaccaccctggccctgcagaagctgttccaggacatgctgcacagcattgactggatggatgagatcaaggcccacctgctgtctgctgagtttgggaagcacctgctggaggtggaggacctgctgcagaagcacaagctgatggaggccgacatcgccatccagggcgacaaggtgaaggccatcacagctgccaccctgaagttcacagagggcaagggctaccagccctgtgacccccaggtgatccaggaccgcatcagccacctggagcagtgctttgaggagctgagcaacatggctgctggcaggaaggcccagctggagcagagcaagaggctgtggaagttcttctgggagatggatgaagctgagagctggatcaaggagaaggagcagatctacagcagcctggactatggcaaggacctgacctctgtgctgatcctgcagaggaagcacaaggcctttgaagatgagctgcggggcctggatgcccacctggagcagatcttccaggaggcccacggcatggtggccaggaagcagtttggccacccccagatcgaggcccgcatcaaggaggtgtctgcccagtgggaccagctgaaggacctggccgccttctgcaagaagaacctgcaggatgctgagaacttcttccagttccagggagatgctgatgacctgaaggcctggctgcaggatgcccaccggctgctgtctggagaagatgtgggccaggatgagggcgccacccgggccctgggcaagaagcacaaggacttcctggaggagctggaggagagcagaggagtgatggagcacctggagcagcaggcccagggcttccctgaggagttccgggacagcccagatgtgacccaccggctgcaggccctgcgggagctgtaccagcaggtggtggcccaggccgacctgcggcagcagaggctgcaggaggccctggacctgtacacagtgtttggagaaacagatgcctgtgagctgtggatgggagagaaggagaagtggctggccgagatggagatgccagacaccctggaggacctggaggtggtgcagcacagatttgacatcctggaccaggagatgaagaccctgatgacccagattgatggagtgaacctggccgccaacagcctggtggagagcggccaccccaggagccgggaggtgaagcagtaccaggaccacctgaacacccgctggcaggccttccagaccctggtgtctgagcggcgggaggccgtggacagcgccctgcgggtgcacaactactgtgtggactgtgaggagaccagcaagtggatcacagacaagaccaaggtggtggagagcaccaaggacctgggccgggacctggccggcatcatcgccatccagaggaagctgagcggcctggagagagatgtggccgccatccaggcccgggtggatgccctggagcgggagagccagcagctgatggacagccaccctgagcagaaggaggacatcggccagaggcagaagcacctggaggagctgtggcagggcctgcagcagagcctgcagggccaggaggacctgctgggggaggtgtcccagctgcaggccttcctgcaggacctggatgacttccaggcctggctgagcatcacccagaaggctgtggccagcgaggacatgcctgagagcctgcctgaggccgagcagctgctgcagcagcacgccggcatcaaggatgaaattgatggccaccaggacagctaccagagggtgaaggagagcggggagaaggtgatccagggccagacagatcctgagtacctgctgctgggccagaggctggagggcctggacaccggctggaatgccctgggccgcatgtgggagagccgcagccacaccctggcccagtgcctgggcttccaggagttccagaaggatgccaagcaggccgaggccatcctgagcaaccaggagtacaccctggcccacctggagcccccagacagcctggaggccgctgaggccggcatcaggaagtttgaggacttcctgggctccatggagaacaacagagacaaggtgctgagccctgtggacagcggcaacaagctggtggccgagggcaacctgtacagcgacaagatcaaggagaaggtgcagctgattgaagatagacacaggaagaacaatgagaaggcccaggaggcctctgtgctgctgcgggacaacctggagctgcagaacttcctgcagaactgccaggagctgaccctgtggatcaatgacaagctgctgaccagccaggatgtgtcctatgatgaggccaggaacctgcacaacaagtggctgaagcaccaggcctttgtggccgagctggccagccatgagggctggctggagaacattgatgctgagggcaagcagctgatggatgagaagccccagttcaccgccctggtgtcccagaagctggaggccctgcaccggctgtgggatgagctgcaggccaccaccaaggagaagacccagcacctgtctgctgcccggagcagtgacctgcggctgcagacccatgctgacctgaacaagtggatcagcgccatggaggaccagctgcggagtgatgatcctgggaaggacctgacctctgtgaacaggatgctggccaagctgaagagggtggaggaccaggtgaatgtgaggaaggaggagctgggggagctgtttgcccaggtgcccagcatgggagaggagggcggagatgctgacctgagcattgagaagcgcttcctggacctgctggagcccctgggccgcaggaagaagcagctggagagcagccgggccaagctgcagatcagccgggacctggaggatgagaccctgtgggtggaggagcggctgcccctggcccagagcgctgactatggcaccaacctgcagacagtgcagctgttcatgaagaagaaccagaccctgcagaatgagatcctgggccacaccccccgggtggaggatgtgctgcagaggggccagcagctggtggaggccgctgagattgactgccaggacctggaggagcggctgggccacctgcagagctcctgggaccggctgcgggaggccgccgccggccgcctgcagaggctgagagatgccaatgaggcccagcagtactacctggatgctgatgaggccgaggcctggattggagagcaggagctgtatgtgatcagtgatgagatccccaaggatgaggagggcgccatcgtgatgctgaagaggcacctgcggcagcagagagctgtggaggactatggcaggaacatcaagcagctggccagccgggcccagggcctgctgtctgctggccaccctgagggggagcagatcatccggctgcagggccaggtggacaagcactacgccggcctgaaggatgtggccgaggagaggaagaggaagctggagaacatgtaccacctgttccagctgaagcgggagacagatgacctggagcagtggatcagcgagaaggagctggtggccagcagccctgagatgggccaggactttgaccacgtgaccctgctgcgggacaagttccgggactttgcccgggagactggagccatcggccaggagcgggtggacaacgtgaatgccttcatcgagcggctgattgatgctggccacagcgaggccgccaccatcgccgagtggaaggatggcctgaatgagatgtgggccgacctgctggagctgattgacaccaggatgcagctgctggccgccagctatgacctgcaccgctacttctacacaggagctgagatcctgggcctgattgatgagaagcaccgggagctgcctgaagatgtgggcctggatgccagcacagctgagagcttccaccgggtgcacacagcctttgagcgggagctgcacctgctgggcgtgcaggtgcagcagttccaggatgtggccacccggctgcagacagcctatgctggggagaaggccgaggccatccagaacaaggagcaggaggtgtctgctgcctggcaggccctgctggatgcctgtgccggccgccgcacccagctggtggacacagctgacaagttccgcttcttctccatggcccgggacctgctgtcctggatggagagcatcatccggcagatcgagacccaggagcggcccagagatgtgtcctctgtggagctgctgatgaagtaccaccagggcatcaatgctgagattgagaccaggagcaagaacttcagcgcctgcctggagctgggggagagcctgctgcagaggcagcaccaggccagcgaggagatccgggagaagctgcagcaggtgatgagcaggaggaaggagatgaatgagaagtgggaggcccgctgggagcggctgaggatgctgctggaggtgtgccagttcagcagagatgcctctgtggccgaggcctggctgattgcccaggagccctacctggccagcggggactttggccacacagtggacagcgtggagaagctgatcaagagacatgaggcctttgagaagagcacagcctcctgggccgagagatttgctgccctggagaagcccaccaccctggagctgaaggagcggcagattgctgagaggcctgctgaggagaccggcccccaggaggaggagggggagacagctggggaggcccctgtgagccaccacgccgccacagagaggaccagccctggagaggaggagggcacctggccccagaacctgcagcagcccccacctcctggccagcacaaggatggccagaagagcactggagatgagcggcccaccacagagcccctcttcaaggtgctggacacccccctgtctgaaggagatgagcccgccaccctgcctgccccccgggaccacggccagagcgtgcagatggagggctacctgggcaggaagcatgacctggagggccccaacaagaaggccagcaacagatcctggaacaacctgtactgtgtgctgagaaattctgagctgaccttctacaaggatgccaagaacctggccctgggcatgccctaccatggagaggagcccctggccctgcggcatgccatctgtgaaattgctgccaactacaagaagaagaagcacgtgttcaagctgcggctgagcaatggcagcgagtggctgttccacggcaaggatgaggaggagatgctgtcctggctgcagggcgtgtccacagccatcaatgaaagccagagcatccgggtgaaggcccagagcctgcccctgcccagcctgagcggcccagatgccagcctgggcaagaaggacaaggagaagcgcttctccttcttccccaagaagaagtag

SEQ ID NO: 171298 - DNA, 6999 bp, synthetic construct
  misc_feature 1..6999: note = Description of Artificial Sequence: Synthetic coding sequence
  source 1..6999: mol_type = other DNA
gagcctgctgacatgaccagcgccacagaatttgaaaatgtgggcaaccagcccccctacagccgcatcaatgcccgctgggatgccccagatgatgagctggacaatgacaacagcagcgcccggctgtttgagaggagccgcatcaaggccctggctgatgagcgggaggtggtgcagaagaagaccttcaccaagtgggtgaacagccacctggcccgggtgtcctgccgcatcacagacctgtacaaggacctgagagatggccgcatgctgatcaagctgctggaggtgctgagcggggagatgctgcccaagcccaccaagggcaagatgaggatccactgcctggagaatgtggacaaggccctgcagttcctgaaggagcagagggtgcacctggagaacatgggcagccatgacatcgtggatggcaaccaccggctggtgctgggcctcatctggaccatcatcctgcgcttccagatccaggacatcgtggtgcagacccaggagggccgggagaccaggtctgccaaggatgccctgctgctgtggtgccagatgaagacagctggctacccccacgtgaatgtgaccaacttcaccagctcctggaaggatggcctggccttcaatgccctgatccacaagcacaggccagacctgattgactttgacaagctgaaggacagcaatgcccggcacaacctggagcacgccttcaacgtggccgagcggcagctgggcatcatccccctgctggaccctgaagatgtgttcacagaaaatccagatgagaagagcatcatcacctacgtggtggccttctaccactacttcagcaagatgaaggtgctggccgtggagggcaagagggtgggcaaggtgattgaccacgccatcgagacagagaagatgattgagaagtacagcggcctggccagtgacctgctgacctggattgagcagaccatcaccgtgctgaacagcaggaagtttgccaacagcctgactggagtgcagcagcagctgcaggccttcagcacctacagaacagtggagaagccacccaagttccaggagaagggcaacctggaggtgctgctcttcaccatccagagcaggatgagggccaacaaccagaaggtgtacacccctcatgatggcaagctggtgtctgacatcaacagagcctgggagagcctggaggaggccgagtacagaagagagctggccctgagaaatgagctgatccggcaggagaagctggagcagctggccaggagatttgacaggaaggccgccatgagggagacctggctgtctgagaaccagaggctggtggcccaggacaactttggctatgacctggccgctgtggaggccgccaagaagaagcatgaggccattgaaacagacacagctgcctatgaggagcgggtgcgggccctggaggacctggcccaggagctggagaaggagaactaccatgaccagaagaggatcacagccaggaaggacaacatcctgcggctgtggagctacctgcaggagctgctgcagagccggcggcagaggctggagaccaccctggccctgcagaagctgttccaggacatgctgcacagcattgactggatggatgagatcaaggcccacctgctgtctgctgagtttgggaagcacctgctggaggtggaggacctgctgcagaagcacaagctgatggaggccgacatcgccatccagggcgacaaggtgaaggccatcacagctgccaccctgaagttcacagagggcaagggctaccagccctgtgacccccaggtgatccaggaccgcatcagccacctggagcagtgctttgaggagctgagcaacatggctgctggcaggaaggcccagctggagcagagcaagaggctgtggaagttcttctgggagatggatgaagctgagagctggatcaaggagaaggagcagatctacagcagcctggactatggcaaggacctgacctctgtgctgatcctgcagaggaagcacaaggcctttgaagatgagctgcggggcctggatgcccacctggagcagatcttccaggaggcccacggcatggtggccaggaagcagtttggccacccccagatcgaggcccgcatcaaggaggtgtctgcccagtgggaccagctgaaggacctggccgccttctgcaagaagaacctgcaggatgctgagaacttcttccagttccagggagatgctgatgacctgaaggcctggctgcaggatgcccaccggctgctgtctggagaagatgtgggccaggatgagggcgccacccgggccctgggcaagaagcacaaggacttcctggaggagctggaggagagcagaggagtgatggagcacctggagcagcaggcccagggcttccctgaggagttccgggacagcccagatgtgacccaccggctgcaggccctgcgggagctgtaccagcaggtggtggcccaggccgacctgcggcagcagaggctgcaggaggccctggacctgtacacagtgtttggagaaacagatgcctgtgagctgtggatgggagagaaggagaagtggctggccgagatggagatgccagacaccctggaggacctggaggtggtgcagcacagatttgacatcctggaccaggagatgaagaccctgatgacccagattgatggagtgaacctggccgccaacagcctggtggagagcggccaccccaggagccgggaggtgaagcagtaccaggaccacctgaacacccgctggcaggccttccagaccctggtgtctgagcggcgggaggccgtggacagcgccctgcgggtgcacaactactgtgtggactgtgaggagaccagcaagtggatcacagacaagaccaaggtggtggagagcaccaaggacctgggccgggacctggccggcatcatcgccatccagaggaagctgagcggcctggagagagatgtggccgccatccaggcccgggtggatgccctggagcgggagagccagcagctgatggacagccaccctgagcagaaggaggacatcggccagaggcagaagcacctggaggagctgtggcagggcctgcagcagagcctgcagggccaggaggacctgctgggggaggtgtcccagctgcaggccttcctgcaggacctggatgacttccaggcctggctgagcatcacccagaaggctgtggccagcgaggacatgcctgagagcctgcctgaggccgagcagctgctgcagcagcacgccggcatcaaggatgaaattgatggccaccaggacagctaccagagggtgaaggagagcggggagaaggtgatccagggccagacagatcctgagtacctgctgctgggccagaggctggagggcctggacaccggctggaatgccctgggccgcatgtgggagagccgcagccacaccctggcccagtgcctgggcttccaggagttccagaaggatgccaagcaggccgaggccatcctgagcaaccaggagtacaccctggcccacctggagcccccagacagcctggaggccgctgaggccggcatcaggaagtttgaggacttcctgggctccatggagaacaacagagacaaggtgctgagccctgtggacagcggcaacaagctggtggccgagggcaacctgtacagcgacaagatcaaggagaaggtgcagctgattgaagatagacacaggaagaacaatgagaaggcccaggaggcctctgtgctgctgcgggacaacctggagctgcagaacttcctgcagaactgccaggagctgaccctgtggatcaatgacaagctgctgaccagccaggatgtgtcctatgatgaggccaggaacctgcacaacaagtggctgaagcaccaggcctttgtggccgagctggccagccatgagggctggctggagaacattgatgctgagggcaagcagctgatggatgagaagccccagttcaccgccctggtgtcccagaagctggaggccctgcaccggctgtgggatgagctgcaggccaccaccaaggagaagacccagcacctgtctgctgcccggagcagtgacctgcggctgcagacccatgctgacctgaacaagtggatcagcgccatggaggaccagctgcggagtgatgatcctgggaaggacctgacctctgtgaacaggatgctggccaagctgaagagggtggaggaccaggtgaatgtgaggaaggaggagctgggggagctgtttgcccaggtgcccagcatgggagaggagggcggagatgctgacctgagcattgagaagcgcttcctggacctgctggagcccctgggccgcaggaagaagcagctggagagcagccgggccaagctgcagatcagccgggacctggaggatgagaccctgtgggtggaggagcggctgcccctggcccagagcgctgactatggcaccaacctgcagacagtgcagctgttcatgaagaagaaccagaccctgcagaatgagatcctgggccacaccccccgggtggaggatgtgctgcagaggggccagcagctggtggaggccgctgagattgactgccaggacctggaggagcggctgggccacctgcagagctcctgggaccggctgcgggaggccgccgccggccgcctgcagaggctgagagatgccaatgaggcccagcagtactacctggatgctgatgaggccgaggcctggattggagagcaggagctgtatgtgatcagtgatgagatccccaaggatgaggagggcgccatcgtgatgctgaagaggcacctgcggcagcagagagctgtggaggactatggcaggaacatcaagcagctggccagccgggcccagggcctgctgtctgctggccaccctgagggggagcagatcatccggctgcagggccaggtggacaagcactacgccggcctgaaggatgtggccgaggagaggaagaggaagctggagaacatgtaccacctgttccagctgaagcgggagacagatgacctggagcagtggatcagcgagaaggagctggtggccagcagccctgagatgggccaggactttgaccacgtgaccctgctgcgggacaagttccgggactttgcccgggagactggagccatcggccaggagcgggtggacaacgtgaatgccttcatcgagcggctgattgatgctggccacagcgaggccgccaccatcgccgagtggaaggatggcctgaatgagatgtgggccgacctgctggagctgattgacaccaggatgcagctgctggccgccagctatgacctgcaccgctacttctacacaggagctgagatcctgggcctgattgatgagaagcaccgggagctgcctgaagatgtgggcctggatgccagcacagctgagagcttccaccgggtgcacacagcctttgagcgggagctgcacctgctgggcgtgcaggtgcagcagttccaggatgtggccacccggctgcagacagcctatgctggggagaaggccgaggccatccagaacaaggagcaggaggtgtctgctgcctggcaggccctgctggatgcctgtgccggccgccgcacccagctggtggacacagctgacaagttccgcttcttctccatggcccgggacctgctgtcctggatggagagcatcatccggcagatcgagacccaggagcggcccagagatgtgtcctctgtggagctgctgatgaagtaccaccagggcatcaatgctgagattgagaccaggagcaagaacttcagcgcctgcctggagctgggggagagcctgctgcagaggcagcaccaggccagcgaggagatccgggagaagctgcagcaggtgatgagcaggaggaaggagatgaatgagaagtgggaggcccgctgggagcggctgaggatgctgctggaggtgtgccagttcagcagagatgcctctgtggccgaggcctggctgattgcccaggagccctacctggccagcggggactttggccacacagtggacagcgtggagaagctgatcaagagacatgaggcctttgagaagagcacagcctcctgggccgagagatttgctgccctggagaagcccaccaccctggagctgaaggagcggcagattgctgagaggcctgctgaggagaccggcccccaggaggaggagggggagacagctggggaggcccctgtgagccaccacgccgccacagagaggaccagccctggagaggaggagggcacctggccccagaacctgcagcagcccccacctcctggccagcacaaggatggccagaagagcactggagatgagcggcccaccacagagcccctcttcaaggtgctggacacccccctgtctgaaggagatgagcccgccaccctgcctgccccccgggaccacggccagagcgtgcagatggagggctacctgggcaggaagcatgacctggagggccccaacaagaaggccagcaacagatcctggaacaacctgtactgtgtgctgagaaattctgagctgaccttctacaaggatgccaagaacctggccctgggcatgccctaccatggagaggagcccctggccctgcggcatgccatctgtgaaattgctgccaactacaagaagaagaagcacgtgttcaagctgcggctgagcaatggcagcgagtggctgttccacggcaaggatgaggaggagatgctgtcctggctgcagggcgtgtccacagccatcaatgaaagccagagcatccgggtgaaggcccagagcctgcccctgcccagcctgagcggcccagatgccagcctgggcaagaaggacaaggagaagcgcttctccttcttccccaagaagaagtag

SEQ ID NO: 171299 - DNA, 6414 bp, synthetic construct; identical to SEQ ID NO: 171296
  misc_feature 1..6414: note = Description of Artificial Sequence: Synthetic coding sequence
  source 1..6414: mol_type = other DNA

SEQ ID NO: 171300 - DNA, 6987 bp, synthetic construct; identical to SEQ ID NO: 171297
  misc_feature 1..6987: note = Description of Artificial Sequence: Synthetic coding sequence
  source 1..6987: mol_type = other DNA

SEQ ID NO: 171301 - DNA, 6468 bp, synthetic construct
  misc_feature 1..6468: note = Description of Artificial Sequence: Synthetic coding sequence
  source 1..6468: mol_type = other DNA
atggagctgcagaggaccagcagcatcagcggccccctgagccctgcctacacaggccaggtgccctacaactacaaccagctggagggccgcttcaagcagctgcaggatgagcgggaggccgtgcagaagaagaccttcaccaagtgggtgaacagccacctggcccgggtgtcctgccgcatcacagacctgtacacagacctgagagatggccgcatgctgatcaagctgctggaggtgctgtctggagagcggctgcccaagcccaccaagggccgcatgaggatccactgcctggagaatgtggacaaggccctgcagttcctgaaggagcagagggtgcacctggagaacatgggcagccatgacatcgtggatggcaaccaccggctgaccctgggcctcatctggaccatcatcctgcgcttccagatccaggacatctctgtggagacagaggacaacaaggagaagaagagcgccaaggatgccctgctgctgtggtgccagatgaagacagctggctacccaaatgtgaacatccacaacttcaccacctcctggagagatggcatggccttcaatgccctgatccacaagcacaggccagacctgattgactttgacaagctgaagaagagcaatgcccactacaacctgcagaatgccttcaacctggccgagcagcacctgggcctgaccaagctgctggaccctgaggacatctctgtggaccacccagatgagaagagcatcatcacctacgtggtgacctactaccactacttcagcaagatgaaggccctggccgtggagggcaagagaattggcaaggtgctggacaatgccattgaaacagagaagatgattgagaagtatgagagcctggccagtgacctgctggagtggattgagcagaccatcatcatcctgaacaacaggaagtttgccaacagcctggtgggcgtgcagcagcagctgcaggccttcaacacctacagaacagtggagaagccacccaagttcacagagaagggcaacctggaggtgctgctcttcaccatccagagcaagatgagggccaacaaccagaaggtgtacatgccccgggagggcaagctgatcagtgacatcaacaaggcctgggagcggctggagaaggccgagcacgagcgggagctggccctgagaaatgaactcatccggcaggagaagctggagcagctggccaggagatttgacaggaaggccgccatgagggagacctggctgtctgagaaccagaggctggtgtcccaggacaactttggatttgacctgcctgctgtggaggccgccaccaagaagcatgaggccatcgagacagacattgctgcctatgaggagcgggtgcaggccgtggtggccgtggcccgggagctggaggccgagaactaccatgacatcaagaggatcacagccaggaaggacaacgtcatccggctgtgggagtacctgctggagctgctgcgggcccggcggcagaggctggagatgaacctgggcctgcagaagatcttccaggagatgctgtacatcatggactggatggatgagatgaaggtgctggtgctgagccaggactatggcaagcacctgctgggcgtggaggacctgctgcagaagcacaccctggtggaggccgacatcggcatccaggccgagcgggtgcggggcgtgaatgccagcgcccagaagtttgccacagatggagagggctacaagccctgtgacccccaggtgatccgggacagagtggcccacatggagttctgctaccaggagctgtgccagctggccgctgagcggcgggcccggctggaggagagccggcggctgtggaagttcttctgggagatggccgaggaggagggctggatccgggagaaggagaagatcctgagcagtgatgattatggcaaggacctgacctctgtgatgaggctgctgagcaagcaccgggcctttgaagatgagatgagcggccgcagcggccactttgagcaggccatcaaggagggggaggacatgattgctgaggagcactttggaagtgagaagatccgggagcgcatcatctacatccgggagcagtgggccaacctggagcagctgagcgccatcaggaagaagaggctggaggaggccagcctgctgcaccagttccaggctgatgctgatgacattgatgcctggatgctggacatcctgaagatcgtgagcagcagtgatgtgggccatgatgagtacagcacccagagcctggtgaagaagcacaaggatgtggccgaggagatcgccaactaccggcccaccctggacaccctgcacgagcaggccagcgccctgccccaggagcacgccgagagcccagatgtgcggggccgcctgagcggcatcgaggagcgctacaaggaggtggccgagctgacccggctgaggaagcaggccctgcaggacaccctggccctgtacaagatgttttctgaggctgatgcctgtgagctgtggattgatgagaaggagcagtggctgaacaacatgcagatccctgagaagctggaggacctggaggtgatccagcacagatttgagagcctggagcctgagatgaacaaccaggccagccgggtggccgtggtgaaccagatcgcccggcagctgatgcacagcggccaccccagcgagaaggagatcaaggcccagcaggacaagctgaacacccgctggagccagttccgggagctggtggacaggaagaaggatgccctgctgagcgccctgagcatccagaactaccacctggagtgcaatgagaccaagtcctggatccgggagaagaccaaggtgattgagagcacccaggacctgggcaatgacctggccggcgtgatggccctgcagaggaagctgaccggcatggagcgggacctggtggccatcgaggccaagctgagtgacctgcagaaggaggccgagaagctggagagcgagcacccagaccaggcccaggccatcctgagccggctggccgagatcagtgatgtgtgggaggagatgaagaccaccctgaagaaccgggaggccagcctgggggaggccagcaagctgcagcagttcctgcgggacctggatgacttccagagctggctgagcaggacccagacagccatcgccagcgaggacatgcccaacaccctgacagaggccgagaagctgctgacccagcacgagaacatcaagaatgaaattgacaactatgaggaggactaccagaagatgagggacatgggagagatggtgacccagggccagacagatgcccagtacatgttcctgcggcagaggctgcaggccctggacaccggctggaatgagctgcacaagatgtgggagaaccggcagaacctgctgagccagagccacgcctaccagcagttcctgcgggacaccaagcaggccgaggccttcctgaacaaccaggagtatgtgctggcccacacagagatgcccaccaccctggagggcgctgaggccgccatcaagaagcaggaggacttcatgaccaccatggatgccaatgaggagaagatcaatgctgtggtggagaccggccggcggctggtgtctgatggcaacatcaacagcgaccgcatccaggagaaggtggacagcattgatgacagacacaggaagaaccgggagacagccagcgagctgctgatgaggctgaaggacaacagagacctgcagaagttcctgcaggactgccaggagctgagcctgtggatcaatgagaagatgctgacagcccaggacatgtcctatgatgaggccaggaacctgcacagcaagtggctgaagcaccaggccttcatggccgagctggccagcaacaaggagtggctggacaagattgagaaggagggcatgcagctgatcagcgagaagccagagacagaggccgtggtgaaggagaagctgaccggcctgcacaagatgtgggaggtgctggagagcaccacccagaccaaggcccagaggctgtttgatgccaacaaggccgagctgttcacccagagctgtgccgacctggacaagtggctgcacggcctggagagccagatccagagtgatgattatggcaaggacctgacctctgtgaacatcctgctgaagaagcagcagatgctggagaaccagatggaggtgaggaagaaggagattgaggagctgcagagccaggcccaggccctgagccaggagggcaagagcacagatgaggtggacagcaagaggctgactgtgcagaccaagttcatggagctgctggagcccctgaatgaaaggaagcacaacctgctggccagcaaggagatccaccagttcaacagagatgtggaggatgagatcctgtgggtgggggagaggatgcccctggccaccagcacagaccacggccacaacctgcagacagtgcagctgctgatcaagaagaaccagaccctgcagaaggagatccagggccaccagcccagaattgatgacatctttgagaggagccagaacatcgtgacagacagcagcagcctgtctgctgaggccatccggcagaggctggccgacctgaagcagctgtggggcctgctgattgaggagacagagaagaggcaccggcggctggaggaggcccaccgggcccagcagtactactttgatgctgctgaggccgaggcctggatgtctgagcaggagctgtacatgatgtctgaggagaaggccaaggatgagcagagcgctgtgtccatgctgaagaagcaccagatcctggagcaggccgtggaggactatgcagagaccgtgcaccagctgagcaagaccagccgggccctggtggccgacagccaccctgagagcgagcgcatctccatgaggcagagcaaggtggacaagctgtatgccggcctgaaggacctggccgaggagcggcggggcaagctggatgagcggcacaggctcttccagctgaaccgggaggtggatgacctggagcagtggattgctgagcgggaggtggtggccggcagccatgagctgggccaggactatgaacatgtgaccatgctgcaggagcgcttccgggagtttgcccgggacaccggcaacatcggccaggagcgggtggacacagtgaaccacctggctgatgagctgatcaacagcggccacagtgatgctgccaccatcgccgagtggaaggatggcctgaatgaggcctgggccgacctgctggagctgattgacaccaggacccagatcctggccgccagctatgagctgcacaagttctaccatgatgccaaggagatcttcggccgcatccaggacaagcacaagaagctgcctgaggagctgggccgggaccagaacacagtggagaccctgcagaggatgcacaccacctttgaacatgacatccaggccctgggcacccaggtgcggcagctgcaggaggatgctgcccggctgcaggccgcctatgctggggacaaggcagatgacatccagaagagagaaaatgaggtgctggaggcctggaagagcctgctggatgcctgtgagagccggcgggtgcggctggtggacacaggagacaagttccgcttcttctccatggtgcgggacctgatgctgtggatggaggatgtgatccggcagatcgaggcccaggagaagcccagagatgtgtcctctgtggagctgctgatgaacaaccaccagggcatcaaggccgagattgatgccagaaatgacagcttcaccacctgcatcgagctgggcaagagcctgctggccaggaagcactacgccagcgaggagatcaaggagaagctgctgcagctgacagagaagaggaaggagatgattgacaagtgggaggaccgctgggagtggctgcggctcatcctggaggtgcaccagttcagcagagatgcctctgtggccgaggcctggctgctgggccaggagccctacctgagcagccgggagatcggccagagcgtggatgaggtggagaagctgatcaagagacatgaggcctttgagaagtctgctgccacctgggatgagcgcttcagcgccctggagcggctgaccaccctggagctgctggaggtgcggcggcagcaggaggaggaggagaggaagagaagaccacccagccctgagcccagcaccaaggtgtctgaggaggccgagagccagcagcagtgggacaccagcaagggggagcaggtgtcccagaatggcctgcctgctgagcagggcagcccccgggtgtcctaccgcagccagacctaccagaactacaagaacttcaacagcagaagaacagccagtgaccagccctggagcggcctgtag

SEQ ID NO: 171302 - DNA, 7095 bp, synthetic construct
  misc_feature 1..7095: note = Description of Artificial Sequence: Synthetic coding sequence
  source 1..7095: mol_type = other DNA
atgaccaccaccgtggccacagattatgacaacatcgagatccagcagcagtacagtgatgtgaacaaccgctgggatgtggatgactgggacaatgaaaacagcagcgcccggctgtttgagaggagccgcatcaaggccctggctgatgagcgggaggccgtgcagaagaagaccttcaccaagtgggtgaacagccacctggcccgggtgtcctgccgcatcacagacctgtacacagacctgagagatggccgcatgctgatcaagctgctggaggtgctgagcggggagcggctgcccaagcccaccaagggccgcatgaggatccactgcctggagaatgtggacaaggccctgcagttcctgaaggagcagagggtgcacctggagaacatgggcagccatgacatcgtggatggcaaccaccggctgaccctgggcctcatctggaccatcatcctgcgcttccagatccaggacatctctgtggagacagaggacaacaaggagaagaagagcgccaaggatgccctgctgctgtggtgccagatgaagacagctggctaccccaacgtgaacatccacaacttcaccacctcctggagagatggcatggccttcaatgccctgatccacaagcacaggccagacctgattgactttgacaagctgaagaagagcaatgcccactacaacctgcagaatgccttcaacctggccgagcagcacctgggcctgaccaagctgctggaccctgaggacatctctgtggaccacccagatgagaagagcatcatcacctacgtggtgacctactaccactacttcagcaagatgaaggccctggccgtggagggcaagagaattggcaaggtgctggacaatgccatcgagacagagaagatgattgagaagtatgagagcctggccagtgacctgctggagtggattgagcagaccatcatcatcctgaacaacaggaagtttgccaacagcctggtgggcgtgcagcagcagctgcaggccttcaacacctacagaacagtggagaagccacccaagttcacagagaagggcaacctggaggtgctgctcttcaccatccagagcaagatgagggccaacaaccagaaggtgtacatgccccgggagggcaagctgatcagtgacatcaacaaggcctgggagcggctggagaaggccgagcacgagcgggagctggccctgagaaatgagctgatccggcaggagaagctggagcagctggccaggagatttgacaggaaggccgccatgagggagacctggctgtctgagaaccagaggctggtgtcccaggacaactttggatttgacctgcctgctgtggaggccgccaccaagaagcatgaggccattgaaacagacattgctgcctatgaggagcgggtgcaggccgtggtggccgtggcccgggagctggaggccgagaactaccatgacatcaagaggatcacagccaggaaggacaacgtcatccggctgtgggagtacctgctggagctgctgcgggcccggcggcagaggctggagatgaacctgggcctgcagaagatcttccaggagatgctgtacatcatggactggatggatgagatgaaggtgctggtgctgagccaggactatggcaagcacctgctgggcgtggaggacctgctgcagaagcacaccctggtggaggccgacatcggcatccaggccgagcgggtgcggggcgtgaatgccagcgcccagaagtttgccacagatggagagggctacaagccctgtgacccccaggtgatccgggacagagtggcccacatggagttctgctaccaggagctgtgccagctggccgctgagcggcgggcccggctggaggagagccggcggctgtggaagttcttctgggagatggccgaggaggagggctggatccgggagaaggagaagatcctgagcagtgatgattatggcaaggacctgacctctgtgatgaggctgctgagcaagcaccgggcctttgaagatgagatgagcggccgcagcggccactttgagcaggccatcaaggagggggaggacatgattgctgaggagcacttcggcagcgagaagatccgggagcgcatcatctacatccgggagcagtgggccaacctggagcagctgagcgccatcaggaagaagaggctggaggaggccagcctgctgcaccagttccaggctgatgctgatgacattgatgcctggatgctggacatcctgaagatcgtgagcagcagtgatgtgggccatgatgagtacagcacccagagcctggtgaagaagcacaaggatgtggccgaggagatcgccaactaccggcccaccctggacaccctgcacgagcaggccagcgccctgccccaggagcacgccgagagcccagatgtgcggggccgcctgtctggaattgaggagcgctacaaggaggtggccgagctgacccggctgaggaagcaggccctgcaggacaccctggccctgtacaagatgttcagcgaggctgatgcctgtgagctgtggattgatgagaaggagcagtggctgaacaacatgcagatccctgagaagctggaggacctggaggtgatccagcacagatttgagagcctggagcctgagatgaacaaccaggccagccgggtggccgtggtgaaccagatcgcccggcagctgatgcacagcggccaccccagcgagaaggagatcaaggcccagcaggacaagctgaacacccgctggagccagttccgggagctggtggacaggaagaaggatgccctgctgagcgccctgagcatccagaactaccacctggagtgcaatgagaccaagtcctggatccgggagaagaccaaggtgattgagagcacccaggacctgggcaatgacctggccggcgtgatggccctgcagaggaagctgaccggcatggagcgggacctggtggccatcgaggccaagctgagtgacctgcagaaggaggccgagaagctggagagcgagcacccagaccaggcccaggccatcctgagccggctggccgagatcagtgatgtgtgggaggagatgaagaccaccctgaagaaccgggaggccagcctgggggaggccagcaagctgcagcagttcctgcgggacctggatgacttccagagctggctgagcaggacccagacagccatcgccagcgaggacatgcccaacaccctgacagaagctgagaagctgctgacccagcacgagaacatcaagaatgaaattgacaactatgaggaggactaccagaagatgagggacatgggagagatggtgacccagggccagacagatgcccagtacatgttcctgcggcagaggctgcaggccctggacaccggctggaatgagctgcacaagatgtgggagaaccggcagaacctgctgagccagagccacgcctaccagcagttcctgcgggacaccaagcaggccgaggccttcctgaacaaccaggagtatgtgctggcccacacagagatgcccaccaccctggagggcgctgaggccgccatcaagaagcaggaggacttcatgaccaccatggatgccaatgaggagaagatcaatgctgtggtggagactggaagaaggctggtgtctgatggcaacatcaacagcgaccgcatccaggagaaggtggacagcattgatgacagacacaggaagaaccgggagacagccagcgagctgctgatgaggctgaaggacaacagagacctgcagaagttcctgcaggactgccaggagctgagcctgtggatcaatgagaagatgctgacagcccaggacatgtcctatgatgaggccaggaacctgcacagcaagtggctgaagcaccaggccttcatggccgagctggccagcaacaaggagtggctggacaagattgagaaggagggcatgcagctgatcagcgagaagccagagacagaagctgtggtgaaggagaagctgaccggcctgcacaagatgtgggaggtgctggagagcaccacccagaccaaggcccagaggctgtttgatgccaacaaggccgagctgttcacccagagctgtgccgacctggacaagtggctgcacggcctggagagccagatccagagtgatgattatggcaaggacctgacctctgtgaacatcctgctgaagaagcagcagatgctggagaaccagatggaggtgaggaagaaggagattgaggagctgcagagccaggcccaggccctgagccaggagggcaagagcacagatgaggtggacagcaagaggctgactgtgcagaccaagttcatggagctgctggagcccctgaatgaaaggaagcacaacctgctggccagcaaggagatccaccagttcaacagagatgtggaggatgagatcctgtgggtgggggagaggatgcccctggccaccagcacagaccacggccacaacctgcagacagtgcagctgctgatcaagaagaaccagaccctgcagaaggagatccagggccaccagcccagaattgatgacatctttgagaggagccagaacatcgtgacagacagcagcagcctgtctgctgaggccatccggcagaggctggccgacctgaagcagctgtggggcctgctgattgaggagacagagaagaggcaccggcggctggaggaggcccaccgggcccagcagtactactttgatgctgctgaggccgaggcctggatgtctgagcaggagctgtacatgatgtctgaggagaaggccaaggatgagcagagcgctgtgtccatgctgaagaagcaccagatcctggagcaggccgtggaggactatgcagagaccgtgcaccagctgagcaagaccagccgggccctggtggccgacagccaccctgagagcgagcgcatctccatgaggcagagcaaggtggacaagctgtatgccggcctgaaggacctggccgaggagcggcggggcaagctggatgagcggcacaggctcttccagctgaaccgggaggtggatgacctggagcagtggattgctgagcgggaggtggtggccggcagccatgagctgggccaggactatgagcacgtgaccatgctgcaggagcgcttccgggagtttgcccgggacaccggcaacatcggccaggagcgggtggacacagtgaaccacctggctgatgagctgatcaacagcggccacagtgatgctgccaccatcgccgagtggaaggatggcctgaatgaggcctgggccgacctgctggagctgattgacaccaggacccagatcctggccgccagctatgagctgcacaagttctaccatgatgccaaggagatcttcggccgcatccaggacaagcacaagaagctgcctgaggagctgggccgggaccagaacacagtggagaccctgcagaggatgcacaccacctttgaacatgacatccaggccctgggcacccaggtgcggcagctgcaggaggatgctgcccggctgcaggccgcctatgctggggacaaggcagatgacatccagaagcgggagaatgaggtgctggaggcctggaagagcctgctggatgcctgtgagagcagaagagtgcggctggtggacaccggggacaagttccgcttcttctccatggtgcgggacctgatgctgtggatggaggatgtgatccggcagatcgaggcccaggagaagcccagagatgtgtcctctgtggagctgctgatgaacaaccaccagggcatcaaggccgagattgatgccagaaatgacagcttcaccacctgcatcgagctgggcaagagcctgctggccaggaagcactacgccagcgaggagatcaaggagaagctgctgcagctgacagagaagaggaaggagatgattgacaagtgggaggaccgctgggagtggctgcggctcatcctggaggtgcaccagttcagcagagatgcctctgtggccgaggcctggctgctgggccaggagccctacctgagcagccgggagatcggccagagcgtggatgaggtggagaagctgatcaagagacatgaggcctttgagaagtctgctgccacctgggatgagcgcttcagcgccctggagcggctgaccaccctggagctgctggaggtgcggcggcagcaggaggaggaggagaggaagaggcggccccccagccctgagcccagcaccaaggtgtctgaggaggccgagagccagcagcagtgggacaccagcaaaggagagcaggtgtcccagaatggcctgcctgctgagcagggcagccccaggatggccgagaccgtggacaccagcgagatggtgaatggagccacagagcagaggaccagcagcaaggagagcagccccatccccagccccaccagtgacaggaaggccaagacagccctgcctgcccagagcgctgccaccctgcctgcccggacccaggagaccccatctgcccagatggagggcttcctgaacaggaagcatgagtgggaggcccacaacaagaaggccagcagccgctcctggcacaacgtgtactgtgtgatcaacaaccaggagatgggcttctacaaggatgccaagacagctgccagcggcatcccctaccacagcgaggtgcctgtgtccctgaaggaggccgtgtgtgaggtggccctggactacaagaagaagaagcacgtgttcaagctgcggctgaatgatggaaatgagtacctgttccaggccaaggatgatgaggagatgaacacctggatccaggccatcagcagcgccatcagcagtgacaagcatgaggtgtctgccagcacccagagcaccccagccagcagccgggcccagaccctgcccacctctgtggtgaccatcaccagcgagagcagccctgggaagcgggagaaggacaaggagaaggacaaggagaagcgcttcagcctgtttgggaagaagaagtag

SEQ ID NO: 171303 - DNA, 2073 bp, synthetic construct
  misc_feature 1..2073: note = Description of Artificial Sequence: Synthetic coding sequence
  source 1..2073: mol_type = other DNA
atgaccaccaccgtggccacagattatgacaacatcgagatccagcagcagtacagtgatgtgaacaaccgctgggatgtggatgactgggacaatgaaaacagcagcgcccggctgtttgagaggagccgcatcaaggccctggctgatgagcgggaggccgtgcagaagaagaccttcaccaagtgggtgaacagccacctggcccgggtgtcctgccgcatcacagacctgtacacagacctgagagatggccgcatgctgatcaagctgctggaggtgctgagcggggagcggctgcccaagcccaccaagggccgcatgaggatccactgcctggagaatgtggacaaggccctgcagttcctgaaggagcagagggtgcacctggagaacatgggcagccatgacatcgtggatggcaaccaccggctgaccctgggcctcatctggaccatcatcctgcgcttccagatccaggacatctctgtggagacagaggacaacaaggagaagaagagcgccaaggatgccctgctgctgtggtgccagatgaagacagctggctaccccaacgtgaacatccacaacttcaccacctcctggagagatggcatggccttcaatgccctgatccacaagcacaggccagacctgattgactttgacaagctgaagaagagcaatgcccactacaacctgcagaatgccttcaacctggccgagcagcacctgggcctgaccaagctgctggaccctgaggacatctctgtggaccacccagatgagaagagcatcatcacctacgtggtgacctactaccactacttcagcaagatgaaggccctggccgtggagggcaagagaattggcaaggtgctggacaatgccatcgagacagagaagatgattgagaagtatgagagcctggccagtgacctgctggagtggattgagcagaccatcatcatcctgaacaacaggaagtttgccaacagcctggtgggcgtgcagcagcagctgcaggccttcaacacctacagaacagtggagaagccacccaagttcacagagaagggcaacctggaggtgctgctcttcaccatccagagcaagatgagggccaacaaccagaaggtgtacatgccccgggagggcaagctgatcagtgacatcaacaaggcctgggagcggctggagaaggccgagcacgagcgggagctggccctgagaaatgagctgatccggcaggagaagctggagcagctggccaggagatttgacaggaaggccgccatgagggagacctggctgtctgagaaccagaggctggtgtcccaggacaactttggatttgacctgcctgctgtggaggccgccaccaagaagcatgaggccattgaaacagacattgctgcctatgaggagcgggtgcaggccgtggtggccgtggcccgggagctggaggccgagaactaccatgacatcaagaggatcacagccaggaaggacaacgtcatccggctgtgggagtacctgctggagctgctgcgggcccggcggcagaggctggagatgaacctgggcctgcagaagatcttccaggagatgctgtacatcatggactggatggatgagatgaaggtgctggtgctgagccaggactatggcaagcacctgctgggcgtggaggacctgctgcagaagcacaccctggtggaggccgacatcggcatccaggccgagcgggtgcggggcgtgaatgccagcgcccagaagtttgccacagatggagagggctacaagccctgtgacccccaggtgatccgggacagagtggcccacatggagttctgctaccaggagctgtgccagctggccgctgagcggcgggcccggctggaggagagccggcggctgtggaagttcttctgggagatggccgaggaggagggctggatccgggagaaggagaagatcctgagcagtgatgattatggcaaggacctgacctctgtgatgaggctgctgagcaagcaccgggcctttgaagatgagatgagcggccgctag

SEQ ID NO: 171304 - DNA, 7173 bp, synthetic construct
  misc_feature 1..7173: note = Description of Artificial Sequence: Synthetic coding sequence
  source 1..7173: mol_type = other DNA
atgagcagcaccctgagccccacagactttgacagcctggagatccagggccagtacagcgacatcaacaaccgctgggacctgcctgacagcgactgggacaatgacagcagcagcgcccggctgtttgagaggagccgcatcaaggccctggctgatgagcgggaggccgtgcagaagaagaccttcaccaagtgggtgaacagccacctggcccgggtgacctgccgggtgggggacctgtacagcgacctgagagatggaagaaacctgctgcggctgctggaggtgctgtctggagagatcctgcccaagcccaccaagggccgcatgaggatccactgcctggagaatgtggacaaggccctgcagttcctgaaggagcagaaggtgcacctggagaacatgggcagccatgacatcgtggatggcaaccaccggctgaccctgggcctggtgtggaccatcatcctgcgcttccagatccaggacatctctgtggagacagaggacaacaaggagaagaagagcgccaaggatgccctgctgctgtggtgccagatgaagacagctggctacccaaatgtgaatgtgcacaacttcaccacctcctggagagatggcctggccttcaatgccatcgtgcacaagcacaggccagacctgctggactttgagagcctgaagaagtgcaatgcccactacaacctgcagaatgccttcaacctggccgagaaggagctgggcctgaccaagctgctggaccctgaagatgtgaatgtggaccagccagatgagaagagcatcatcacctacgtggccacctactaccactacttcagcaagatgaaggccctggccgtggagggcaagagaattggcaaggtgctggaccacgccatggaggccgagcggctggtggagaagtatgagagcctggccagcgagctgctgcagtggattgagcagaccatcgtgaccctgaatgaccggcagctggccaacagcctgagcggcgtgcagaaccagctgcagagcttcaacagctacagaacagtggagaagccacccaagttcacagagaagggcaacctggaggtgctgctcttcaccatccagagcaagctgcgggccaacaaccagaaggtgtacaccccccgggagggccgcctcatcagtgacatcaacaaggcctgggagcggctggagaaggccgagcacgagcgggagctggccctgaggacagagctgatccggcaggagaagctggagcagctggccgccaggtttgacaggaaggccgccatgagggagacctggctgtctgagaaccagaggctggtgtcccaggacaactttggcctggagctggccgctgtggaggccgctgtgaggaagcatgaggccatcgagacagacatcgtggcctacagcggccgggtgcaggccgtggatgctgtggccgctgagctggccgctgagcgctaccatgacatcaagagaattgctgcccggcagcacaacgtggcccggctgtgggacttcctgcggcagatggtggccgcccggcgggagcggctgctgctgaacctggagctgcagaaggtgttccaggacctgctgtacctgatggactggatggaggagatgaagggccgcctgcagagccaggacctgggccgccacctggccggcgtggaggacctgctgcagctgcacgagctggtggaggccgacattgctgtgcaggccgagcgggtgcgggctgtgtctgccagcgccctgcgcttctgcaaccctgggaaggagtaccggccctgtgacccccagctggtgtctgagcgggtggccaagctggagcagagctatgaggccctgtgtgagctggccgccgcccggcgggcccggctggaggagagccggcggctgtggaggttcctgtgggaggtgggggaggccgaggcctgggtgcgggagcagcagcacctgctggccagcgctgacaccggccgggacctgaccggggccctgcggctgctgaacaagcacacagccctgcggggggagatgagcggccgcctgggccccctgaagctgaccctggagcagggccagcagctggtggccgagggccaccctggggccagccaggccagcgcccgggctgctgagctgcaggcccagtgggagcggctggaggccctggccgaggagcgggcccagaggctggcccaggccgccagcctgtaccagttccaggctgatgccaatgacatggaggcctggctggtggatgccctgcggctggtgagcagccctgagctgggccatgatgagttcagcacccaggccctggcccggcagcaccgggccctggaggaggagatccgcagccaccggcccaccctggatgccctgcgggagcaggccgccgccctgccccccaccctgagcaggaccccagaggtgcagagccgggtgcccaccctggagcggcactatgaggagctgcaggcccgggccggggagcgggcccgggccctggaggccgccctggccctgtacaccatgctgtctgaggccggggcctgtggcctgtgggtggaggagaaggagcagtggctgaatggcctggccctgcctgagcggctggaggacctggaggtggtgcagcagagatttgagaccctggagcctgagatgaacaccctggccgcccagatcacagctgtgaatgacattgctgagcagctgctgaaggccaaccccccaggcaaggacagaattgtgaacacccaggagcagctgaaccaccgctggcagcagttccggcggctggctgatggcaagaaggccgccctgaccagcgccctgagcatccagaactaccacctggagtgcacagagacccaggcctggatgagggagaagaccaaggtgattgagagcacccagggcctgggcaatgacctggccggcgtgctggccctgcagaggaagctggccggcacagagcgggacctggaggccatcgccgcccgggtgggggagctgacccgggaggccaatgccctggccgccggccacccagcccaggccgtggccatcaatgcccggctgcgggaggtgcagacaggctgggaggacctgcgggccaccatgagaagaagagaggagagcctgggggaggcccggcggctgcaggacttcctgcggagcctggatgacttccaggcctggctgggccgcacccagacagctgtggccagcgaggagggccctgccaccctgcctgaggccgaggccctgctggcccagcacgccgccctgcggggggaggtggagcgggcccagagcgagtacagccggctgcgggccctgggggaggaggtgacccgggaccaggccgacccccagtgcctcttcctgcggcagaggctggaggccctgggcaccggctgggaggagctgggccgcatgtgggagagccggcagggccgcctggcccaggcccacggcttccagggcttcctgagagatgcccggcaggccgagggcgtgctgagcagccaggagtatgtgctgagccacacagagatgcctggcaccctgcaggccgcagatgctgccatcaagaagctggaggacttcatgagcaccatggatgccaacggggagcgcatccacggcctgctggaggccggccggcagctggtgtctgagggcaacatccacgccgacaagatccgggagaaggctgacagcattgaaagaagacacaagaagaaccaggatgctgcccagcagttcctgggccgcctgcgggacaaccgggagcagcagcacttcctgcaggactgccacgagctgaagctgtggattgatgagaagatgctgacagcccaggatgtgtcctatgatgaggccaggaacctgcacaccaagtggcagaagcaccaggccttcatggccgagctggccgccaacaaggactggctggacaaggtggacaaggagggccgggagctgaccctggagaagccagagctgaaggccctggtgtctgagaagctgcgggacctgcaccggcgctgggatgagctggagaccaccacccaggccaaggcccggagcctgtttgatgccaacagagctgagctgtttgcccagagctgctgtgccctggagagctggctggagagcctgcaggcccagctgcacagtgatgattatggcaaggacctgacctctgtgaacatcctgctgaagaagcagcagatgctggagtgggagatggctgtgcgggagaaggaggtggaggccatccaggcccaggccaaggccctggcccaggaggaccagggcgctggggaggtggagaggaccagcagagctgtggaggagaagttccgggccctgtgccagcccatgagggagcgctgccggcggctgcaggccagccgggagcagcaccagttccacagagatgtggaggatgagatcctgtgggtgacagagcggctgcccatggccagctccatggagcacggcaaggacctgcccagcgtgcagctgctgatgaagaagaaccagaccctgcagaaggagatccagggccacgagcccagaattgctgacctgcgggagcggcagagggccctgggcgctgctgctgctggccctgagctggccgagctgcaggagatgtggaagaggctgggccacgagctggagctgcggggcaagaggctggaggatgccctgcgggcccagcagttctacagagatgctgctgaggccgaggcctggatgggagagcaggagctgcacatgatgggccaggagaaggccaaggatgagctgagcgcccaggccgaggtgaagaagcaccaggtgctggagcaggccctggccgactatgcccagaccatccaccagctggccgccagcagccaggacatgattgaccacgagcaccctgagagcacccgcatcagcatccggcaggcccaggtggacaagctgtatgccggcctgaaggagctggccggggagcggcgggagcggctgcaggagcacctgcggctgtgccagctgcggcgggagctggatgacctggagcagtggatccaggagcgggaggtggtggccgccagccatgagctgggccaggactatgagcacgtgaccatgctgcgggacaagttccgggagttcagccgggacaccagcaccatcggccaggagcgggtggacagcgccaatgccctggccaacggcctgattgctgggggccatgctgcccgggccaccgtggccgagtggaaggacagcctgaatgaggcctgggccgacctgctggagctgctggacacccggggccaggtgctggccgccgcctatgagctgcagcgcttcctgcacggggcccggcaggccctggcccgggtgcagcacaagcagcagcagctgcctgatggcaccggccgggacctgaatgctgctgaggccctgcagaggaggcactgtgcctatgaacatgacatccaggccctgagcccccaggtgcagcaggtgcaggatgatggccaccggctgcagaaggcctatgctggggacaaggccgaggagatcggccgccacatgcaggccgtggccgaggcctgggcccagctgcagggcagcagcgctgcccggcggcagctgctgctggacaccacagacaagttccgcttcttcaaggctgtgcgggagctgatgctgtggatggatgaggtgaacctgcagatggatgcccaggagcggcccagagatgtgtcctctgctgacctggtgatcaagaaccagcagggcatcaaggccgagattgaggcccgggctgaccgcttcagcagctgcatcgacatgggcaaggagctgctggcccggagccactacgccgctgaggagatcagcgagaagctgagccagctgcaggcccggcggcaggagacagctgagaagtggcaggagaagatggactggctgcagctggtgctggaggtgctggtgtttggaagagatgctggcatggccgaggcctggctgtgcagccaggagcccctggtgcgctctgctgagctgggctgcaccgtggatgaggtggagagcctcatcaagagacatgaggccttccagaagtctgctgtggcctgggaggagcgcttctgtgccctggagaagctgacagccctggaggagcgggagaaggagaggaagaggaagcgggaggaggaggagaggaggaagcagcccccagcccctgagcccacagcctctgtgcccccaggggacctggtgggcggccagacagccagtgacaccacctgggatggcacccagccccggcccccacccagcacccaggcccccagcgtgaatggagtgtgcacagatggagagcccagccagcccctgctgggccagcagaggctggagcacagcagcttccctgagggccctggccctggcagcggagatgaggccaacggccccagaggagagcggcagaccaggacccggggccctgcccccagcgccatgccccagagccgcagcacagagagcgcccatgctgccaccctgcccccccggggccctgagcccagcgcccaggagcagatggagggcatgctgtgcaggaagcaggagatggaggccttcggcaagaaggccgccaacagatcctggcagaatgtgtactgtgtgctgcggcggggcagcctgggcttctacaaggatgccaaggccgccagcgctggggtgccctaccatggagaggtgcctgtgtccctggcccgggcccagggctctgtggcctttgactacaggaagaggaagcacgtgttcaagctgggcctgcaggacggcaaggagtacctgttccaggccaaggatgaggccgagatgagctcctggctgcgggtggtgaatgctgccatcgccacagccagcagcgccagcggggagcctgaggagcctgtggtgcccagcaccacccggggcatgacccgggccatgaccatgcctcctgtgtcccctgtgggcgctgagggccctgtggtgctgcggagcaaggatggccgggagcgggagcgggagaagcgcttctccttcttcaagaagaacaagtag

SEQ ID NO: 171305 - DNA, 2805 bp, synthetic construct
  misc_feature 1..2805: note = Description of Artificial Sequence: Synthetic coding sequence
  source 1..2805: mol_type = other DNA
atgagcagcaccctgagccccacagactttgacagcctggagatccagggccagtacagcgacatcaacaaccgctgggacctgcctgacagcgactgggacaatgacagcagcagcgcccggctgtttgagaggagccgcatcaaggccctggctgatgagcgggaggccgtgcagaagaagaccttcaccaagtgggtgaacagccacctggcccgggtgacctgccgggtgggggacctgtacagcgacctgagagatggaagaaacctgctgcggctgctggaggtgctgtctggagagatcctgcccaagcccaccaagggccgcatgaggatccactgcctggagaatgtggacaaggccctgcagttcctgaaggagcagaaggtgcacctggagaacatgggcagccatgacatcgtggatggcaaccaccggctgaccctgggcctggtgtggaccatcatcctgcgcttccagatccaggacatctctgtggagacagaggacaacaaggagaagaagagcgccaaggatgccctgctgctgtggtgccagatgaagacagctggctacccaaatgtgaatgtgcacaacttcaccacctcctggagagatggcctggccttcaatgccatcgtgcacaagcacaggccagacctgctggactttgagagcctgaagaagtgcaatgcccactacaacctgcagaatgccttcaacctggccgagaaggagctgggcctgaccaagctgctggaccctgaagatgtgaatgtggaccagccagatgagaagagcatcatcacctacgtggccacctactaccactacttcagcaagatgaaggccctggccgtggagggcaagagaattggcaaggtgctggaccacgccatggaggccgagcggctggtggagaagtatgagagcctggccagcgagctgctgcagtggattgagcagaccatcgtgaccctgaatgaccggcagctggccaacagcctgagcggcgtgcagaaccagctgcagagcttcaacagctacagaacagtggagaagccacccaagttcacagagaagggcaacctggaggtgctgctcttcaccatccagagcaagctgcgggccaacaaccagaaggtgtacaccccccgggagggccgcctcatcagtgacatcaacaaggcctgggagcggctggagaaggccgagcacgagcgggagctggccctgaggacagagctgatccggcaggagaagctggagcagctggccgccaggtttgacaggaaggccgccatgagggagacctggctgtctgagaaccagaggctggtgtcccaggacaactttggcctggagctggccgctgtggaggccgctgtgaggaagcatgaggccatcgagacagacatcgtggcctacagcggccgggtgcaggccgtggatgctgtggccgctgagctggccgctgagcgctaccatgacatcaagagaattgctgcccggcagcacaacgtggcccggctgtgggacttcctgcggcagatggtggccgcccggcgggagcggctgctgctgaacctggagctgcagaaggtgttccaggacctgctgtacctgatggactggatggaggagatgaagggccgcctgcagagccaggacctgggccgccacctggccggcgtggaggacctgctgcagctgcacgagctggtggaggccgacattgctgtgcaggccgagcgggtgcgggctgtgtctgccagcgccctgcgcttctgcaaccctgggaaggagtaccggccctgtgacccccagctggtgtctgagcgggtggccaagctgacagccctggaggagcgggagaaggagaggaagaggaagcgggaggaggaggagaggaggaagcagcccccagcccctgagcccacagcctctgtgcccccaggggacctggtgggcggccagacagccagtgacaccacctgggatggcacccagccccggcccccacccagcacccaggcccccagcgtgaatggagtgtgcacagatggagagcccagccagcccctgctgggccagcagaggctggagcacagcagcttccctgagggccctggccctggcagcggagatgaggccaacggccccagaggagagcggcagaccaggacccggggccctgcccccagcgccatgccccagagccgcagcacagagagcgcccatgctgccaccctgcccccccggggccctgagcccagcgcccaggagcagatggagggcatgctgtgcaggaagcaggagatggaggccttcggcaagaaggccgccaacagatcctggcagaatgtgtactgtgtgctgcggcggggcagcctgggcttctacaaggatgccaaggccgccagcgctggggtgccctaccatggagaggtgcctgtgtccctggcccgggcccagggctctgtggcctttgactacaggaagaggaagcacgtgttcaagctgggcctgcaggacggcaaggagtacctgttccaggccaaggatgaggccgagatgagctcctggctgcgggtggtgaatgctgccatcgccacagccagcagcgccagcggggagcctgaggagcctgtggtgcccagcaccacccggggcatgacccgggccatgaccatgcctcctgtgtcccctgtgggcgctgagggccctgtggtgctgcggagcaaggatggccgggagcgggagcgggagaagcgcttctccttcttcaagaagaacaagtag

SEQ ID NO: 171306 - DNA, 354 bp, synthetic construct
  misc_feature 1..354: note = Description of Artificial Sequence: Synthetic coding sequence
  source 1..354: mol_type = other DNA
atgagcagcaccctgagccccacagactttgacagcctggagatccagggccagtacagcgacatcaacaaccgctgggacctgcctgacagcgactgggacaatgacagcagcagcgcccggctgtttgagaggagccgcatcaaggccctggctgatgagcgggaggccgtgcagaagaagaccttcaccaagtgggtgaacagccacctggcccgggtgacctgccgggtgggggacctgtacagcgacctgagagatggaagaaacctgctgcggctgctggaggtgctgtctggagagatcctgcccaagcccaccaagggccgcatgaggatccactgcctggagtag

SEQ ID NO: 171307 - DNA, 7098 bp, synthetic construct
  misc_feature 1..7098: note = Description of Artificial Sequence: Synthetic coding sequence
  source 1..7098: mol_type = other DNA
atgagcagcaccctgagccccacagactttgacagcctggagatccagggccagtacagcgacatcaacaaccgctgggacctgcctgacagcgactgggacaatgacagcagcagcgcccggctgtttgagaggagccgcatcaaggccctggctgatgagcgggaggccgtgcagaagaagaccttcaccaagtgggtgaacagccacctggcccgggtgacctgccgggtgggggacctgtacagcgacctgagagatggaagaaacctgctgcggctgctggaggtgctgtctggagagatcctgcccaagcccaccaagggccgcatgaggatccactgcctggagaatgtggacaaggccctgcagttcctgaaggagcagaaggtgcacctggagaacatgggcagccatgacatcgtggatggcaaccaccggctgaccctgggcctggtgtggaccatcatcctgcgcttccagatccaggacatctctgtggagacagaggacaacaaggagaagaagagcgccaaggatgccctgctgctgtggtgccagatgaagacagctggctacccaaatgtgaatgtgcacaacttcaccacctcctggagagatggcctggccttcaatgccatcgtgcacaagcacaggccagacctgctggactttgagagcctgaagaagtgcaatgcccactacaacctgcagaatgccttcaacctggccgagaaggagctgggcctgaccaagctgctggaccctgaagatgtgaatgtggaccagccagatgagaagagcatcatcacctacgtggccacctactaccactacttcagcaagatgaaggccctggccgtggagggcaagagaattggcaaggtgctggaccacgccatggaggccgagcggctggtggagaagtatgagagcctggccagcgagctgctgcagtggattgagcagaccatcgtgaccctgaatgaccggcagctggccaacagcctgagcggcgtgcagaaccagctgcagagcttcaacagctacagaacagtggagaagccacccaagttcacagagaagggcaacctggaggtgctgctcttcaccatccagagcaagctgcgggccaacaaccagaaggtgtacaccccccgggagggccgcctcatcagtgacatcaacaaggcctgggagcggctggagaaggccgagcacgagcgggagctggccctgaggacagagctgatccggcaggagaagctggagcagctggccgccaggtttgacaggaaggccgccatgagggagacctggctgtctgagaaccagaggctggtgtcccaggacaactttggcctggagctggccgctgtggaggccgctgtgaggaagcatgaggccatcgagacagacatcgtggcctacagcggccgggtgcaggccgtggatgctgtggccgctgagctggccgctgagcgctaccatgacatcaagagaattgctgcccggcagcacaacgtggcccggctgtgggacttcctgcggcagatggtggccgcccggcgggagcggctgctgctgaacctggagctgcagaaggtgttccaggacctgctgtacctgatggactggatggaggagatgaagggccgcctgcagagccaggacctgggccgccacctggccggcgtggaggacctgctgcagctgcacgagctggtggaggccgacattgctgtgcaggccgagcgggtgcgggctgtgtctgccagcgccctgcgcttctgcaaccctgggaaggagtaccggccctgtgacccccagctggtgtctgagcgggtggccaagctggagcagagctatgaggccctgtgtgagctggccgccgcccggcgggcccggctggaggagagccggcggctgtggaggttcctgtgggaggtgggggaggccgaggcctgggtgcgggagcagcagcacctgctggccagcgctgacaccggccgggacctgaccggggccctgcggctgctgaacaagcacacagccctgcggggggagatgagcggccgcctgggccccctgaagctgaccctggagcagggccagcagctggtggccgagggccaccctggggccagccaggccagcgcccgggctgctgagctgcaggcccagtgggagcggctggaggccctggccgaggagcgggcccagaggctggcccaggccgccagcctgtaccagttccaggctgatgccaatgacatggaggcctggctggtggatgccctgcggctggtgagcagccctgagctgggccatgatgagttcagcacccaggccctggcccggcagcaccgggccctggaggaggagatccgcagccaccggcccaccctggatgccctgcgggagcaggccgccgccctgccccccaccctgagcaggaccccagaggtgcagagccgggtgcccaccctggagcggcactatgaggagctgcaggcccgggccggggagcgggcccgggccctggaggccgccctggccctgtacaccatgctgtctgaggccggggcctgtggcctgtgggtggaggagaaggagcagtggctgaatggcctggccctgcctgagcggctggaggacctggaggtggtgcagcagagatttgagaccctggagcctgagatgaacaccctggccgcccagatcacagctgtgaatgacattgctgagcagctgctgaaggccaaccccccaggcaaggacagaattgtgaacacccaggagcagctgaaccaccgctggcagcagttccggcggctggctgatggcaagaaggccgccctgaccagcgccctgagcatccagaactaccacctggagtgcacagagacccaggcctggatgagggagaagaccaaggtgattgagagcacccagggcctgggcaatgacctggccggcgtgctggccctgcagaggaagctggccggcacagagcgggacctggaggccatcgccgcccgggtgggggagctgacccgggaggccaatgccctggccgccggccacccagcccaggccgtggccatcaatgcccggctgcgggaggtgcagacaggctgggaggacctgcgggccaccatgagaagaagagaggagagcctgggggaggcccggcggctgcaggacttcctgcggagcctggatgacttccaggcctggctgggccgcacccagacagctgtggccagcgaggagggccctgccaccctgcctgaggccgaggccctgctggcccagcacgccgccctgcggggggaggtggagcgggcccagagcgagtacagccggctgcgggccctgggggaggaggtgacccgggaccaggccgacccccagtgcctcttcctgcggcagaggctggaggccctgggcaccggctgggaggagctgggccgcatgtgggagagccggcagggccgcctggcccaggcccacggcttccagggcttcctgagagatgcccggcaggccgagggcgtgctgagcagccaggagtatgtgctgagccacacagagatgcctggcaccctgcaggccgcagatgctgccatcaagaagctggaggacttcatgagcaccatggatgccaacggggagcgcatccacggcctgctggaggccggccggcagctggtgtctgagggcaacatccacgccgacaagatccgggagaaggctgacagcattgaaagaagacacaagaagaaccaggatgctgcccagcagttcctgggccgcctgcgggacaaccgggagcagcagcacttcctgcaggactgccacgagctgaagctgtggattgatgagaagatgctgacagcccaggatgtgtcctatgatgaggccaggaacctgcacaccaagtggcagaagcaccaggccttcatggccgagctggccgccaacaaggactggctggacaaggtggacaaggagggccgggagctgaccctggagaagccagagctgaaggccctggtgtctgagaagctgcgggacctgcaccggcgctgggatgagctggagaccaccacccaggccaaggcccggagcctgtttgatgccaacagagctgagctgtttgcccagagctgctgtgccctggagagctggctggagagcctgcaggcccagctgcacagtgatgattatggcaaggacctgacctctgtgaacatcctgctgaagaagcagcagatgctggagtgggagatggctgtgcgggagaaggaggtggaggccatccaggcccaggccaaggccctggcccaggaggaccagggcgctggggaggtggagaggaccagcagagctgtggaggagaagttccgggccctgtgccagcccatgagggagcgctgccggcggctgcaggccagccgggagcagcaccagttccacagagatgtggaggatgagatcctgtgggtgacagagcggctgcccatggccagctccatggagcacggcaaggacctgcccagcgtgcagctgctgatgaagaagaaccagaccctgcagaaggagatccagggccacgagcccagaattgctgacctgcgggagcggcagagggccctgggcgctgctgctgctggccctgagctggccgagctgcaggagatgtggaagaggctgggccacgagctggagctgcggggcaagaggctggaggatgccctgcgggcccagcagttctacagagatgctgctgaggccgaggcctggatgggagagcaggagctgcacatgatgggccaggagaaggccaaggatgagctgagcgcccaggccgaggtgaagaagcaccaggtgctggagcaggccctggccgactatgcccagaccatccaccagctggccgccagcagccaggacatgattgaccacgagcaccctgagagcacccgcatcagcatccggcaggcccaggtggacaagctgtatgccggcctgaaggagctggccggggagcggcgggagcggctgcaggagcacctgcggctgtgccagctgcggcgggagctggatgacctggagcagtggatccaggagcgggaggtggtggccgccagccatgagctgggccaggactatgagcacgtgaccatgctgcgggacaagttccgggagttcagccgggacaccagcaccatcggccaggagcgggtggacagcgccaatgccctggccaacggcctgattgctgggggccatgctgcccgggccaccgtggccgagtggaaggacagcctgaatgaggcctgggccgacctgctggagctgctggacacccggggccaggtgctggccgccgcctatgagctgcagcgcttcctgcacggggcccggcaggccctggcccgggtgcagcacaagcagcagcagctgcctgatggcaccggccgggacctgaatgctgctgaggccctgcagaggaggcactgtgcctatgaacatgacatccaggccctgagcccccaggtgcagcaggtgcaggatgatggccaccggctgcagaaggcctatgctggggacaaggccgaggagatcggccgccacatgcaggccgtggccgaggcctgggcccagctgcagggcagcagcgctgcccggcggcagctgctgctggacaccacagacaagttccgcttcttcaaggctgtgcgggagctgatgctgtggatggatgaggtgaacctgcagatggatgcccaggagcggcccagagatgtgtcctctgctgacctggtgatcaagaaccagcagggcatcaaggccgagattgaggcccgggctgaccgcttcagcagctgcatcgacatgggcaaggagctgctggcccggagccactacgccgctgaggagatcagcgagaagctgagccagctgcaggcccggcggcaggagacagctgagaagtggcaggagaagatggactggctgcagctggtgctggaggtgctggtgtttggaagagatgctggcatggccgaggcctggctgtgcagccaggagcccctggtgcgctctgctgagctgggctgcaccgtggatgaggtggagagcctcatcaagagacatgaggccttccagaagtctgctgtggcctgggaggagcgcttctgtgccctggagaagctgacagccctggaggagcgggagaaggagaggaagaggaagcgggaggaggaggagaggaggaagcagcccccagcccctgagcccacagcctctgtgcccccaggggacctggtgggcggccagacagccagtgacaccacctgggatggcacccagccccggcccccacccagcacccaggcccccagcgtgaatggagtgtgcacagatggagagcccagccagcccctgctgggccagcagaggctggagcacagcagcttccctgagggccctggccctggcagcggagatgaggccaacggccccagaggagagcggcagaccaggacccggggccctgcccccagcgccatgccccagagccgcagcacagagagcgcccatgctgccaccctgcccccccggggccctgagcccagcgcccaggagcagatggagggcatgctgtgcaggaagcaggagatggaggccttcggcaagaaggccgccaacagatcctggcagaatgtgtactgtgtgctgcggcggggcagcctgggcttctacaaggatgccaaggccgccagcgctggggtgccctaccatggagaggtgcctgtgtccctggcccgggcccagggctctgtggcctttgactacaggaagaggaagcacgtgttcaagctgggcctgcaggacggcaaggagtacctgttccaggccaaggatgaggtgtcctgccccagctgcagcagcctgtctgtgcccttccagaagctgcctgctgctgacagccccagcttccctgtgctgcccctcttccctggcctggtgctgtgtgggaagacaggctgtgtgcggcggccccaccaggccgccctgcctgtgtag

SEQ ID NO: 171308 - DNA, 7173 bp, synthetic construct; identical to SEQ ID NO: 171304
  misc_feature 1..7173: note = Description of Artificial Sequence: Synthetic coding sequence
  source 1..7173: mol_type = other DNA

SEQ ID NO: 171309 - DNA, 6465 bp, synthetic construct
  misc_feature 1..6465: note = Description of Artificial Sequence: Synthetic coding sequence
  source 1..6465: mol_type = other DNA
atggcccaggtgcctggagaggtggacaacatggagggcctgcctgcccccaacaacaacccagctgcccgctgggagagcccagaccggggctgggagcgggagcagcctgctgccagcacagctgctgccagcctgtttgagtgcagccgcatcaaggccctggctgatgagcgggaggccgtgcagaagaagaccttcaccaagtgggtgaacagccacctggcccgggtgggctgccacatcggggacctgtatgtggacctgagagatggctttgtgctgacccggctgctggaggtgctgtctggagagcagctgccccggcccacccggggccgcatgaggatccacagcctggagaatgtggacaaggccctgcagttcctgaaggagcagagggtgcacctggagaatgtgggcagccatgacatcgtggatggcaaccaccggctgaccctgggcctggtgtggaccatcatcctgcgcttccagatccaggtgatcaagattgaaacagaggacaaccgggagaccaggtctgccaaggatgccctgctgctgtggtgccagatgaagacagctggctacccagaggtgaacatccagaacttcaccacctcctggagagatggcctggccttcaatgccctgatccaccgccacaggccagacctggtggacttcagcaagctgaccaagagcaatgccaactacaacctgcagagggccttcagaacagctgagcagcacctgggcctggcccggctgctggaccctgaagatgtgaacatggaggccccagatgagaagagcatcatcacctacgtggtgtccttctaccactacttcagcaagatgaaggccctggccgtggagggcaagagaattggcaaggtgctggaccaggtgctggaggtgggcaagatcatcgagagatatgaggagctggccgctgagctgctggcctggatccacaggacagtgggcctcatcagcaaccagaagtttgccaacagcctgagcggcgtgcagcagcagctgcaggccttcaccgcctactgcaccctggagaagcctgtgaagttccaggagaagggcaacctggaggtgctgctcttcagcatccagagcaagctgcgggcctgcaacagaagactctttgtgccccgggagggctgcggcatctgggacatcgacaaggcctggggcgagctggagaaggccgagcacgagcgggaggccgccctgcgggcagagctgatccggcaggagaagctggagctgctggcccagagatttgaccacaaggtggccatgagggagagctggctgaatgaaaaccagaggctggtgtcccaggacaactttggctatgagctgcctgctgtggaggccgccatgaagaagcatgaggccatcgaggccgacattgctgcctatgaggagcgggtgcagggcgtggccgagctggcccaggccctggccgctgagggctactatgacatccggcgggtggccgcccagagggacagcgtgctgcggcagtgggccctgctgaccggcctggtgggcgcccggaggacccggctggagcagaacctggccctgcagaaggtgttccaggagatggtgtacatggtggactggatggaggagatgcaggcccagctgctgagccgggagtgtggccagcacctggtggaggctgatgacctgctgcagaagcacggcctgctggagggggacattgctgcccagagcgagcgggtggaggccctgaatgctgctgccctgcgcttcagccagctgcagggctaccagccctgtgacccccaggtgatctgcaacagagtgaaccacgtgcacggctgcctggccgagctgcaggagcaggccgcccggcggcgggcagagctggaggccagccgcagcctgtgggccctgctgcaggagctggaggaggccgagagctgggcccgggacaaggagcggctgctggaggccgccggcggcggcggggccgccggggctgctggagctgctggaacagctggaggagcccatgacctgagcagcacagcccggctgctggcccagcacaagatcctgcagggcgagctgggcggcagaagagccctgctgcagcaggccctgcgctgtggggaggagctggtggccgccggcggcgctgtgggccctggagctgacacagtgcacctggtgggcctggccgagcgggccgccagcgcccggcggcgctggcagaggctggaggaggccgccgcccggcgggagcggcggctgcaggaggcccgggccctgcaccagtttggagctgacctggatggcctgctggactggctgagagatgcctaccgcctggccgccgccggggactttggacatgatgaggccagcagccggcggctggcccggcagcaccgggccctgactggagaggtggaggcccaccggggccctgtgtctggcctgcggcggcagctggccaccctgggcggggccagcggggccggccccctggtggtggccctgcaggtgcgggtggtggaggccgagcagctgtttgctgaggtgacagaggtggccgccctgcggcggcagtggctgagagatgccctggccgtgtacaggatgtttggagaggtgcacgcctgtgagctgtggattggagagaaggagcagtggctgctgtccatgagggtgcctgacagcctggatgatgtggaggtggtgcagcacagatttgagagcctggaccaggagatgaacagcctgatgggccgggtgctggatgtgaaccacacagtgcaggagctggtggagggcggccaccccagcagtgatgaggtgcgcagctgccaggaccacctgaacagccgctggaaccgcatcgtggagctggtggagcagaggaaggaggagatgtctgctgtgctgctggtggagaaccacgtgctggaggtggccgaggtgcgggcccaggtgcgggagaagagaagagctgtggagagcgccccccgggccggcggggccctgcagtggaggctgagcggcctggaggccgccctgcaggccctggagccccggcaggccgccctgctggaggaggccgccctgctggccgagcgcttccctgcccaggccgcccggctgcaccagggcgctgaggagctgggcgctgagtggggcgccctggccagcgctgcccaggcctgtggggaggccgtggccgctgctggccgcctgcagcgcttcctgcatgacctggatgccttcctggactggctggtgcgggcccaggaggccgccggcggcagcgagggccccctgcccaacagcctggaggaggctgatgccctgctggcccggcatgctgccctgaaggaggaggtggaccagcgggaggaggactatgccagaattgtggccgccagcgaggccctgctggccgcagatggagctgagctgggccctggcctggccctggatgagtggctgccccacctggagctgggctggcacaagctgctgggcctgtgggaggcccggcgggaggccctggtgcaggcccacatctaccagctgttcctgcgggacctgcggcaggccctggtggtgctgaggaaccaggagatggccctgtctggagctgagctgcccggcaccgtggagagcgtggaggaggccctgaagcagcaccgggacttcctgaccaccatggagctgagccagcagaagatgcaggtggccgtgcaggccgctgagggcctgctgcggcagggcaacatctacggggagcaggcccaggaggccgtgacccggctgctggagaagaaccaggagaaccagctgcgggcccagcagtggatgcagaagctgcatgaccagctggagctgcagcacttcctgcgggactgccacgagctggatggctggatccacgagaagatgctgatggccagagatggcacccgggaggacaaccacaagctgcacaagcgctggctgcggcaccaggccttcatggccgagctggcccagaacaaggagtggctggagaagattgagcgggagggccagcagctgatgcaggagaagccagagctggccgcctctgtgaggaagaagctgggggagatccggcagtgctgggccgagctggagagcaccacccaggccaaggcccggcagctgtttgaggccagcaaggctgaccagctggtgcagagctttgctgagctggacaagaagctgctgcacatggagagccagctgcaggatgtggaccccggcggggacctggccaccgtgaacagccagctgaagaagctgcagagcatggagagccaggtggaggagtggtaccgggaggtgggggagctgcaggcccagacagctgccctgcccctggagcccgccagcaaggagctggtgggggagcggcagaatgctgtgggggagcggctggtgcggctgctggagcccctgcaggagcggcggcggctgctgctggccagcaaggagctgcaccaggtggcccatgacctggatgatgagctggcctgggtgcaggagcggctgcccctggccatgcagacagaaagaggaaatggcctgcaggccgtgcagcagcacatcaagaagaaccagggcctgcggcgggagatccaggcccacggcccccggctggaggaggtgctggagcgggccggggccctggccagcctgcggagccctgaggccgaggccgtgagaagaggcctggagcagctgcagagcgcctgggccggcctgcgggaggccgctgagcggcggcagcaggtgctggatgctgccttccaggtggagcagtactactttgatgtggccgaggtggaggcctggctgggggagcaggagctgctgatgatgtctgaagataaaggcaaggatgagcagagcaccctgcagctgctgaagaagcacctgcagctggagcagggcgtggagaactatgaggagagcatcgcccagctgagccggcagtgccgggccctgctggagatgggccacccagattctgagcagatcagccggcggcagagccaggtggaccggctgtatgtggccctgaaggagctgggggaggagaggagagtggccctggagcagcagtactggctgtaccagctgagccggcaggtgtctgagctggagcactggattgctgagaaggaggtggtggccggcagccctgagctgggccaggactttgaacatgtgtctgtgctgcaggagaagttcagcgagtttgccagcgagaccggcatggccggccgggagcggctggccgctgtgaaccagatggtggatgagctgattgaatgtggccacacagctgctgccaccatggccgagtggaaggatggcctgaatgaggcctgggccgagctgctggagctgatgggcacccgggcccagctgctggccgccagccgggagctgcacaagttcttcagtgatgcccgggagctgcagggccagatcgaggagaagagaagaaggctgccccggctgaccaccccacctgagccccggcccagcgccagctccatgcagaggaccctgcgggcctttgaacatgacctgcagctgctggtgtcccaggtgcggcagctgcaggagggcgccgcccagctgaggacagtgtatgctggggagcacgccgaggccatcgccagccgggagcaggaggtgctgcagggctggaaggagctgctgagcgcctgtgaagatgcccggctgcacgtgagcagcacagcagatgccctgcgcttccacagccaggtgcgggacctgctgtcctggatggatggcatcgccagccagattggagctgctgacaagcccagagatgtgtcctctgtggaggtgctgatgaactaccaccagggcctgaagacagagctggaggcccgggtgcctgagctgaccacctgccaggagctgggccgcagcctgctgctgaacaagagcgccatggctgatgagatccaggcccagctggacaagctgggcaccaggaaggaggaggtgtctgagaagtgggacagacactgggagtggctgcagcagatgctggaggtgcaccagtttgcccaggaggccgtggtggctgatgcctggctgacagcccaggagcccctgctgcagagccgggagctgggcagctctgtggatgaggtggagcagctgatcagaagacatgaggccttcaggaaggctgctgctgcctgggaggagcgcttcagcagcctgcggcggctgaccaccccccggcgggaggaccacctgaaccctggggtgcaggaccagccctggcagcacacagagaagcccagcctgcccaagcccaaggccaacaaggagaagacagccaggagagatggcacctgcctgtag

SEQ ID NO: 171310 - DNA, 3930 bp, synthetic construct
  misc_feature 1..3930: note = Description of Artificial Sequence: Synthetic coding sequence
  source 1..3930: mol_type = other DNA
atggcccaggtgcctggagaggtggacaacatggagggcctgcctgcccccaacaacaacccagctgcccgctgggagagcccagaccggggctgggagcgggagcagcctgctgccagcacagctgctgccagcctgtttgagtgcagccgcatcaaggccctggctgatgagcgggaggccgtgcagaagaagaccttcaccaagtgggtgaacagccacctggcccgggtgggctgccacatcggggacctgtatgtggacctgagagatggctttgtgctgacccggctgctggaggtgctgtctggagagcagctgccccggcccacccggggccgcatgaggatccacagcctggagaatgtggacaaggccctgcagttcctgaaggagcagagggtgcacctggagaatgtgggcagccatgacatcgtggatggcaaccaccggctgaccctgggcctggtgtggaccatcatcctgcgcttccagatccaggtgatcaagattgaaacagaggacaaccgggagaccaggtctgccaaggatgccctgctgctgtggtgccagatgaagacagctggctacccagaggtgaacatccagaacttcaccacctcctggagagatggcctggccttcaatgccctgatccaccgccacaggccagacctggtggacttcagcaagctgaccaagagcaatgccaactacaacctgcagagggccttcagaacagctgagcagcacctgggcctggcccggctgctggaccctgaagatgtgaacatggaggccccagatgagaagagcatcatcacctacgtggtgtccttctaccactacttcagcaagatgaaggccctggccgtggagggcaagagaattggcaaggtgctggaccaggtgctggaggtgggcaagatcatcgagagatatgaggagctggccgctgagctgctggcctggatccacaggacagtgggcctcatcagcaaccagaagtttgccaacagcctgagcggcgtgcagcagcagctgcaggccttcaccgcctactgcaccctggagaagcctgtgaagttccaggagaagggcaacctggaggtgctgctcttcagcatccagagcaagctgcgggcctgcaacagaagactctttgtgccccgggagggctgcggcatctgggacatcgacaaggcctggggcgagctggagaaggccgagcacgagcgggaggccgccctgcgggcagagctgatccggcaggagaagctggagctgctggcccagagatttgaccacaaggtggccatgagggagagctggctgaatgaaaaccagaggctggtgtcccaggacaactttggctatgagctgcctgctgtggaggccgccatgaagaagcatgaggccatcgaggccgacattgctgcctatgaggagcgggtgcagggcgtggccgagctggcccaggccctggccgctgagggctactatgacatccggcgggtggccgcccagagggacagcgtgctgcggcagtgggccctgctgaccggcctggtgggcgcccggaggacccggctggagcagaacctggccctgcagaaggtgttccaggagatggtgtacatggtggactggatggaggagatgcaggcccagctgctgagccgggagtgtggccagcacctggtggaggctgatgacctgctgcagaagcacggcctgctggagggggacattgctgcccagagcgagcgggtggaggccctgaatgctgctgccctgcgcttcagccagctgcagggctaccagccctgtgacccccaggtgatctgcaacagagtgaaccacgtgcacggctgcctggccgagctgcaggagcaggccgcccggcggcgggcagagctggaggccagccgcagcctgtgggccctgctgcaggagctggaggaggccgagagctgggcccgggacaaggagcggctgctggaggccgccggcggcggcggggccgccggggctgctggagctgctggaacagctggaggagcccatgacctgagcagcacagcccggctgctggcccagcacaagatcctgcagggcgagctgggcggcagaagagccctgctgcagcaggccctgcgctgtggggaggagctggtggccgccggcggcgctgtgggccctggagctgacacagtgcacctggtgggcctggccgagcgggccgccagcgcccggcggcgctggcagaggctggaggaggccgccgcccggcgggagcggcggctgcaggaggcccgggccctgcaccagtttggagctgacctggatggcctgctggactggctgagagatgcctaccgcctggccgccgccggggactttggacatgatgaggccagcagccggcggctggcccggcagcaccgggccctgactggagaggtggaggcccaccggggccctgtgtctggcctgcggcggcagctggccaccctgggcggggccagcggggccggccccctggtggtggccctgcaggtgcgggtggtggaggccgagcagctgtttgctgaggtgacagaggtggccgccctgcggcggcagtggctgagagatgccctggccgtgtacaggatgtttggagaggtgcacgcctgtgagctgtggattggagagaaggagcagtggctgctgtccatgagggtgcctgacagcctggatgatgtggaggtggtgcagcacagatttgagagcctggaccaggagatgaacagcctgatgggccgggtgctggatgtgaaccacacagtgcaggagctggtggagggcggccaccccagcagtgatgaggtgcgcagctgccaggaccacctgaacagccgctggaaccgcatcgtggagctggtggagcagaggaaggaggagatgtctgctgtgctgctggtggagaaccacgtgctggaggtggccgaggtgcgggcccaggtgcgggagaagagaagagctgtggagagcgccccccgggccggcggggccctgcagtggaggctgagcggcctggaggccgccctgcaggccctggagccccggcaggccgccctgctggaggaggccgccctgctggccgagcgcttccctgcccaggccgcccggctgcaccagggcgctgaggagctgggcgctgagtggggcgccctggccagcgctgcccaggcctgtggggaggccgtggccgctgctggccgcctgcagcgcttcctgcatgacctggatgccttcctggactggctggtgcgggcccaggaggccgccggcggcagcgagggccccctgcccaacagcctggaggaggctgatgccctgctggcccggcatgctgccctgaaggaggaggtggaccagcgggaggaggactatgccagaattgtggccgccagcgaggccctgctggccgcagatggagctgagctgggccctggcctggccctggatgagtggctgccccacctggagctgggctggcacaagctgctgggcctgtgggaggcccggcgggaggccctggtgcaggcccacatctaccagctgttcctgcgggacctgcggcaggccctggtggtgctgaggaaccaggagatggccctgtctggagctgagctgcccggcaccgtggagagcgtggaggaggccctgaagcagcaccgggacttcctgaccaccatggagctgagccagcagaagatgcaggtggccgtgcaggccgctgagggcctgctgcggcagggcaacatctacggggagcaggcccaggaggccgtgacccggctgctggagaagtgcctgatcatccacccagccctgctgcaccccccctgggagcccccagacctgcccaggagcagcagctag

SEQ ID NO: 171311 - DNA, 7695 bp, synthetic construct
  misc_feature 1..7695: note = Description of Artificial Sequence: Synthetic coding sequence
  source 1..7695: mol_type = other DNA
atggcccaggtgcctggagaggtggacaacatggagggcctgcctgcccccaacaacaacccagctgcccgctgggagagcccagaccggggctgggagcgggagcagcctgctgccagcacagctgctgccagcctgtttgagtgcagccgcatcaaggccctggctgatgagcgggaggccgtgcagaagaagaccttcaccaagtgggtgaacagccacctggcccgggtgggctgccacatcggggacctgtatgtggacctgagagatggctttgtgctgacccggctgctggaggtgctgtctggagagcagctgccccggcccacccggggccgcatgaggatccacagcctggagaatgtggacaaggccctgcagttcctgaaggagcagagggtgcacctggagaatgtgggcagccatgacatcgtggatggcaaccaccggctgaccctgggcctggtgtggaccatcatcctgcgcttccagatccaggtgatcaagattgaaacagaggacaaccgggagaccaggtctgccaaggatgccctgctgctgtggtgccagatgaagacagctggctacccagaggtgaacatccagaacttcaccacctcctggagagatggcctggccttcaatgccctgatccaccgccacaggccagacctggtggacttcagcaagctgaccaagagcaatgccaactacaacctgcagagggccttcagaacagctgagcagcacctgggcctggcccggctgctggaccctgaagatgtgaacatggaggccccagatgagaagagcatcatcacctacgtggtgtccttctaccactacttcagcaagatgaaggccctggccgtggagggcaagagaattggcaaggtgctggaccaggtgctggaggtgggcaagatcatcgagagatatgaggagctggccgctgagctgctggcctggatccacaggacagtgggcctcatcagcaaccagaagtttgccaacagcctgagcggcgtgcagcagcagctgcaggccttcaccgcctactgcaccctggagaagcctgtgaagttccaggagaagggcaacctggaggtgctgctcttcagcatccagagcaagctgcgggcctgcaacagaagactctttgtgccccgggagggctgcggcatctgggacatcgacaaggcctggggcgagctggagaaggccgagcacgagcgggaggccgccctgcgggcagagctgatccggcaggagaagctggagctgctggcccagagatttgaccacaaggtggccatgagggagagctggctgaatgaaaaccagaggctggtgtcccaggacaactttggctatgagctgcctgctgtggaggccgccatgaagaagcatgaggccatcgaggccgacattgctgcctatgaggagcgggtgcagggcgtggccgagctggcccaggccctggccgctgagggctactatgacatccggcgggtggccgcccagagggacagcgtgctgcggcagtgggccctgctgaccggcctggtgggcgcccggaggacccggctggagcagaacctggccctgcagaaggtgttccaggagatggtgtacatggtggactggatggaggagatgcaggcccagctgctgagccgggagtgtggccagcacctggtggaggctgatgacctgctgcagaagcacggcctgctggagggggacattgctgcccagagcgagcgggtggaggccctgaatgctgctgccctgcgcttcagccagctgcagggctaccagccctgtgacccccaggtgatctgcaacagagtgaaccacgtgcacggctgcctggccgagctgcaggagcaggccgcccggcggcgggcagagctggaggccagccgcagcctgtgggccctgctgcaggagctggaggaggccgagagctgggcccgggacaaggagcggctgctggaggccgccggcggcggcggggccgccggggctgctggagctgctggaacagctggaggagcccatgacctgagcagcacagcccggctgctggcccagcacaagatcctgcagggcgagctgggcggcagaagagccctgctgcagcaggccctgcgctgtggggaggagctggtggccgccggcggcgctgtgggccctggagctgacacagtgcacctggtgggcctggccgagcgggccgccagcgcccggcggcgctggcagaggctggaggaggccgccgcccggcgggagcggcggctgcaggaggcccgggccctgcaccagtttggagctgacctggatggcctgctggactggctgagagatgcctaccgcctggccgccgccggggactttggacatgatgaggccagcagccggcggctggcccggcagcaccgggccctgactggagaggtggaggcccaccggggccctgtgtctggcctgcggcggcagctggccaccctgggcggggccagcggggccggccccctggtggtggccctgcaggtgcgggtggtggaggccgagcagctgtttgctgaggtgacagaggtggccgccctgcggcggcagtggctgagagatgccctggccgtgtacaggatgtttggagaggtgcacgcctgtgagctgtggattggagagaaggagcagtggctgctgtccatgagggtgcctgacagcctggatgatgtggaggtggtgcagcacagatttgagagcctggaccaggagatgaacagcctgatgggccgggtgctggatgtgaaccacacagtgcaggagctggtggagggcggccaccccagcagtgatgaggtgcgcagctgccaggaccacctgaacagccgctggaaccgcatcgtggagctggtggagcagaggaaggaggagatgtctgctgtgctgctggtggagaaccacgtgctggaggtggccgaggtgcgggcccaggtgcgggagaagagaagagctgtggagagcgccccccgggccggcggggccctgcagtggaggctgagcggcctggaggccgccctgcaggccctggagccccggcaggccgccctgctggaggaggccgccctgctggccgagcgcttccctgcccaggccgcccggctgcaccagggcgctgaggagctgggcgctgagtggggcgccctggccagcgctgcccaggcctgtggggaggccgtggccgctgctggccgcctgcagcgcttcctgcatgacctggatgccttcctggactggctggtgcgggcccaggaggccgccggcggcagcgagggccccctgcccaacagcctggaggaggctgatgccctgctggcccggcatgctgccctgaaggaggaggtggaccagcgggaggaggactatgccagaattgtggccgccagcgaggccctgctggccgcagatggagctgagctgggccctggcctggccctggatgagtggctgccccacctggagctgggctggcacaagctgctgggcctgtgggaggcccggcgggaggccctggtgcaggcccacatctaccagctgttcctgcgggacctgcggcaggccctggtggtgctgaggaaccaggagatggccctgtctggagctgagctgcccggcaccgtggagagcgtggaggaggccctgaagcagcaccgggacttcctgaccaccatggagctgagccagcagaagatgcaggtggccgtgcaggccgctgagggcctgctgcggcagggcaacatctacggggagcaggcccaggaggccgtgacccggctgctggagaagaaccaggagaaccagctgcgggcccagcagtggatgcagaagctgcatgaccagctggagctgcagcacttcctgcgggactgccacgagctggatggctggatccacgagaagatgctgatggccagagatggcacccgggaggacaaccacaagctgcacaagcgctggctgcggcaccaggccttcatggccgagctggcccagaacaaggagtggctggagaagattgagcgggagggccagcagctgatgcaggagaagccagagctggccgcctctgtgaggaagaagctgggggagatccggcagtgctgggccgagctggagagcaccacccaggccaaggcccggcagctgtttgaggccagcaaggctgaccagctggtgcagagctttgctgagctggacaagaagctgctgcacatggagagccagctgcaggatgtggaccccggcggggacctggccaccgtgaacagccagctgaagaagctgcagagcatggagagccaggtggaggagtggtaccgggaggtgggggagctgcaggcccagacagctgccctgcccctggagcccgccagcaaggagctggtgggggagcggcagaatgctgtgggggagcggctggtgcggctgctggagcccctgcaggagcggcggcggctgctgctggccagcaaggagctgcaccaggtggcccatgacctggatgatgagctggcctgggtgcaggagcggctgcccctggccatgcagacagaaagaggaaatggcctgcaggccgtgcagcagcacatcaagaagaaccagggcctgcggcgggagatccaggcccacggcccccggctggaggaggtgctggagcgggccggggccctggccagcctgcggagccctgaggccgaggccgtgagaagaggcctggagcagctgcagagcgcctgggccggcctgcgggaggccgctgagcggcggcagcaggtgctggatgctgccttccaggtggagcagtactactttgatgtggccgaggtggaggcctggctgggggagcaggagctgctgatgatgtctgaagataaaggcaaggatgagcagagcaccctgcagctgctgaagaagcacctgcagctggagcagggcgtggagaactatgaggagagcatcgcccagctgagccggcagtgccgggccctgctggagatgggccacccagattctgagcagatcagccggcggcagagccaggtggaccggctgtatgtggccctgaaggagctgggggaggagaggagagtggccctggagcagcagtactggctgtaccagctgagccggcaggtgtctgagctggagcactggattgctgagaaggaggtggtggccggcagccctgagctgggccaggactttgaacatgtgtctgtgctgcaggagaagttcagcgagtttgccagcgagaccggcatggccggccgggagcggctggccgctgtgaaccagatggtggatgagctgattgaatgtggccacacagctgctgccaccatggccgagtggaaggatggcctgaatgaggcctgggccgagctgctggagctgatgggcacccgggcccagctgctggccgccagccgggagctgcacaagttcttcagtgatgcccgggagctgcagggccagatcgaggagaagagaagaaggctgccccggctgaccaccccacctgagccccggcccagcgccagctccatgcagaggaccctgcgggcctttgaacatgacctgcagctgctggtgtcccaggtgcggcagctgcaggagggcgccgcccagctgaggacagtgtatgctggggagcacgccgaggccatcgccagccgggagcaggaggtgctgcagggctggaaggagctgctgagcgcctgtgaagatgcccggctgcacgtgagcagcacagcagatgccctgcgcttccacagccaggtgcgggacctgctgtcctggatggatggcatcgccagccagattggagctgctgacaagcccagagatgtgtcctctgtggaggtgctgatgaactaccaccagggcctgaagacagagctggaggcccgggtgcctgagctgaccacctgccaggagctgggccgcagcctgctgctgaacaagagcgccatggctgatgagatccaggcccagctggacaagctgggcaccaggaaggaggaggtgtctgagaagtgggacagacactgggagtggctgcagcagatgctggaggtgcaccagtttgcccaggaggccgtggtggctgatgcctggctgacagcccaggagcccctgctgcagagccgggagctgggcagctctgtggatgaggtggagcagctgatcagaagacatgaggccttcaggaaggctgctgctgcctgggaggagcgcttcagcagcctgcggcggctgaccaccatcgagaagatcaaggccgagcagagcaagcagccccccacccccctgctgggcaggaagttcttcggggaccccacagagctggccgccaaggccgcccccctgctgcggcctgggggctatgagcggggcctggagcccctggcccggcgggccagtgacaccctgtctgctgaggtgaggaccagggtgggctacgtgcggcaggagctgaagccagagcggctgcagcccagaattgaccggctgcctgagatccctggccgggtggagcctgctgccctgcctgctgccccagaagatgctgctgagaccccagccaccccagctgctgctgagcaggtgcggcccaggcctgagcggcaggagagcgctgacagagctgaggagctgcccaggagaagaagacctgagcggcaggagagcgtggaccagagcgaggaggccgccaggagaagaagacctgagcggcaggagagcgctgagcatgaagctgcccacagcctgaccctgggccgctatgagcagatggagcggcggcgggagcggcgggagcggcggctggagcggcaggagagcagcgagcaggagatgcccatccggggggacctggtgaagggcaaggccaccctggccgacatcgtggagcagctgcaggagaaggaggccggccctggcctgcctgctggccccagcctgccccagccccgggagctgcccccaggccgcctgcccaacggcctggagctgcctgagaggacccccaggccagaccggccccgggcccgggaccggcccaagccccggcggcggccccggccccgggagggcggggagggcggcggcagccgccgcagccgcagcgccccagcccagggcggcagcgccccagcccctcctcctccacccacccacacagtgcagcacgagggcttcctgctgaggaagcgggagctggatgccaacaggaagagcagcaacagatcctgggtgtccctgtactgtgtgctgagcaaaggagagctgggcttctacaaggacagcaaaggacctgccagcggcagcacccatggaggagagcccctgctgagcctgcacaaggccaccagcgaggtggccagtgactacaagaagaagaagcacgtgttcaagctgcagacccaggacggcagcgagttcctgctgcaggccaaggatgaggaggagatgaatggctggctggaggccgtggccagctctgtggccgagcacgccgagatcgcccgctggggccagaccctgcccaccaccagcagcacagatgagggcaaccccaagcgggagggcggggacagaagagccagcggccgcaggaagtag

SEQ ID NO: 171312 - DNA, 2037 bp, synthetic construct
  misc_feature 1..2037: note = Description of Artificial Sequence: Synthetic coding sequence
  source 1..2037: mol_type = other DNA
atgctgatggccagagatggcacccgggaggacaaccacaagctgcacaagcgctggctgcggcaccaggccttcatggccgagctggcccagaacaaggagtggctggagaagattgagcgggagggccagcagctgatgcaggagaagccagagctggccgcctctgtgaggaagaagctgggggagatccggcagtgctgggccgagctggagagcaccacccaggccaaggcccggcagctgtttgaggccagcaaggctgaccagctggtgcagagctttgctgagctggacaagaagctgctgcacatggagagccagctgcaggatgtggaccccggcggggacctggccaccgtgaacagccagctgaagaagctgcagagcatggagagccaggtggaggagtggtaccgggaggtgggggagctgcaggcccagacagctgccctgcccctggagcccgccagcaaggagctggtgggggagcggcagaatgctgtgggggagcggctggtgcggctgctggagcccctgcaggagcggcggcggctgctgctggccagcaaggagctgcaccaggtggcccatgacctggatgatgagctggcctgggtgcaggagcggctgcccctggccatgcagacagaaagaggaaatggcctgcaggccgtgcagcagcacatcaagaagaaccagggcctgcggcgggagatccaggcccacggcccccggctggaggaggtgctggagcgggccggggccctggccagcctgcggagccctgaggccgaggccgtgagaagaggcctggagcagctgcagagcgcctgggccggcctgcgggaggccgctgagcggcggcagcaggtgctggatgctgccttccaggtggagcagtactactttgatgtggccgaggtggaggcctggctgggggagcaggagctgctgatgatgtctgaagataaaggcaaggatgagcagagcaccctgcagctgctgaagaagcacctgcagctggagcagggcgtggagaactatgaggagagcatcgcccagctgagccggcagtgccgggccctgctggagatgggccacccagattctgagcagatcagccggcggcagagccaggtggaccggctgtatgtggccctgaaggagctgggggaggagaggagagtggccctggagcagcagtactggctgtaccagctgagccggcaggtgtctgagctggagcactggattgctgagaaggaggtggtggccggcagccctgagctgggccaggactttgaacatgtgtctgtgctgcaggagaagttcagcgagtttgccagcgagaccggcatggccggccgggagcggctggccgctgtgaaccagatggtggatgagctgattgaatgtggccacacagctgctgccaccatggccgagtggaaggatggcctgaatgaggcctgggccgagctgctggagctgatgggcacccgggcccagctgctggccgccagccgggagctgcacaagttcttcagtgatgcccgggagctgcagggccagatcgaggagaagagaagaaggctgccccggctgaccaccccacctgagccccggcccagcgccagctccatgcagaggaccctgcgggcctttgaacatgacctgcagctgctggtgtcccaggtgcggcagctgcaggagggcgccgcccagctgaggacagtgtatgctggggagcacgccgaggccatcgccagccgggagcaggaggtgctgcagggctggaaggagctgctgagcgcctgtgaagatgcccggctgcacgtgagcagcacagcagatgccctgcgcttccacagccaggtgcgggacctgctgtcctggatggatggcatcgccagccagattggagctgctgacaagccccgctgccccagcagcctgctgggcctgcctgccagcccctggtggcccaccccagccacccccagccccctgacagcccccttctccatggagtag

SEQ ID NO: 171313 - DNA, 3924 bp, synthetic construct
  misc_feature 1..3924: note = Description of Artificial Sequence: Synthetic coding sequence
  source 1..3924: mol_type = other DNA
atgccccactaccccagctgcagcagcgcccccagcctgggcaccccccggcccccccagatccagcagctggaggcccggcacaggaaccaggagaaccagctgcgggcccagcagtggatgcagaagctgcatgaccagctggagctgcagcacttcctgcgggactgccacgagctggatggctggattcatgagaagatgctgatggccagagatggcacccgggaggacaaccacaagctgcacaagcgctggctgcggcaccaggccttcatggccgagctggcccagaacaaggagtggctggagaagattgaaagagagggccagcagctgatgcaggagaagccagagctggccgcctctgtgaggaagaagctgggggagatccggcagtgctgggccgagctggagagcaccacccaggccaaggcccggcagctgtttgaggccagcaaggctgaccagctggtgcagagctttgctgagctggacaagaagctgctgcacatggagagccagctgcaggatgtggaccctggaggagacctggccaccgtgaacagccagctgaagaagctgcagagcatggagagccaggtggaggagtggtaccgggaggtgggggagctgcaggcccagacagctgccctgcccctggagcccgccagcaaggagctggtgggggagcggcagaatgctgtgggggagcggctggtgcggctgctggagcccctgcaggagcggcggcggctgctgctggccagcaaggagctgcaccaggtggcccatgacctggatgatgagctggcctgggtgcaggagcggctgcccctggccatgcagacagaaagaggaaatggcctgcaggccgtgcagcagcacatcaagaagaaccagggcctgcggcgggagatccaggcccacggcccccggctggaggaggtgctggagagagctggggccctggccagcctgcggagccctgaggccgaggccgtgcggcggggcctggagcagctgcagagcgcctgggccggcctgcgggaggccgctgagcggcggcagcaggtgctggatgctgccttccaggtggagcagtactactttgatgtggccgaggtggaggcctggctgggggagcaggagctgctgatgatgtctgaggacaagggcaaggatgagcagagcaccctgcagctgctgaagaagcacctgcagctggagcagggcgtggagaactatgaggagagcatcgcccagctgagccggcagtgccgggccctgctggagatgggccacccagacagcgagcagatcagccggcggcagagccaggtggaccggctgtatgtggccctgaaggagctgggggaggagcggcgggtggccctggagcagcagtactggctgtaccagctgagccggcaggtgtctgagctggagcactggattgctgagaaggaggtggtggccggcagccctgagctgggccaggactttgagcacgtgtctgtgctgcaggagaagttcagcgagtttgccagcgagaccggcatggccggccgggagcggctggccgctgtgaaccagatggtggatgagctgattgaatgtggccacacagctgctgccaccatggccgagtggaaggatggcctgaatgaggcctgggccgagctgctggagctgatgggcacccgggcccagctgctggccgccagccgggagctgcacaagttcttcagtgatgcccgggagctgcagggccagatcgaggagaagagaagaaggctgccccggctgaccaccccacctgagccccggcccagcgccagctccatgcagaggaccctgcgggcctttgaacatgacctgcagctgctggtgtcccaggtgcggcagctgcaggagggcgccgcccagctgaggacagtgtatgctggggagcacgccgaggccatcgccagccgggagcaggaggtgctgcagggctggaaggagctgctgagcgcctgtgaagatgcccggctgcacgtgagcagcacagcagatgccctgcgcttccacagccaggtgcgggacctgctgtcctggatggatggcatcgccagccagatcggggctgctgacaagcccagagatgtgtcctctgtggaggtgctgatgaactaccaccagggcctgaagacagagctggaggcccgggtgcctgagctgaccacctgccaggagctgggccgcagcctgctgctgaacaagagcgccatggctgatgagatccaggcccagctggacaagctgggcaccaggaaggaggaggtgtctgagaagtgggacagacactgggagtggctgcagcagatgctggaggtgcaccagtttgcccaggaggccgtggtggctgatgcctggctgacagcccaggagcccctgctgcagagccgggagctgggcagctctgtggatgaggtggagcagctgatcagaagacatgaggccttcaggaaggctgctgctgcctgggaggagcgcttcagcagcctgcggcggctgaccaccatcgagaagatcaaggccgagcagagcaagcagccccccacccccctgctgggcaggaagttctttggagaccccacagagctggccgccaaggccgcccccctgctgcggcctgggggctatgaaagaggcctggagcccctggcccggcgggccagtgacaccctgtctgctgaggtgaggaccagggtgggctacgtgcggcaggagctgaagccagagcggctgcagcccagaattgaccggctgcctgagatccctggccgggtggagcctgctgccctgcctgctgccccagaagatgctgctgagaccccagccaccccagctgctgctgagcaggtgcggcccaggcctgagcggcaggagagcgctgacagagctgaggagctgcccaggagaagaagacctgagcggcaggagagcgtggaccagagcgaggaggccgccaggagaagaagacctgagcggcaggagagcgctgagcacgaggccgcccacagcctgaccctgggccgctatgagcagatggagaggagaagagagcggcgggagcggcggctggagcggcaggagagcagcgagcaggagatgcccatccggggggacctggtgaagggcaaggccaccctggccgacatcgtggagcagctgcaggagaaggaggccggccctggcctgcctgctggccccagcctgccccagccccgggagctgcccccaggccgcctgcccaacggcctggagctgcctgagaggacccccaggccagaccggccccgggcccgggaccggcccaagcccaggagaagaccccggccccgggagggcggggagggcggcggcagcagaagaagccgcagcgccccagcccagggcggcagcgccccagcccctcctcctccacccacccacacagtgcagcacgagggcttcctgctgaggaagcgggagctggatgccaacaggaagagcagcaacagatcctgggtgtccctgtactgtgtgctgagcaagggggagctgggcttctacaaggacagcaagggccctgccagcggcagcacccacggcggggagcccctgctgagcctgcacaaggccaccagcgaggtggccagtgactacaagaagaagaagcacgtgttcaagctgcagacccaggacggcagcgagttcctgctgcaggccaaggatgaggaggagatgaatggctggctggaggccgtggccagctctgtggccgagcacgccgagatcgcccgctggggccagaccctgcccaccaccagcagcacagatgagggcaaccccaagcgggagggcggggaccggcgggccagcggccgcaggaagtag

SEQ ID NO: 171314 - DNA, 7695 bp, synthetic construct
  misc_feature 1..7695: note = Description of Artificial Sequence: Synthetic coding sequence
  source 1..7695: mol_type = other DNA
atggcccaggtgcctggagaggtggacaacatggagggcctgcctgcccccaacaacaacccagctgcccgctgggagagcccagaccggggctgggagcgggagcagcctgctgccagcacagctgctgccagcctgtttgagtgcagccgcatcaaggccctggctgatgagcgggaggccgtgcagaagaagaccttcaccaagtgggtgaacagccacctggcccgggtgggctgccacatcggggacctgtatgtggacctgagagatggctttgtgctgacccggctgctggaggtgctgtctggagagcagctgccccggcccacccggggccgcatgaggatccacagcctggagaatgtggacaaggccctgcagttcctgaaggagcagagggtgcacctggagaatgtgggcagccatgacatcgtggatggcaaccaccggctgaccctgggcctggtgtggaccatcatcctgcgcttccagatccaggtgatcaagattgaaacagaggacaaccgggagaccaggtctgccaaggatgccctgctgctgtggtgccagatgaagacagctggctacccagaggtgaacatccagaacttcaccacctcctggagagatggcctggccttcaatgccctgatccaccgccacaggccagacctggtggacttcagcaagctgaccaagagcaatgccaactacaacctgcagagggccttcagaacagctgagcagcacctgggcctggcccggctgctggaccctgaagatgtgaacatggaggccccagatgagaagagcatcatcacctacgtggtgtccttctaccactacttcagcaagatgaaggccctggccgtggagggcaagagaattggcaaggtgctggaccaggtgctggaggtgggcaagatcatcgagagatatgaggagctggccgctgagctgctggcctggatccacaggacagtgggcctcatcagcaaccagaagtttgccaacagcctgagcggcgtgcagcagcagctgcaggccttcaccgcctactgcaccctggagaagcctgtgaagttccaggagaagggcaacctggaggtgctgctcttcagcatccagagcaagctgcgggcctgcaacagaagactctttgtgccccgggagggctgcggcatctgggacatcgacaaggcctggggcgagctggagaaggccgagcacgagcgggaggccgccctgcgggcagagctgatccggcaggagaagctggagctgctggcccagagatttgaccacaaggtggccatgagggagagctggctgaatgaaaaccagaggctggtgtcccaggacaactttggctatgagctgcctgctgtggaggccgccatgaagaagcatgaggccatcgaggccgacattgctgcctatgaggagcgggtgcagggcgtggccgagctggcccaggccctggccgctgagggctactatgacatccggcgggtggccgcccagagggacagcgtgctgcggcagtgggccctgctgaccggcctggtgggcgcccggaggacccggctggagcagaacctggccctgcagaaggtgttccaggagatggtgtacatggtggactggatggaggagatgcaggcccagctgctgagccgggagtgtggccagcacctggtggaggctgatgacctgctgcagaagcacggcctgctggagggggacattgctgcccagagcgagcgggtggaggccctgaatgctgctgccctgcgcttcagccagctgcagggctaccagccctgtgacccccaggtgatctgcaacagagtgaaccacgtgcacggctgcctggccgagctgcaggagcaggccgcccggcggcgggcagagctggaggccagccgcagcctgtgggccctgctgcaggagctggaggaggccgagagctgggcccgggacaaggagcggctgctggaggccgccggcggcggcggggccgccggggctgctggagctgctggaacagctggaggagcccatgacctgagcagcacagcccggctgctggcccagcacaagatcctgcagggcgagctgggcggcagaagagccctgctgcagcaggccctgcgctgtggggaggagctggtggccgccggcggcgctgtgggccctggagctgacacagtgcacctggtgggcctggccgagcgggccgccagcgcccggcggcgctggcagaggctggaggaggccgccgcccggcgggagcggcggctgcaggaggcccgggccctgcaccagtttggagctgacctggatggcctgctggactggctgagagatgcctaccgcctggccgccgccggggactttggacatgatgaggccagcagccggcggctggcccggcagcaccgggccctgactggagaggtggaggcccaccggggccctgtgtctggcctgcggcggcagctggccaccctgggcggggccagcggggccggccccctggtggtggccctgcaggtgcgggtggtggaggccgagcagctgtttgctgaggtgacagaggtggccgccctgcggcggcagtggctgagagatgccctggccgtgtacaggatgtttggagaggtgcacgcctgtgagctgtggattggagagaaggagcagtggctgctgtccatgagggtgcctgacagcctggatgatgtggaggtggtgcagcacagatttgagagcctggaccaggagatgaacagcctgatgggccgggtgctggatgtgaaccacacagtgcaggagctggtggagggcggccaccccagcagtgatgaggtgcgcagctgccaggaccacctgaacagccgctggaaccgcatcgtggagctggtggagcagaggaaggaggagatgtctgctgtgctgctggtggagaaccacgtgctggaggtggccgaggtgcgggcccaggtgcgggagaagagaagagctgtggagagcgccccccgggccggcggggccctgcagtggaggctgagcggcctggaggccgccctgcaggccctggagccccggcaggccgccctgctggaggaggccgccctgctggccgagcgcttccctgcccaggccgcccggctgcaccagggcgctgaggagctgggcgctgagtggggcgccctggccagcgctgcccaggcctgtggggaggccgtggccgctgctggccgcctgcagcgcttcctgcatgacctggatgccttcctggactggctggtgcgggcccaggaggccgccggcggcagcgagggccccctgcccaacagcctggaggaggctgatgccctgctggcccggcatgctgccctgaaggaggaggtggaccagcgggaggaggactatgccagaattgtggccgccagcgaggccctgctggccgcagatggagctgagctgggccctggcctggccctggatgagtggctgccccacctggagctgggctggcacaagctgctgggcctgtgggaggcccggcgggaggccctggtgcaggcccacatctaccagctgttcctgcgggacctgcggcaggccctggtggtgctgaggaaccaggagatggccctgtctggagctgagctgcccggcaccgtggagagcgtggaggaggccctgaagcagcaccgggacttcctgaccaccatggagctgagccagcagaagatgcaggtggccgtgcaggccgctgagggcctgctgcggcagggcaacatctacggggagcaggcccaggaggccgtgacccggctgctggagaagaaccaggagaaccagctgcgggcccagcagtggatgcagaagctgcatgaccagctggagctgcagcacttcctgcgggactgccacgagctggatggctggatccacgagaagatgctgatggccagagatggcacccgggaggacaaccacaagctgcacaagcgctggctgcggcaccaggccttcatggccgagctggcccagaacaaggagtggctggagaagattgagcgggagggccagcagctgatgcaggagaagccagagctggccgcctctgtgaggaagaagctgggggagatccggcagtgctgggccgagctggagagcaccacccaggccaaggcccggcagctgtttgaggccagcaaggctgaccagctggtgcagagctttgctgagctggacaagaagctgctgcacatggagagccagctgcaggatgtggaccccggcggggacctggccaccgtgaacagccagctgaagaagctgcagagcatggagagccaggtggaggagtggtaccgggaggtgggggagctgcaggcccagacagctgccctgcccctggagcccgccagcaaggagctggtgggggagcggcagaatgctgtgggggagcggctggtgcggctgctggagcccctgcaggagcggcggcggctgctgctggccagcaaggagctgcaccaggtggcccatgactggaccacctcctgggcctgggtgcaggagcggctgcccctggccatgcagacagaaagaggaaatggcctgcaggccgtgcagcagcacatcaagaagaaccagggcctgcggcgggagatccaggcccacggcccccggctggaggaggtgctggagcgggccggggccctggccagcctgcggagccctgaggccgaggccgtgagaagaggcctggagcagctgcagagcgcctgggccggcctgcgggaggccgctgagcggcggcagcaggtgctggatgctgccttccaggtggagcagtactactttgatgtggccgaggtggaggcctggctgggggagcaggagctgctgatgatgtctgaagataaaggcaaggatgagcagagcaccctgcagctgctgaagaagcacctgcagctggagcagggcgtggagaactatgaggagagcatcgcccagctgagccggcagtgccgggccctgctggagatgggccacccagattctgagcagatcagccggcggcagagccaggtggaccggctgtatgtggccctgaaggagctgggggaggagaggagagtggccctggagcagcagtactggctgtaccagctgagccggcaggtgtctgagctggagcactggattgctgagaaggaggtggtggccggcagccctgagctgggccaggactttgaacatgtgtctgtgctgcaggagaagttcagcgagtttgccagcgagaccggcatggccggccgggagcggctggccgctgtgaaccagatggtggatgagctgattgaatgtggccacacagctgctgccaccatggccgagtggaaggatggcctgaatgaggcctgggccgagctgctggagctgatgggcacccgggcccagctgctggccgccagccgggagctgcacaagttcttcagtgatgcccgggagctgcagggccagatcgaggagaagagaagaaggctgccccggctgaccaccccacctgagccccggcccagcgccagctccatgcagaggaccctgcgggcctttgaacatgacctgcagctgctggtgtcccaggtgcggcagctgcaggagggcgccgcccagctgaggacagtgtatgctggggagcacgccgaggccatcgccagccgggagcaggaggtgctgcagggctggaaggagctgctgagcgcctgtgaagatgcccggctgcacgtgagcagcacagcagatgccctgcgcttccacagccaggtgcgggacctgctgtcctggatggatggcatcgccagccagattggagctgctgacaagcccagagatgtgtcctctgtggaggtgctgatgaactaccaccagggcctgaagacagagctggaggcccgggtgcctgagctgaccacctgccaggagctgggccgcagcctgctgctgaacaagagcgccatggctgatgagatccaggcccagctggacaagctgggcaccaggaaggaggaggtgtctgagaagtgggacagacactgggagtggctgcagcagatgctggaggtgcaccagtttgcccaggaggccgtggtggctgatgcctggctgacagcccaggagcccctgctgcagagccgggagctgggcagctctgtggatgaggtggagcagctgatcagaagacatgaggccttcaggaaggctgctgctgcctgggaggagcgcttcagcagcctgcggcggctgaccaccatcgagaagatcaaggccgagcagagcaagcagccccccacccccctgctgggcaggaagttcttcggggaccccacagagctggccgccaaggccgcccccctgctgcggcctgggggctatgagcggggcctggagcccctggcccggcgggccagtgacaccctgtctgctgaggtgaggaccagggtgggctacgtgcggcaggagctgaagccagagcggctgcagcccagaattgaccggctgcctgagatccctggccgggtggagcctgctgccctgcctgctgccccagaagatgctgctgagaccccagccaccccagctgctgctgagcaggtgcggcccaggcctgagcggcaggagagcgctgacagagctgaggagctgcccaggagaagaagacctgagcggcaggagagcgtggaccagagcgaggaggccgccaggagaagaagacctgagcggcaggagagcgctgagcatgaagctgcccacagcctgaccctgggccgctatgagcagatggagcggcggcgggagcggcgggagcggcggctggagcggcaggagagcagcgagcaggagatgcccatccggggggacctggtgaagggcaaggccaccctggccgacatcgtggagcagctgcaggagaaggaggccggccctggcctgcctgctggccccagcctgccccagccccgggagctgcccccaggccgcctgcccaacggcctggagctgcctgagaggacccccaggccagaccggccccgggcccgggaccggcccaagccccggcggcggccccggccccgggagggcggggagggcggcggcagccgccgcagccgcagcgccccagcccagggcggcagcgccccagcccctcctcctccacccacccacacagtgcagcacgagggcttcctgctgaggaagcgggagctggatgccaacaggaagagcagcaacagatcctgggtgtccctgtactgtgtgctgagcaaaggagagctgggcttctacaaggacagcaaaggacctgccagcggcagcacccatggaggagagcccctgctgagcctgcacaaggccaccagcgaggtggccagtgactacaagaagaagaagcacgtgttcaagctgcagacccaggacggcagcgagttcctgctgcaggccaaggatgaggaggagatgaatggctggctggaggccgtggccagctctgtggccgagcacgccgagatcgcccgctggggccagaccctgcccaccaccagcagcacagatgagggcaaccccaagcgggagggcggggacagaagagccagcggccgcaggaagtag

SEQ ID NO: 171315 - DNA, 11025 bp, synthetic construct
  misc_feature 1..11025: note = Description of Artificial Sequence: Synthetic coding sequence
  source 1..11025: mol_type = other DNA
atggccggccagccccacagcccccgggagctgctgggcgctgctggccacaggagccggcggcccagcacagagctgcgggtgccccccagccccagcctgaccatggacagccagtatgagaccggccacatcaggaagctgcaggcccggcacatgcagatgcaggagaagaccttcaccaagtggatcaacaacgtgttccagtgtggccaggccggcatcaagatccggaacctgtacacagagctggctgatggcatccacctgctgcggctgctggagctgatcagcggggaggccctgcccccacccagccggggccgcctgcgggtgcacttcctggagaacagcagccgggccctggccttcctgcgggccaaggtgcctgtgcccctcatcggcccagaaaatattgtggatggagaccagaccctcatcctgggcctcatctgggtgatcatcctgcgcttccagatcagccacatcagcctggacaaggaggagtttggagccagcgctgccctgctgagcaccaaggaggccctgctggtgtggtgccagaggaagacagccagctacaccaacgtgaacatcacagacttcagccgctcctggagcgatggcctgggcttcaatgccctgattcatgcccacaggccagacctgctggactatggcagcctgcggccagaccggcccctgcacaacctggcctttgccttcctggtggccgagcaggagctgggcatcgcccagctgctggaccctgaagatgtggccgccgcccagccagatgagaggagcatcatgacctacgtgtccctgtactaccactactgcagccggctgcaccagggccagacagtgcagaggcggctgaccaagatcctgctgcagctgcaggagacagagctgctgcagacccagtatgagcagctggtggccgacctgctgcgctggattgctgagaagcagatgcagctggaggcccgggacttcccagacagcctgcctgccatgaggcagctgctggccgccttcaccatcttccgcacccaggagaagccaccccggctgcagcagagaggagctgctgaggccctgctcttccggctgcagacagccctgcaggcccagaacagaagacccttcctgccccatgagggcctgggcctggccgagctgagccagtgctgggccggcctggagtgggccgaggccgcccggagccaggccctgcagcagaggctgctgcagctgcagaggctggagaccctggcccggcgcttccagcacaaggccgccctgcgggagagcttcctgaaggatgctgagcaggtgctggaccaggcccgggcccccccagccagcctggccaccgtggaggccgctgtgcagaggctgggcatgctggaggccggcatcctgccccaggagggccgcttccaggccctggccgagattgctgacatcctgcggcaggagcagtaccacagctgggcagatgtggcccggcggcaggaggaggtgacagtgcgctggcagaggctgctgcagcacctgcagggccagaggaagcaggtggccgacatgcaggccgtgctgagcctgctgcaggaggtggaggccgccagccaccagctggaggagctgcaggagcccgcccggagcacagcctgtggccagcagctggccgaggtggtggagctgctgcagagacatgacctgctggaggcccaggtgtctgcccatggagcccacgtgagccacctggcccagcagacagctgagctggacagcagcctgggcacctctgtggaggtgctgcaggccaaggcccggaccctggcccagctgcagcagagcctggtggccctggtgcgggcccggcgggccctgctggagcagaccctgcagagagctgagttcctgaggaactgtgaggaggaggaggcctggctgaaggaatgtggccagagggtgggcaatgctgccctgggccgggacctgagccagattgctggggccctgcagaagcacaaggccctggaggccgaggtgcaccgccaccaggccgtgtgtgtggacctggtgcggcggggccgggacctgagcgcccggcggccccccacccagcctgaccccggggagcgggcagaggccgtgcagggcggctggcagctgctgcagaccagggtggtgggccgcggggcccggctgcagacagccctgctggtgctgcagtactttgctgatgctgctgaggccgcctcctggctgcgggagcggcgcagcagcctggagcgggccagctgtggccaggaccaggccgctgctgagaccctgctgcggagacatgtgcggctggagcgggtgctgcgggcctttgctgctgagctgcggcggctggaggagcagggccgggccgccagcgcccgggccagcctcttcaccgtgaacagcgccctgagccccccaggagagagcctgaggaaccctggcccctggagcgaggccagctgccaccctggccctggagatgcctggaagatggccctgcctgctgagccagaccctgactttgaccccaacaccatcctgcagacccaggaccacctgagccaggactatgagagcctgcgggccctggcccagctgcggcgggcccggctggaggaggccatggccctgtttggcttctgcagcagctgtggggagctgcagctgtggctggagaagcagacagtgctgctgcagagggtgcagccccaggccgacaccctggaggtgatgcagctgaagtatgagaacttcctgacagccctggccgtgggcaagggcctgtgggccgaggtgagcagcagcgctgagcagctgcggcagcgctacccaggcaacagcacccagatccagaggcagcaggaggagctgagccagcgctggggccagctggaggccctgaagcgggagaaggctgtgcagctggcccacagcgtggaggtgtgcagcttcctgcaggagtgtggccccacccaggtgcagctgagagatgtgctgctgcagctggaggccctgcagcccggcagcagcgaggacacctgccacgccctgcagctggcccagaagaagaccctggtgctggagcggcgggtgcacttcctgcagagcgtggtggtgaaggtggaggagcccggctacgccgagagccagcccctgcagggccaggtggagaccctgcagggcctgctgaagcaggtgcaggagcaggtggcccagagggcccggcggcaggccgagacccaggcccggcagagcttcctgcaggagagccagcagctgctgctgtgggccgagagcgtgcaggcccagctgcggagcaaggaggtgtctgtggatgtggccagcgcccagaggctgctgcgggagcaccaggacctgctggaggagatccacctgtggcaggagcggctgcagcagctggatgcccagagccagcccatggccgccctggactgcccagacagccaggaggtgcccaacaccctgcgggtgctgggccagcagggccaggagctgaaggtgctgtgggagcagaggcagcagtggctgcaggagggcctggagctgcagaagtttggccgggaggtggatggcttcaccgccacctgtgccaaccaccaggcctggctgcacctggacaacctgggggaggatgtgcgggaggccctgagcctgctgcagcagcaccgggagtttggccgcctgctgagcaccctgggccccagggctgaggccctgcgggcccacggggagaagctggtgcagagccagcaccctgctgcccacacagtgcgggagcagctgcagagcatccaggcccagtggacccggctgcagggccgctctgagcagaggcggcggcagctgctggccagcctgcagctgcaggagtggaagcaggatgtggccgagctgatgcagtggatggaggagaagggcctgatggccgcccacgagcccagcggggcccggaggaacatcctgcagaccctgaagagacatgaagctgctgagagcgagctgctggccacccggcggcacgtggaggccctgcagcaggtgggccgggagctgctgagccggcggccctgtggccaggaggacatccagacccggctgcagggcctgcggagcaagtgggaggccctgaacaggaagatgacagaaagaggagatgagctgcagcaggccggccagcaggagcagctgctgcggcagctgcaggatgccaaggagcagctggagcagctggagggcgccctgcagagcagcgagaccggccaggacctgcggagcagccagaggctgcagaagaggcaccagcagctggagagcgagagcaggaccctggccgccaagatggccgccctggcctccatggcccacggcatggccgccagccctgccatcctggaggagacccagaagcacctgcggcggctggagctgctgcagggccacctggccatccggggcctgcagctgcaggcctctgtggagctgcaccagttctgccacctgagcaacatggagctgtcctgggtggccgagcacatgccccacggcagccccaccagctacacagagtgcctgaatggagcccagagcctgcacaggaagcacaaggagctgcaggtggaggtgaaggcccaccagggccaggtgcagagggtgctgagcagcggccgcagcctggccgccagcggccacccccaggcccagcacatcgtggagcagtgccaggagctggagggccactgggccgagctggagcgggcctgtgaggcccgggcccagtgcctgcagcaggccgtgaccttccagcagtacttcctggatgtgtctgagctggagggctgggtggaggagaagaggcccctggtgagcagccgggactatggaagagatgaagctgccaccctgcggctcatcaacaagcaccaggccctgcaggaggagctggccatctactggagctccatggaggagctggaccagacagcccagaccctgactggacctgaggtgcctgagcagcagagggtggtgcaggagcggctgcgggagcagctgcgggccctgcaggagctggccgccacccgggaccgggagctggagggcaccctgcggctgcacgagttcctgcgggaggccgaggacctgcagggctggctggccagccagaagcaggccgccaagggcggggagagcctgggagaagatcctgagcacgccctgcacctgtgcaccaagtttgccaagttccagcaccaggtggagatgggcagccagagggtggccgcctgccgcctgctggccgagagcctgctggagcggggccacagcgctggccccatggtgcggcagaggcagcaggacctgcagacagcctggagcgagctgtgggagctgacccaggcccggggccacgccctgcgggacacagagaccaccctgcgggtgcaccgggacctgctggaggtgctgacccaggtgcaggagaaggccaccagcctgcccaacaacgtggcccgggacctgtgtggcctggaggcccagctgcggagccaccagggcctggagcgggagctggtgggcacagagcggcagctgcaggagctgctggagacagctggccgggtgcagaagctgtgccccggcccccaggcccatgctgtgcagcagaggcagcaggccgtgacccaggcctgggccgtgctgcagaggaggatggagcagaggcgggcccagctggagcgggcccggctgctggcccgcttcagaacagctgtgcgggactatgcctcctgggccgcccgggtgcggcaggacctgcaggtggaggagagcagccaggagcccagcagcggccccctgaagctgagcgcccaccagtggctgcgggcagagctggaggcccgggagaagctgtggcagcaggccacccagctgggccagcaggccctgctggccgccggcacccccaccaaggaggtgcaggaggagctgcgggccctgcaggaccagagggaccaggtgtaccagacctgggccaggaagcaggagcggctgcaggccgagcagcaggagcagctgttcctgagagaatgtggccgcctggaggagatcctggccgcccaggaggtgtccctgaagaccagcgccctgggcagctctgtggaggaggtggagcagctgatcaggaagcatgaggtgttcctgaaggtgctgacagcccaggacaagaaggaggccgccctgcgggagcggctgaagaccctgcggcggccccgggtgcgggaccggctgcccatcctgctgcagaggaggatgagggtgaaggagctggccgagagccggggccacgccctgcacgccagcctgctgatggccagcttcacccaggccgccacccaggccgaggactggatccaggcctgggcccagcagctgaaggagcctgtgcccccaggggacctgcgggacaagctgaagcccctgctgaagcaccaggcctttgaggccgaggtgcaggcccacgaggaggtgatgacctctgtggccaagaagggggaggccctgctggcccagagccaccccagggctggggaggtgtcccagaggctgcagggcctgaggaagcactgggaggacctgcggcaggccatggccctgcggggccaggagctggaggacagaagaaacttcctggagttcctgcagagggtggacctggccgaggcctggatccaggagaaggaggtgaagatgaatgtgggggacctgggccaggacctggagcactgcctgcagctgcggcggcggctgcgggagttccggggcaacagcgctggggacacagtgggagatgcctgcatccgcagcatcagtgacctgagcctgcagctgaagaacagagatcctgaggaggtgaagatcatctgccagaggaggagccagctgaacaaccgctgggccagcttccacggcaacctgctgcgctaccagcagcagctggagggcgccctggagatccacgtgctgagccgggagctggacaacgtgaccaagaggatccaggagaaggaggccctgatccaggccctggactgtgggaaggacctggagagcgtgcagaggctgctgaggaagcatgaggagctggagcgggaggtgcaccccatccaggcccaggtggagagcctggagcgggaggtgggccgcctgtgccagaggagccctgaggccgcccacggcctgcggcaccggcagcaggaggtggccgagagctggtggcagctgcggagccgggcccagaagaggcgggaggccctggatgccctgcaccaggcccagaagctgcaggccatgctgcaggagctgctggtgtctgcccagaggctgcgggcccagatggacaccagccctgcccccaggagccctgtggaggcccggaggatgctggaggagcaccaggagtgcaaggccgagctggacagctggacagacagcatcagcctggcccggagcacaggccagcagctgctgacagctggccaccccttcagcagtgacatccggcaggtgctggccggcctggagcaggagctgagcagcctggagggcgcctggcaggagcaccagctgcagctgcagcaggccctggagctgcagctgttcctgagctctgtggagaagatggagcgctggctgtgcagcaaggaggacagcctggccagcgagggcctgtgggaccccctggcccccatggagcccctgctgtggaagcacaagatgctggagtgggacctggaggtgcaggccggcaagatcagcgccctggaggccacagcccggggcctgcaccagggcggccaccctgaggcccagagcgccctgggccgctgccaggccatgctgctgaggaaggaggccctcttccggcaggccggcacccggcggcaccggctggaggagctgcggcagctgcaggccttcctgcaggacagccaggaggtggccgcctggctgcgggagaagaacctggtggccctggaggagggcctgctggacacagccatgctgcctgcccagctgcagaagcagcagaacttccaggccgagctggatgcctccatgcaccagcagcaggagctgcagcgggagggccagaggctgctgcagggcggccacccagccagcgaggccatccaggagcggctggaggagctgggcgccctgtggggcgagctgcaggacaacagccagaagaaggtggccaagctgcagaaggcctgtgaggccctgcggctgcggcgctccatggaggagctggagaactggctggagcccatcgaggtggagctgcgggcccccaccgtgggccaggccctgcccggggtgggggagctgctgggcacccagcgggagctggaggccgctgtggacaagaaggcccggcaggccgaggccctgctgggccaggcccaggcctttgtgcgggagggccactgcctggcccaggatgtggaggagcaggcccggcggctgctgcagcgcttcaagagcctgcgggagcccctgcaggagaggagaacagccctggaggcccggagcctgctgctgaagttcttcagagatgctgatgaggagatggcctgggtgcaggagaagctgcccctggccgccgcccaggactatggccagagcctgtctgctgtgcgccacctgcaggagcagcaccagaacctggagagcgagatgagcagccatgaggccctgaccagggtggtgctgggcaccggctacaagctggtgcaggccggccactttgctgcccacgaggtggccgcccgggtgcagcagctggagaaggccatggcccacctgcgggcagaggccgcccggcggcggctgctgctgcagcaggcccaggaggcccagcagttcctgacagagctgctggaggccggctcctggctggccgagcggggccacgtgctggacagcgaggacatgggccacagcgctgaggccacccaggccctgctgcggcggctggaggccaccaagagggacctggaggccttcagccccagaattgagcggctgcagcagacagctgccctgctggagagcaggaagaaccctgagagccccaaggtgctggcccagctgcaggccgtgcgggaggcccacgccgagctgctgcggcgggcagaggcccggggccacggcctgcaggagcagctgcagctgcaccagctggagcgggagaccctgctgctggatgcctggctgaccaccaaggccgccacagctgagagccaggactatggccaggacctggagggcgtgaaggtgctggaggagaagtttgatgccttcaggaaggaggtgcagagcctgggccaggccaaggtgtatgccctgaggaagctggccggcaccctggagcggggggccccccggcgctacccccacatccaggcccagaggagccgcatcgaggccgcctgggagcggctggaccaggccatcaaggccaggacagagaacctggccgccgcccacgaggtgcacagcttccagcaggccgctgctgagctgcagggccgcatgcaggagaagacagccctgatgaagggggaggatggcggccacagcctgagctctgtgaggaccctgcagcagcagcaccggcggctggagcgggagctggaggccatggagaaggaggtggcccggctgcagacagaggcctgccgcctgggccagctgcaccctgctgcccctgggggcctggccaaggtgcaggaggcctgggccaccctgcaggccaaggcccaggagcggggccagtggctggcccaggccgcccagggccacgccttcctgggccgctgccaggagctgctggcctgggcccaggagcggcaggagctggccagcagcgaggagctggccgaggatgtggccggggctgagcagctgctgggccagcacgaggagctgggccaggagatcagagaatgtcggctgcaggcccaggacctgcggcaggagggccagcagctggtggacaacagccacttcatgtctgctgaggtgacagaatgtctgcaggagctggagggccgcctgcaggagctggaggaggcctgggccctgcgctggcagagatgtgccgagagctggggcctgcagaagctgcggcagaggctggagcaggccgaggcctggctggcctgctgggagggcctgctgctgaagccagactatggccacagcgtgtctgatgtggagctgctgctgcaccgccaccaggacctggagaagctgctggccgcccaggaggagaagtttgcccagatgcagaagacagagatggagcaggagctgctgctgcagccccaggagctgaagccaggccgggccggcagcagcctgaccagcttccagtggaggcccagcggccaccagggcctgggcgcccagctggccgagacccgggacccccaggatgccaagggcacccccaccatggagggcagcctggagttcaagcagcacctgctgcccggcggccggcagcccagcagcagctcctgggacagctgccggggcaacctgcagggcagcagcctgagcctcttcctggatgagaggatggctgctgagaaggtggccagcatcgccctgctggacctgaccggggcccgctgtgagcggctgcggggcagacatggcaggaagcacaccttcagcctgcggctgaccagcggggctgagatcctgtttgctgcccccagcgaggagcaggccgagagctggtggagggccctgggcagcacagctgcccagagcctgagccccaagctgaaggccaagcctgtgagcagcctgaatgaatgtaccaccaaggatgcccggcccggctgcctgctgcggagtgacccctag

SEQ ID NO: 171316 - DNA, 942 bp, synthetic construct
  misc_feature 1..942: note = Description of Artificial Sequence: Synthetic coding sequence
  source 1..942: mol_type = other DNA
atgaggcacaaccagatgtgctgtgagaccccacccaccgtgacagtgtatgtgaagagcggcagcaacagaagccaccagcccaagaagcccatcaccctgaagaggcccatctgcaaggacaactggcaggcctttgagaagaacacccacaacaacaacaagagcaagaggcccaagggcccctgcctggtgatccagaggcaggacatgacagccttcttcaagctgtttgatgatgacctgatccaggacttcctgtggatggactgctgctgcaagattgctgacaagtacctgctggccatgacctttgtgtacttcaagagggccaagttcaccatcagcgagcacacccgcatcaacttcttcatcgccctgtacctggccaacacagtggaggaggatgaggaggagaccaagtatgagatcttcccctgggccctgggcaagaactggaggaagctgttccccaacttcctgaagctgcgggaccagctgtgggacagaattgactaccgggccatcgtgtcccggcgctgctgtgaggaggtgatggccatcgcccccacccactacatctggcagcgggagaggtctgtgcaccacagcggggctgtgaggaactacaacagagatgaggtgcagctgccccggggccccagcgccacccctgtggactgcagcctgtgtgggaagaagagaagatatgtgcggctgggcctgagcagcagcagcagcctgagcagccacacagctggggtgacagagaagcacagccaggacagctacaacagcctgtccatggacatcatcggggaccccagccaggcctacacaggcagcgaggtggtgaatgaccaccagagcaacaagggcaagaagaccaacttcctgaagaaggacaagtccatggagtggttcaccggcagcgaggagtag

SEQ ID NO: 171317 - DNA, 942 bp, synthetic construct; identical to SEQ ID NO: 171316
  misc_feature 1..942: note = Description of Artificial Sequence: Synthetic coding sequence
  source 1..942: mol_type = other DNA

SEQ ID NO: 171318 - DNA, 384 bp, synthetic construct
  misc_feature 1..384: note = Description of Artificial Sequence: Synthetic coding sequence
  source 1..384: mol_type = other DNA
atgaggcacaaccagatgtgctgtgagaccccacccaccgtgacagtgtatgtgaagagcggcagcaacagaagccaccagcccaagaagcccatcaccctgaagaggcccatctgcaaggacaactggcaggcctttgagaagaacacccacaacaacaacaagagcaagaggcccaagggcccctgcctggtgatccagaggcaggacatgacagccttcttcaagctgtttgatgatgacctgatccaggacttcctgtggatggactgctgctgcaagattgctgacaagtacctgctggccatgacctttgtgtacttcaagagggccaagttcaccatcagcgagcacacccgcatcaacttcttcatcgccctgtag

SEQ ID NO: 171319 - DNA, 882 bp, synthetic construct
  misc_feature 1..882: note = Description of Artificial Sequence: Synthetic coding sequence
  source 1..882: mol_type = other DNA
atgctgtgggccatccctgagctgggcagcccctgccccatcagcatctcctatgagatgtctgacagccaggaccccaccaccagccctgtggtgaccacccaggtggagctgggcggctgcagccggcagggcggcggcaatggcttcctgcgcttccggcagcaccaggaggtgcaggccttcctgagcctgctggaggacagctttgtgcaggagttcctgagcaaggacccctgcttccagatcagtgacaagtacctgctggccatggtgctggtgtacttccagagggcccacctgaagctgtctgagtacacccacagcagcctcttcctggccctgtacctggccaatgacatggaggaggacctggagggccccaagtgtgagatcttcccctgggccctgggcaaggactggtgcctgcgggtgggcaagttcctgcaccagagggacaagctgtgggccaggatgggcttccgggctgtggtgtcccggcagtgctgtgaggaggtgatggccaaggagcccttccactgggcctggacccgggacagaagaccccaccacggcggcgtgcagagggtgtgcccccaggtgcctgtgcggctgccccggggccctggcctgagccccccccactgcagcccctgtggcctgccccagcactgcagcagccacctgctgaagcctgtgagcagcaagtgccccagcctgaccagcgagtgccacaggcctcccagccagaactacctgagccgggtgaagaatgcctggggcggggacttcctgattgtgctgcccccccagatgcagctggagcccggcacctacagcctgcgcatcttccccaagcccccagcccggcccggccactag

SEQ ID NO: 171320 - DNA, 1122 bp, synthetic construct
  misc_feature 1..1122: note = Description of Artificial Sequence: Synthetic coding sequence
  source 1..1122: mol_type = other DNA
atgaatgtggacaagttcctgattgtgtgctacctgaagaaggaggtgtggggctttgagagctacagcctgagcggcaccacctgcttccagtggaactactttgtgtggagcctgcgcttcttcttcagctgtggcagcagcaagtaccacctgacccccctgcccatcaagaaggtggactacccccacaagaggggccagaactggggcagctatgtgcacaacagcctgccccgcttcaactgggactaccgcagctgcttccacacctggaagagggccagtgacaaccgggagcgggcctatgagcacagcgcctacggccaccacgagcggggcactggaggctttgacaggaccaggcactatgaccaggactactacagagacccccgggagaggaccctgcagcacggcctgtactatgccagccgcagccgcagccccaacagatttgatgcccatgaccccaggtatgagccccgggcccgggagcagttcaccctgcccagcgtggtgcaccgggacatctacagagatgacatcacccgggaggtgcggggccggcggcctgagaggaactaccagcacagccgcagccgcagcccccacagcagccagagcaggaaccagagcccccagaggctggccagccaggccagccggcccaccaggagccccagcggcagcggcagccgcagccgcagcagcagcagtgacagcatcagcagcagcagcagcaccagcagtgacagcagtgacagcagcagcagcagcagtgatgacagccctgcccggtctgtgcagagcgctgctgtgcctgcccccaccagccagctgctgagcagcctggagaaggatgagcccaggaagagctttggcatcaaggtgcagaacctgcctgtgcgcagcacagacaccagcctgaaggatggcctcttccacgagttcaagaagtttgggaaggtgacctctgtgcagatccacggcaccagcgaggagagatatggcctggtgttcttccggcagcaggaggaccaggagaaggccctgacagccagcaagggcaagctgttcttcggcatgcagatcgaggtgacagcctggattggcccctag

SEQ ID NO: 171321 - DNA, 10995 bp, synthetic construct
  misc_feature 1..10995: note = Description of Artificial Sequence: Synthetic coding sequence
  source 1..10995: mol_type = other DNA
atggtgcgggagaccaggcacctgtgggtgggcaacctgcctgaaaatgtgcgggaggagaagatcatcgagcacttcaagagatatggccgggtggagagcgtgaagatcctgcccaagaggggcagcgagggcggcgtggccgcctttgtggactttgtggacatcaagagcgcccagaaggcccacaacagcgtgaacaagatgggagaccgggacctgaggacagactacaatgaacctggcaccatccccagcgctgcccggggcctggatgacacagtgtccatcgccagccgcagccgggaggtgtctggcttccggggcggcggcggcggccctgcctacggccccccacccagcctgcacgcccgggagggccgctatgaaagaaggctggatggagccagtgacaaccgggagcgggcctatgagcacagcgcctacggccaccacgagcggggcaccggcggctttgacaggaccaggcactatgaccaggactactacagagacccccgggagaggaccctgcagcacggcctgtactatgccagccgcagccgcagccccaacagatttgatgcccatgaccccaggtatgagccccgggcccgggagcagttcaccctgcccagcgtggtgcaccgggacatctacagagatgacatcacccgggaggtgcggggcagaagacctgagaggaactaccagcacagccgcagccgcagcccccacagcagccagagcaggaaccagagcccccagaggctggccagccaggccagccggcccaccaggagccccagcggcagcggcagccgcagccgcagcagcagcagtgacagcatcagcagcagcagcagcaccagcagtgacagcagtgacagcagcagcagcagcagtgatgacagccctgcccggtctgtgcagagcgctgctgtgcctgcccccaccagccagctgctgagcagcctggagaaggatgagcccaggaagagctttggcatcaaggtgcagaacctgcctgtgcgcagcacagacaccagcctgaaggatggcctcttccacgagttcaagaagtttgggaaggtgacctctgtgcagatccacggcaccagcgaggagagatatggcctggtgttcttccggcagcaggaggaccaggagaaggccctgacagccagcaagggcaagctgttcttcggcatgcagatcgaggtgacagcctggattggccctgagacagaaagtgaaaatgagttccggcccctggatgaaagaattgatgagttccaccccaaggccaccaggaccctcttcatcggcaacctggagaagaccaccacctaccatgacctgaggaacatcttccagagatttggagagatcgtggacatcgacatcaagaaggtgaatggagtgccccagtatgccttcctgcagtactgtgacatcgcctctgtgtgcaaggccatcaagaagatggatggagagtacctgggcaacaaccggctgaagctgggctttgggaagtccatgcccaccaactgtgtgtggctggatggcctgagcagcaatgtgtctgaccagtacctgaccaggcacttctgccgctatggccctgtggtgaaggtggtgtttgaccggctgaagggcatggccctggtgctgtacaatgaaattgaatatgcccaggccgctgtgaaggagaccaagggcaggaagattggaggcaacaagatcaaggtggactttgccaaccgggagagccagctggccttctaccactgcatggagaagagcggccaggacatccgggacttctatgagatgctggccgagcggcgggaggagcggcgggccagctatgactacaaccaggacaggacctactatgaatctgtgaggaccccaggcacctacccagaggacagcagaagagactacccagcccggggccgggagttctacagcgagtgggagacctaccagggcgactactatgagagccgctactatgatgacccccgggagtacagagactacagaaatgacccctatgagcaggacatccgggagtacagctaccggcagcgggagcgggagcgggagcgggagagatttgaaagtgaccgggaccgggaccatgaaagaagacccatcgagaggagccagagccctgtgcacctgcggcggccccagagccctggggccagccccagccaggccgagcggctgcccagcgacagcgagcggcggctgtacagccgcagcagtgacagaagtggcagctgcagcagcctgagccccccaagatatgagaagctggacaagagccggctggagcgctacaccaagaatgagaagacagacaaggagaggacctttgatcctgagcgggtggagcgggagcggcggctcatcaggaaggagaaggtggagaaggacaagacagacaagcagaagaggaagggcaaggtgcacagccccagcagccagagcagcgagacagaccaggagaatgaaagagagcagagccctgagaagcccaggagctgcaacaagctgagccgggagaaggctgacaaggagggcatcgccaagaaccggctggagctgatgccctgtgtggtgctgaccagggtgaaggagaaggagggcaaggtgattgaccacacccctgtggagaagctgaaggccaagctggacaatgacacagtgaagagcagcgccctggaccagaagctgcaggtgtcccagacagagcccgccaagagtgacctgagcaagctggagagcgtgaggatgaaggtgcccaaggagaagggcctgagcagccacgtggaggtggtggagaaggagggccgcctgaaggccaggaagcacctgaagccagagcagcctgcagatggagtgtctgctgtggacctggagaagctggaggccaggaagagaagatttgctgacagcaacctgaaggccgagaagcagaagccagaggtgaagaagagcagccctgagatggaggatgcccgggtgctgagcaagaagcagccagatgtgagcagccgggaggtgatcctgctgcgggagggggaggccgagaggaagcctgtgaggaaggagatcctgaagcgggagagcaagaagatcaagctggaccggctgaacacagtggccagccccaaggactgccaggagctggccagcatctctgtgggcagcggcagccggcccagcagtgacctgcaggcccggctgggggagctggccggggagagcgtggagaaccaggaggtgcagagcaagaagcccatccccagcaagccccagctgaagcagctgcaggtgctggatgaccagggccctgagagagaagatgtgaggaagaactactgcagcctgagagatgagaccccagagaggaagagcggccaggagaagagccacagcgtgaacacagaggagaagattggaattgatattgaccacacccagagctacaggaagcagatggagcagagcaggaggaagcagcagatggagatggagatcgccaagtctgagaagtttggcagccccaagaaggatgtggatgaatatgaaagaagaagcctggtgcatgaggtgggcaagccaccccaggatgtgacagatgacagcccccccagcaagaagaagaggatggaccacgtggactttgacatctgcaccaagcgggagaggaactaccgcagcagccggcagatcagtgaagattctgagaggactggaggcagccccagcgtgcgccacggcagcttccatgaagatgaggaccccatcggcagcccccggctgctgtctgtgaagggcagccccaaggtggatgagaaggtgctgccctacagcaacatcaccgtgcgggaggagagcctgaagttcaacccctatgacagcagccggcgggagcagatggctgacatggccaagatcaagctgtctgtgctgaacagtgaagatgagctgaaccgctgggacagccagatgaagcaggatgctggccgctttgatgtgtccttccccaacagcatcatcaagagggacagcctgaggaagaggtctgtgcgggacctggagcctggagaggtgcccagcgacagtgatgaagatggagagcacaagagccacagcccccgggccagcgccctgtatgagagcagccggctgtccttcctgctgcgggaccgggaggacaagctgcgggagagagatgagcggctgagcagcagcctggagaggaacaagttctacagctttgccctggacaagaccatcaccccagacaccaaggccctgctggagcgggccaagagcctgagcagcagccgggaggagaactggagcttcctggactgggacagcagatttgccaacttcaggaacaacaaggacaaggagaaggtggacagcgccccccggcccatccccagctggtacatgaagaagaagaagatcagaacagacagcgagggcaagatggatgacaagaaggaggaccacaaggaggaggagcaggagcggcaggagctgtttgccagccgcttcctgcacagcagcatctttgagcaggacagcaagaggctgcagcacctggagaggaaggaggaggacagcgacttcatcagcggccgcatctacggcaagcagaccagcgagggcgccaacagcaccacagacagcatccaggagcctgtggtgctcttccacagccgcttcatggagctgaccaggatgcagcagaaggagaaggagaaggaccagaagcccaaggaggtggagaagcaggaggacacagagaaccaccccaagaccccagagagcgcccctgagaacaaggacagcgagctgaagaccccacccagcgtgggccccccatctgtgacagtggtgaccctggagagcgcccccagcgccctggagaagaccaccggggacaagacagtggaggcccccctggtgacagaggagaagacagtggagcccgccaccgtgtctgaggaggccaagccagccagcgagcccgccccagcccctgtggagcagctggagcaggtggacctgcccccaggagctgaccctgacaaggaggccgccatgatgcctgctggggtggaggagggcagcagcggggaccagcccccctacctggatgccaagccacccacccctggggccagcttcagccaggccgagagcaatgtggaccctgagccagacagcacccagcccctgagcaagccagcccagaagtctgaggaggccaatgagcccaaggccgagaagccagatgccacagcagatgctgagccagatgccaaccagaaggccgaggccgcccctgagagccagcccccagccagcgaggacctggaggtggacccccctgtggccgccaaggacaagaagcccaacaagagcaagaggagcaagacccctgtgcaggccgctgctgtgtccatcgtggagaagcctgtgaccaggaagtcagaaagaattgaccgggagaagctgaagaggagcaacagccccagaggagaggcccagaagctgctggagctgaagatggaggccgagaagatcaccaggacagccagcaagaacagcgctgctgacctggagcaccctgagcccagcctgcccctgagcaggaccaggagaagaaatgtgcgctctgtgtatgccaccatgggagaccatgaaaatagaagccctgtgaaggagcctgtggagcagccccgggtgaccaggaagaggctggagcgggagctgcaggaggccgctgctgtgcccaccaccccaagaagaggccggccccccaagacccggcggcgggcagatgaggaggaggagaatgaggccaaggagcctgctgagaccctgaagcccccagagggctggaggagccccaggagccagaagacagctgctgggggcggcccccagggcaagaagggcaagaatgagcccaaggtggatgccaccaggcctgaggccaccacagaggtgggcccccagattggagtgaaggagagctccatggagcccaaggctgctgaggaggaggccggcagcgagcagaagagggacaggaaggatgctggaacagacaagaaccccccagagacagcccctgtggaggtggtggagaagaagccagcccctgagaagaacagcaagagcaagaggggccgcagcaggaacagccggctggccgtggacaagagcgccagcctgaagaatgtggatgctgctgtgagccccagaggagctgctgcccaggccggggagcgggagagcggcgtggtggccgtgtccccagagaagtctgagagcccccagaaggaggatggcctgagcagccagctgaagagtgaccctgtggaccctgacaaggagcctgagaaggaggatgtgtctgccagcggccccagccctgaggccacccagctggccaagcagatggagctggagcaggccgtggagcacatcgccaagctggccgaggccagcgccagcgctgcctacaaggcagatgcccctgagggcctggccccagaagatcgggacaagccagcccaccaggccagcgagacagagctggccgccgccatcggcagcatcatcaatgacatctctggagagcctgagaacttccctgcccccccaccctacccaggagagagccagacagacctgcagcccccagctggggcccaggccctgcagcccagcgaggagggcatggagacagatgaggccgtgtctggcatcctggagacagaagctgccacagagagcagccggccccctgtgaatgccccagaccccagcgctggccccacagacaccaaggaggcccggggcaacagcagcgagaccagccacagcgtgcctgaggccaagggcagcaaggaggtggaggtgaccctggtgaggaaggacaagggccggcagaagaccaccaggagcaggaggaagaggaacaccaacaagaaggtggtggcccctgtggagagccacgtgcctgagagcaaccaggcccagggcgagagccctgctgccaatgaaggcaccaccgtgcagcaccctgaggccccccaggaggagaagcagagcgagaagccccacagcaccccaccccagagctgcaccagtgacctgagcaagatccccagcacagagaacagcagccaggagatctctgtggaggagaggacccccaccaaggcctctgtgcccccagacctgcccccaccaccccagcctgcccctgtggatgaggagccccaggcccgcttccgggtgcacagcatcatcgagagtgaccctgtgaccccacccagcgaccccagcatccccatccccaccctgcccagcgtgacagctgccaagctgagcccccctgtggccagcggcggcatcccccaccagagcccccccaccaaggtgacagagtggatcacccggcaggaggagccccgggcccagagcacccccagccctgccctgcccccagacaccaaggccagtgatgtggacaccagcagcagcaccctgaggaagatcctgatggaccccaagtatgtgtctgccacctctgtgaccagcacctctgtgaccacagccatcgccgagcctgtgtctgctgccccctgcctgcacgaggcccctcctcctcctgtggacagcaagaagcccctggaggagaagacagcccctcctgtgaccaacaacagcgagatccaggccagcgaggtgctggtggccgctgacaaggagaaggtggcccctgtgattgcccccaagatcaccagcgtcatcagcaggatgcctgtgtccattgacctggagaacagccagaagatcaccctggccaagccagccccccagaccctgaccggcctggtgtctgccctgaccggcctggtgaatgtgtccctggtgcctgtgaatgccctgaagggccctgtgaagggctctgtgaccaccctgaagagcctggtgtccaccccagctggccctgtgaatgtgctgaagggccctgtgaatgtgctgactggacctgtgaatgtgctgaccacccctgtgaatgccaccgtgggcaccgtgaatgctgcccctggcaccgtgaatgctgctgccagcgctgtgaatgccacagccagcgctgtgacagtgacagctggagctgtgacagctgccagcggcggcgtgacagccaccactggaacagtgaccatggccggggctgtgattgcccccagcaccaagtgcaagcagagggccagcgccaatgaaaacagccgcttccaccctggctccatgcctgtgattgatgacaggcctgcagatgctggcagcggggccggcctgcgggtgaacaccagcgagggcgtggtgctgctgagctacagcggccagaagacagagggcccccagaggatcagcgccaagatcagccagatccccccagccagcgccatggacatcgagttccagcagagcgtgtccaagagccaggtgaagccagacagcgtgacagccagccagccccccagcaagggcccccaggccccagctggctacgccaacgtggccacccacagcaccctggtgctgacagcccagacctacaatgccagccctgtgatcagctctgtgaaggctgaccggcccagcctggagaagccagagcccatccacctgtctgtgtccacccctgtgacccagggcggcaccgtgaaggtgctgacccagggcatcaacaccccacctgtgctggtgcacaaccagctggtgctgacccccagcatcgtgaccaccaacaagaagctggccgaccctgtgaccctgaagattgagaccaaggtgctgcagcctgccaacctgggcagcaccctgaccccccaccaccccccagccctgcccagcaagctgcccacagaggtgaaccacgtgcccagcggccccagcatcccagctgacagaacagtgagccacctggccgccgccaagctggatgcccacagcccccggcccagcggccctggccccagcagcttcccccgggccagccaccccagcagcacagccagcacagccctgagcaccaatgccaccgtgatgctggccgccggcatccctgtgccccagttcatcagcagcatccaccctgagcagagcgtcatcatgccaccccacagcatcacccagacagtgtccctgagccacctgagccagggcgaggtgaggatgaacacccccaccctgcccagcatcacctacagcatccggcctgaggccctgcacagcccccgggcccccctgcagccccagcagatcgaggtgcgggccccccagagggccagcaccccccagcctgccccagctggggtgcctgccctggccagccagcaccccccagaggaggaggtgcactaccacctgcctgtggcccgggccacagcccctgtgcagagcgaggtgctggtgatgcagagcgagtaccgcctgcacccctacacagtgcccagagatgtgcgcatcatggtgcacccccacgtgacagctgtgtctgagcagcccagggctgctgatggagtggtgaaggtgcccccagccagcaaggccccccagcagcccgggaaggaggccgccaagaccccagatgccaaggccgcccccacccccaccccagcccctgtgcctgtgcctgtgcccctgcctgccccagccccagccccccacggggaggcccgcatcctgactgtgacccccagcaaccagctgcagggcctgcccctgaccccacctgtggtggtgacccatggagtgcagatcgtgcacagcagtggagagctgttccaggagtaccgctacggggacatccgcacctaccaccccccagcccagctgacccacacccagtttcctgctgccagctctgtgggcctgcccagcaggaccaagacagctgcccagggccccccacctgagggggagcccctgcagcccccccagcctgtgcagagcacccagcctgcccagcctgccccaccctgcccccccagccagctgggccagcccggccagccccccagcagcaagatgccccaggtgtcccaggaggccaagggcacccagacaggagtggagcagccccggctgcctgctggccctgccaaccggcccccagagccccacacccaggtgcagagggcccaggccgagaccggccccaccagcttccccagccctgtgtctgtgtccatgaagccagacctgcctgtgtccctgcccacccagacagcccccaagcagcccctgtttgtgcccaccaccagcggccccagcaccccacctggcctggtgctgccccacacagagttccagcctgcccccaagcaggacagcagcccccacctgaccagccagaggcctgtggacatggtgcagctgctgaagaagtaccccatcgtgtggcagggcctgctggccctgaagaatgacacagctgctgtgcagctgcactttgtgtctggcaacaacgtgctggcccacaggagcctgcccctgtctgagggcggcccccccctgagaattgcccagaggatgaggctggaggccacccagctggagggcgtggcccggaggatgacagtggagacagactactgcctgctgctggccctgccctgtggccgggaccaggaggatgtggtgtcccagacagagagcctgaaggccgccttcatcacctacctgcaggccaagcaggccgccggcatcatcaacgtgcccaaccctggcagcaaccagcctgcctacgtgctgcagatcttccccccctgtgagttcagcgagagccacctgagccggctggccccagacctgctggccagcatcagcaacatcagcccccacctgatgattgtgattgcctctgtgtag

SEQ ID NO: 171322 - DNA, 1122 bp, synthetic construct; identical to SEQ ID NO: 171320
  misc_feature 1..1122: note = Description of Artificial Sequence: Synthetic coding sequence
  source 1..1122: mol_type = other DNA

SEQ ID NO: 171323 - DNA, 894 bp, synthetic construct
  misc_feature 1..894: note = Description of Artificial Sequence: Synthetic coding sequence
  source 1..894: mol_type = other DNA
tgacaggccagccggcccaccaggagccccagcggcagcggcagccgcagccgcagcagcagcagtgacagcatcagcagcagcagcagcaccagcagtgacagcgacagcagcagcagcagcagtgatgacagccctgcccggtctgtgcagagcgctgctgtgcctgcccccaccagccagctgctgagcagcctggagaaggatgagcccaggaagagctttggcatcaaggtgcagaacctgcctgtgcgcagcacagacaccagcctgaaggatggcctcttccacgagttcaagaagtttgggaaggtgacctctgtgcagatccacggcaccagcgaggagagatatggcctggtgttcttccggcagcaggaggaccaggagaaggccctgacagccagcaagggcaagctgttcttcggcatgcagatcgaggtgacagcctggattggccctgagacagaaagtgaaaatgagttccggcccctggatgaaagaattgatgagttccaccccaaggccaccaggaccctcttcatcggcaacctggagaagaccaccacctaccatgacctgaggaacatcttccagagatttggagagatcgtggacatcgacatcaagaaggtgaatggagtgccccagtatgccttcctgcagtactgtgacatcgcctctgtgtgcaaggccatcaagaagatggatggagagtacctgggcaacaaccggctgaagctgggctttgggaagtccatgcccaccaactgtgtgtggctggatggcctgagcagcaatgtgtctgaccagtacctgaccaggcacttctgccgctatggccctgtggtgaaggtggtgtttgaccggctgaagggcatggccctggtgtag

SEQ ID NO: 171324 - DNA, 885 bp, synthetic construct
  misc_feature 1..885: note = Description of Artificial Sequence: Synthetic coding sequence
  source 1..885: mol_type = other DNA
atgagcccccggggcaccggctgcagcgctggcctgctgatgacagtgggctggctgctgctggccggcctgcagagcgcccggggcaccaacgtgacagctgctgtgcaggatgctggcctggcccatgaaggagagggggaggaggagacagagaacaatgacagcgagacagctgagaactatgcccctcctgagacagaagatgtgagcaacagaaatgtggtgaaggaggtggagtttggcatgtgcaccgtgacctgtggcatcggcgtgcgggaggtgatcctgaccaacggctgccctggaggagagagcaaatgtgtggtgcgggtggaggagtgccggggccccacagactgtggctggggcaagcccatcagcgagagcctggagagcgtgcggctggcctgcatccacaccagccccctgaaccgcttcaagtacatgtggaagctgctgcggcaggaccagcagagcatcatcctggtgaatgattctgccatcctggaggtgaggaaggagagccaccccctggcctttgaatgtgacaccctggacaacaatgaaattgtggccaccatcaagttcaccgtgtacaccagcagcgagctgcagatgaggaggagcagcctgcctgccacagatgctgccctgatctttgtgctgaccatcggggtcatcatctgtgtgttcatcatcttcctgctgatcttcatcatcatcaactgggccgctgtgaaggccttctggggcgccaaggccagcaccccagaggtgcagagcgagcagagctctgtgcgctacaaggacagcaccagcctggaccagctgcccacagagatgcctggagaagatgatgccctgtctgagtggaatgaatag

SEQ ID NO: 171325 - DNA, 648 bp, synthetic construct
  misc_feature 1..648: note = Description of Artificial Sequence: Synthetic coding sequence
  source 1..648: mol_type = other DNA
atggtgtctgccctgcggggggcccccctcatccgggtgcacagcagccctgtgagcagccccagcgtgtctggcccccggcggctggtgtcctgcctgagcagccagagcagcgccctgagccagagcggcggcggcagcaccagcgctgctggcatcgaggcccggagccgggccctgcggcggcgctggtgcccagctggcatcatgctgctggccctggtgtgcctgctgagctgcctgctgcccagcagcgaggccaagctgtatggccgctgtgagctggcccgggtgctgcatgactttggcctggatggctaccggggctacagcctggccgactgggtgtgcctggcctacttcaccagcggcttcaatgctgctgccctggactatgaagcagatggcagcaccaacaacggcatcttccagatcaacagccgccgctggtgcagcaacctgaccccaaatgtgcccaacgtgtgcaggatgtactgcagcgacctgctgaaccccaacctgaaggacaccgtcatctgtgccatgaagatcacccaggagccccagggcctgggctactgggaggcctggaggcaccactgccagggcaaggacctgacagagtgggtggatggctgtgacttctag

SEQ ID NO: 171326 - DNA, 627 bp, synthetic construct
  misc_feature 1..627: note = Description of Artificial Sequence: Synthetic coding sequence
  source 1..627: mol_type = other DNA
atgatccaggaggaccacgagggcagccaggatggaggagtgcacagcagccctgtgagcagccccagcgtgtctggcccccggcggctggtgtcctgcctgagcagccagagcagcgccctgagccagagcggcggcggcagcaccagcgctgctggcatcgaggcccggagccgggccctgcggcggcgctggtgcccagctggcatcatgctgctggccctggtgtgcctgctgagctgcctgctgcccagcagcgaggccaagctgtatggccgctgtgagctggcccgggtgctgcatgactttggcctggatggctaccggggctacagcctggccgactgggtgtgcctggcctacttcaccagcggcttcaatgctgctgccctggactatgaagcagatggcagcaccaacaacggcatcttccagatcaacagccgccgctggtgcagcaacctgacccccaacgtgcccaacgtgtgcaggatgtactgcagcgacctgctgaaccccaacctgaaggacaccgtcatctgtgccatgaagatcacccaggagccccagggcctgggctactgggaggcctggaggcaccactgccagggcaaggacctgacctag

SEQ ID NO: 171327 - DNA, 339 bp, synthetic construct
  misc_feature 1..339: note = Description of Artificial Sequence: Synthetic coding sequence
  source 1..339: mol_type = other DNA
atggtgtctgccctgcggggggcccccctcatccgggtgtgcctggcctacttcaccagcggcttcaatgctgctgccctggactatgaagcagatggcagcaccaacaacggcatcttccagatcaacagccgccgctggtgcagcaacctgacccccaacgtgcccaacgtgtgcaggatgtactgcagcgacctgctgaaccccaacctgaaggacaccgtcatctgtgccatgaagatcacccaggagccccagggcctgggctactgggaggcctggaggcaccactgccagggcaaggacctgacagagtgggtggatggctgtgacttctag

SEQ ID NO: 171328 - DNA, 372 bp, synthetic construct
  misc_feature 1..372: note = Description of Artificial Sequence: Synthetic coding sequence
  source 1..372: mol_type = other DNA
atgaccagcggctggacagacaccggggacacagcctggctgacagcctatgccctgccctatgctggggtgtgcctggcctacttcaccagcggcttcaatgctgctgccctggactatgaagcagatggcagcaccaacaacggcatcttccagatcaacagccgccgctggtgcagcaacctgaccccaaatgtgcccaacgtgtgcaggatgtactgcagcgacctgctgaaccccaacctgaaggacaccgtcatctgtgccatgaagatcacccaggagccccagggcctgggctactgggaggcctggaggcaccactgccagggcaaggacctgacagagtgggtggatggctgtgacttctag

SEQ ID NO: 171329 - DNA, 375 bp, synthetic construct
  misc_feature 1..375: note = Description of Artificial Sequence: Synthetic coding sequence
  source 1..375: mol_type = other DNA
atggtgctgtgctggctgctgctgctggtgatggccctgcccccaggcaccaccggggtgaaggactgtgtgttctgtgagctgacagacagcatgcagtgccccggcacctacatgcactgtggagatgatgaggactgcttcaccggccatggagtggcccctggcactggacctgtgatcaacaagggctgcctgcgggccaccagctgtggcctggaggagcctgtgtcctacagaggagtgacctacagcctgaccaccaactgctgcaccggccgcctgtgcaacagagcccccagcagccagacagtgggcgccaccaccagcctggccctgggcctgggcatgctgctgcccccccggctgctgtag

SEQ ID NO: 171330 - DNA, 480 bp, synthetic construct
  misc_feature 1..480: note = Description of Artificial Sequence: Synthetic coding sequence
  source 1..480: mol_type = other DNA
atgaaggcctggggcaccgtggtggtgaccctggccaccctgatggtggtgacagtggatgccaagatctatgaaagatgtgagctggccgcccggctggagcgggccggcctgaatggctacaagggctacggcgtgggggactggctgtgcatggcccactatgaaagtggctttgacacagcctttgtggaccacaacccagatggcagcagtgaatatggcatcttccagctgaacagcgcctggtggtgtgacaatggcatcacccccaccaagaacctgtgccacatggactgccacgacctgctgaacagacacatcctggatgacatccgctgtgccaagcagatcgtgagcagccagaatggcctgagcgcctggacctcctggaggctgcactgcagcggccatgacctgtctgagtggctgaagggctgtgacatgcacgtgaagattgaccccaagatccacccctag

SEQ ID NO: 171331 - DNA, 480 bp, synthetic construct; identical to SEQ ID NO: 171330
  misc_feature 1..480: note = Description of Artificial Sequence: Synthetic coding sequence
  source 1..480: mol_type = other DNA

SEQ ID NO: 171332 - DNA, 3207 bp, synthetic construct
  misc_feature 1..3207: note = Description of Artificial Sequence: Synthetic coding sequence
  source 1..3207: mol_type = other DNA
atgaggtctgctgccaagccctggaacccagccatccgggccggcggccacggccctgacagagtgcggcccctgcctgctgccagcagcggcatgaagagcagcaagagcagcaccagcctggcctttgagagccggctgagccggctgaagagggccagcagcgaggacaccctgaacaagccaggcagcacagctgccagcggcgtggtgcggctgaagaagacagccacagctggggccatcagcgagctgacagagagccggctgcggagcggcaccggggccttcaccaccaccaagaggacaggcatcccagccccccgggagttctctgtgacagtgtcccgggagaggtctgtgccccggggccccagcaaccccaggaagtctgtgagcagccccaccagcagcaacacccccacccccaccaagcacctgcggacccccagcaccaagcccaagcaggagaatgaaggaggagagaaggccgccctggagagccaggtgcgggagctgctggccgaggccaaggccaaggacagcgagatcaaccggctgcggtctgagctgaagaagtacaaggagaagaggaccctgaatgctgagggcacagatgccctgggccccaacgtggatggcacctctgtgtcccctggggacacagagcccatgatccgggccctggaggagaagaacaagaacttccagaaggagctgagtgacctggaggaggagaacagagtgctgaaggagaagctgatctacctggagcacagccccaacagcgagggcgccgccagccacactggagacagcagctgccccaccagcatcacccaggagagcagctttggcagccccactggaaaccagatgagcagtgacattgatgagtacaagaagaacatccatggaaatgccctgcggaccagcggcagcagcagcagtgatgtgaccaaggccagcctgagcccagatgccagtgactttgagcacatcacagctgagacccccagccggcccctgagcagcaccagcaaccccttcaagagcagcaagtgcagcacagctggcagcagccccaacagcgtgtctgagctgagcctggccagcctgacagagaagatccagaagatggaggagaaccaccacagcacagctgaggagctgcaggccaccctgcaggagctgagtgaccagcagcagatggtgcaggagctgacagcagaaaatgagaagctggtggatgagaagaccatcctggagaccagcttccaccagcaccgggagagagctgagcagctgagccaggagaatgagaagctgatgaacctgctgcaggagcgggtgaagaatgaggagcccaccacccaggagggcaagatcatcgagctggagcagaagtgcaccggcatcctggagcagggccgctttgagcgggagaagctgctgaacatccagcagcagctgacctgcagcctgaggaaggtggaggaggagaaccagggcgccctggagatgatcaagaggctgaaggaggagaatgagaagctgaatgagttcctggagctggagcggcacaacaacaacatgatggccaagaccctggaggagtgccgggtgaccctggagggcctgaagatggagaatggcagcctgaagagccacctgcagggcgagaagcagaaggccacagaggccagcgctgtggagcagacagctgagagctgtgaggtgcaggagatgctgaaggtggcccgggcagagaaggacctgctggagctgagctgcaatgagctgcggcaggagctgctgaaggccaatggagagatcaagcacgtgagcagcctgctggccaaggtggagaaggactacagctacctgaaggagatctgtgaccaccaggccgagcagctgagcaggaccagcctgaagctgcaggagaaggccagcgagagtgatgctgagatcaaggacatgaaggagaccatctttgagctggaggaccaggtggagcagcacagagctgtgaagctgcacaacaaccagctgatcagcgagctggagagcagcgtcatcaagctggaggagcagaagagtgacctggagcggcagctgaagaccctgaccaagcagatgaaggaggagacagaggagtggaggcgcttccaggccgacctgcagacagctgtggtggtggccaatgacatcaagtgtgaggcccagcaggagctgaggacagtgaagaggaagctgctggaggaggaggagaagaatgcccggctgcagaaggagctgggagatgtgcagggccacggccgggtggtgaccagcagagctgcccctcctcctgtggatgaggagcctgagagcagcgaggtggatgctgctggccgctggccaggagtgtgtgtgtccaggaccagccccaccccacctgagagcgccaccaccgtgaagagcctcatcaagagctttgacctgggccggcctgggggcgccggccagaacatctctgtgcacaagacccccaggagccccctgagcggcatccctgtgaggacagccccagctgctgctgtgagccccatgcagaggcacagcacctacagctctgtgcggcctgccagccggggcgtgacccagaggctggacctgcctgacctgcccctgagtgacatcctgaagggccgcacagagaccctgaagccagacccccacctgaggaagagccccagcctggagagcctgagcaggcctcccagcctgggctttggagacacccggctgctgagcgccagcacccgggcctggaagccccagagcaagctgtctgtggagaggaaggaccccctggccgccctggcccgggagtatggaggcagcaagagaaatgccctgctgaagtggtgccagaagaagacccagggctacgccaacatcgacatcaccaacttcagcagctcctggagcgatggcctggccttctgtgccctgctgcacacctacctgcctgcccacatcccctaccaggagctgaacagccaggagaagaagaggaacctgctgctggcctttgaagctgctgagagcgtgggcatcaagcccagcctggagctgtctgagatgctgtacacagacagaccagactggcagagcgtgatgcagtatgtggcccagatctacaagtactttgagacctag

SEQ ID NO: 171333 - DNA, 2112 bp, synthetic construct
  misc_feature 1..2112: note = Description of Artificial Sequence: Synthetic coding sequence
  source 1..2112: mol_type = other DNA
atgggcaaccacagcggccgcccagaagatcctgagcccggggccttcaccaccaccaagaggacaggcatcccagccccccgggagttctctgtgacagtgtcccgggagaggtctgtgccccggggccccagcaaccccaggaagtctgtgagcagccccaccagcagcaacacccccacccccaccaagcacctgcggacccccagcaccaagcccaagcaggagaatgaaggaggagagaaggccgccctggagagccaggtgcgggagctgctggccgaggccaaggccaaggacagcgagatcaaccggctgcggtctgagctgaagaagtacaaggagaagaggaccctgaatgctgagggcacagatgccctgggccccaacgtggatggcacctctgtgtcccctggggacacagagcccatgatccgggccctggaggagaagaacaagaacttccagaaggagctgagtgacctggaggaggagaacagagtgctgaaggagaagctgatctacctggagcacagccccaacagcgagggcgccgccagccacactggagacagcagctgccccaccagcatcacccaggagagcagctttggcagccccaccggcaaccagatgagcagtgacattgatgagtacaagaagaacatccacggcaatgccctgcggaccagcggcagcagcagcagtgatgtgaccaaggccagcctgagcccagatgccagtgactttgagcacatcacagctgagacccccagccggcccctgagcagcaccagcaaccccttcaagagcagcaagtgcagcacagctggcagcagccccaacagcgtgtctgagctgagcctggccagcctgacagagaagatccagaagatggaggagaaccaccacagcacagctgaggagctgcaggccaccctgcaggagctgagtgaccagcagcagatggtgcaggagctgacagcagaaaatgagaagctggtggatgagaagaccatcctggagaccagcttccaccagcaccgggagcgggcagagcagctgagccaggagaatgagaagctgatgaacctgctgcaggagcgggtgaagaatgaggagcccaccacccaggagggcaagatcatcgagctggagcagaagtgcaccggcatcctggagcagggccgctttgagcgggagaagctgctgaacatccagcagcagctgacctgcagcctgaggaaggtggaggaggagaaccagggcgccctggagatgatcaagaggctgaaggaggagaatgagaagctgaatgagttcctggagctggagcggcacaacaacaacatgatggccaagaccctggaggagtgccgggtgaccctggagggcctgaagatggagaatggcagcctgaagagccacctgcagggcgagaagcagaaggccacagaggccagcgctgtggagcagacagctgagagctgtgaggtgcaggagatgctgaaggtggcccgggcagagaaggacctgctggagctgagctgcaatgagctgcggcaggagctgctgaaggccaacggggagatcaagcacgtgagcagcctgctggccaaggtggagaaggactacagctacctgaaggagatctgtgaccaccaggccgagcagctgagcaggaccagcctgaagctgcaggagaaggccagcgagagtgatgctgagatcaaggacatgaaggagaccatctttgagctggaggaccaggtggagcagcacagagctgtgaagctgcacaacaaccagctgatcagcgagctggagagcagcgtcatcaagctggaggagcagaagagtgacctggagcggcagctgaagaccctgaccaagcagatgaaggaggagacagaggagtggaggcgcttccaggccgacctgcagacagctgtggtggtggccaatgacatcaagtgtgaggcccagcaggagctgaggacagtgaagaggaagctgctggaggaggaggagaagaatgcccggctgcagaaggagctgggagatgtgcagggccacggccgggtggtgaccagccgggccgccccaccctag

SEQ ID NO: 171334 - DNA, 2130 bp, synthetic construct
  misc_feature 1..2130: note = Description of Artificial Sequence: Synthetic coding sequence
  source 1..2130: mol_type = other DNA
atgggcaaccacagcggccgcccagaagatcctgagcccggggccttcaccaccaccaagaggacaggcatcccagccccccgggagttctctgtgacagtgtcccgggagaggtctgtgccccggggccccagcaaccccaggaagtctgtgagcagccccaccagcagcaacacccccacccccaccaagcacctgcggacccccagcaccaagcccaagcaggagaatgaaggaggagagaaggccgccctggagagccaggtgcgggagctgctggccgaggccaaggccaaggacagcgagatcaaccggctgcggtctgagctgaagaagtacaaggagaagaggaccctgaatgctgagggcacagatgccctgggccccaacgtggatggcacctctgtgtcccctggggacacagagcccatgatccgggccctggaggagaagaacaagaacttccagaaggagctgagtgacctggaggaggagaacagagtgctgaaggagaagctgatctacctggagcacagccccaacagcgagggcgccgccagccacactggagacagcagctgccccaccagcatcacccaggagagcagctttggcagccccaccggcaaccagatgagcagtgacattgatgagtacaagaagaacatccacggcaatgccctgcggaccagcggcagcagcagcagtgatgtgaccaaggccagcctgagcccagatgccagtgactttgagcacatcacagctgagacccccagccggcccctgagcagcaccagcaaccccttcaagagcagcaagtgcagcacagctggcagcagccccaacagcgtgtctgagctgagcctggccagcctgacagagaagatccagaagatggaggagaaccaccacagcacagctgaggagctgcaggccaccctgcaggagctgagtgaccagcagcagatggtgcaggagctgacagcagaaaatgagaagctggtggatgagaagaccatcctggagaccagcttccaccagcaccgggagcgggcagagcagctgagccaggagaatgagaagctgatgaacctgctgcaggagcgggtgaagaatgaggagcccaccacccaggagggcaagatcatcgagctggagcagaagtgcaccggcatcctggagcagggccgctttgagcgggagaagctgctgaacatccagcagcagctgacctgcagcctgaggaaggtggaggaggagaaccagggcgccctggagatgatcaagaggctgaaggaggagaatgagaagctgaatgagttcctggagctggagcggcacaacaacaacatgatggccaagaccctggaggagtgccgggtgaccctggagggcctgaagatggagaatggcagcctgaagagccacctgcagggcgagaagcagaaggccacagaggccagcgctgtggagcagacagctgagagctgtgaggtgcaggagatgctgaaggtggcccgggcagagaaggacctgctggagctgagctgcaatgagctgcggcaggagctgctgaaggccaacggggagatcaagcacgtgagcagcctgctggccaaggtggagaaggactacagctacctgaaggagatctgtgaccaccaggccgagcagctgagcaggaccagcctgaagctgcaggagaaggccagcgagagtgatgctgagatcaaggacatgaaggagaccatctttgagctggaggaccaggtggagcagcacagagctgtgaagctgcacaacaaccagctgatcagcgagctggagagcagcgtcatcaagctggaggagcagaagagtgacctggagcggcagctgaagaccctgaccaagcagatgaaggaggagacagaggagtggaggcgcttccaggccgacctgcagacagctgtggtggtggccaatgacatcaagtgtgaggcccagcaggagctgaggacagtgaagaggaagctgctggaggaggaggagaagaatgcccggctgcagaaggagctgggagatgtgcagggccacggccgggtggtgaccagccgggccgccccacccagcctgggctctgtgtcctag

SEQ ID NO: 171335 - DNA, 2964 bp, synthetic construct
  misc_feature 1..2964: note = Description of Artificial Sequence: Synthetic coding sequence
  source 1..2964: mol_type = other DNA
atgggcaaccacagcggccgcccagaagatcctgagcccggggccttcaccaccaccaagaggacaggcatcccagccccccgggagttctctgtgacagtgtcccgggagaggtctgtgccccggggccccagcaaccccaggaagtctgtgagcagccccaccagcagcaacacccccacccccaccaagcacctgcggacccccagcaccaagcccaagcaggagaatgaaggaggagagaaggccgccctggagagccaggtgcgggagctgctggccgaggccaaggccaaggacagcgagatcaaccggctgcggtctgagctgaagaagtacaaggagaagaggaccctgaatgctgagggcacagatgccctgggccccaacgtggatggcacctctgtgtcccctggggacacagagcccatgatccgggccctggaggagaagaacaagaacttccagaaggagctgagtgacctggaggaggagaacagagtgctgaaggagaagctgatctacctggagcacagccccaacagcgagggcgccgccagccacactggagacagcagctgccccaccagcatcacccaggagagcagctttggcagccccaccggcaaccagatgagcagtgacattgatgagtacaagaagaacatccacggcaatgccctgcggaccagcggcagcagcagcagtgatgtgaccaaggccagcctgagcccagatgccagtgactttgagcacatcacagctgagacccccagccggcccctgagcagcaccagcaaccccttcaagagcagcaagtgcagcacagctggcagcagccccaacagcgtgtctgagctgagcctggccagcctgacagagaagatccagaagatggaggagaaccaccacagcacagctgaggagctgcaggccaccctgcaggagctgagtgaccagcagcagatggtgcaggagctgacagcagaaaatgagaagctggtggatgagaagaccatcctggagaccagcttccaccagcaccgggagcgggcagagcagctgagccaggagaatgagaagctgatgaacctgctgcaggagcgggtgaagaatgaggagcccaccacccaggagggcaagatcatcgagctggagcagaagtgcaccggcatcctggagcagggccgctttgagcgggagaagctgctgaacatccagcagcagctgacctgcagcctgaggaaggtggaggaggagaaccagggcgccctggagatgatcaagaggctgaaggaggagaatgagaagctgaatgagttcctggagctggagcggcacaacaacaacatgatggccaagaccctggaggagtgccgggtgaccctggagggcctgaagatggagaatggcagcctgaagagccacctgcagggcgagaagcagaaggccacagaggccagcgctgtggagcagacagctgagagctgtgaggtgcaggagatgctgaaggtggcccgggcagagaaggacctgctggagctgagctgcaatgagctgcggcaggagctgctgaaggccaacggggagatcaagcacgtgagcagcctgctggccaaggtggagaaggactacagctacctgaaggagatctgtgaccaccaggccgagcagctgagcaggaccagcctgaagctgcaggagaaggccagcgagagtgatgctgagatcaaggacatgaaggagaccatctttgagctggaggaccaggtggagcagcacagagctgtgaagctgcacaacaaccagctgatcagcgagctggagagcagcgtcatcaagctggaggagcagaagagtgacctggagcggcagctgaagaccctgaccaagcagatgaaggaggagacagaggagtggaggcgcttccaggccgacctgcagacagctgtggtggtggccaatgacatcaagtgtgaggcccagcaggagctgaggacagtgaagaggaagctgctggaggaggaggagaagaatgcccggctgcagaaggagctgggagatgtgcagggccacggccgggtggtgaccagccgggccgcccctcctcctgtggatgaggagcctgagagcagcgaggtggatgctgctggccgctggccaggagtgtgtgtgtccaggaccagccccaccccacctgagagcgccaccaccgtgaagagcctcatcaagagctttgacctgggccggcctggaggagctggccagaacatctctgtgcacaagacccccaggagccccctgagcggcatccctgtgaggacagccccagctgctgctgtgagccccatgcagaggcacagcacctacagctctgtgcggcctgccagcagaggagtgacccagaggctggacctgcctgacctgcccctgagtgacatcctgaagggccgcacagagaccctgaagccagacccccacctgaggaagagccccagcctggagagcctgagccggccccccagcctgggctttggagacacccggctgctgagcgccagcacccgggcctggaagccccagagcaagctgtctgtggagaggaaggaccccctggccgccctggcccgggagtatggaggcagcaagagaaatgccctgctgaagtggtgccagaagaagacccagggctacgccaacatcgacatcaccaacttcagcagctcctggagcgatggcctggccttctgtgccctgctgcacacctacctgcctgcccacatcccctaccaggagctgaacagccaggagaagaagaggaacctgctgctggcctttgaggccgctgagagcgtgggcatcaagcccagcctggagctgtctgagatgctgtacacagacagaccagactggcagagcgtgatgcagtatgtggcccagatctacaagtactttgagacctag

SEQ ID NO: 171336 - DNA, 2373 bp, synthetic construct
  misc_feature 1..2373: note = Description of Artificial Sequence: Synthetic coding sequence
  source 1..2373: mol_type = other DNA
atgaggtctgctgccaagccctggaacccagccatccgggccggcggccacggccctgacagagtgcggcccctgcctgctgccagcagcggcatgaagagcagcaagagcagcaccagcctggcctttgagagccggctgagccggctgaagagggccagcagcgaggacaccctgaacaagccaggcagcacagctgccagcggcgtggtgcggctgaagaagacagccacagctggggccatcagcgagctgacagagagccggctgcggagcggcaccggggccttcaccaccaccaagaggacaggcatcccagccccccgggagttctctgtgacagtgtcccgggagaggtctgtgccccggggccccagcaaccccaggaagtctgtgagcagccccaccagcagcaacacccccacccccaccaagcacctgcggacccccagcaccaagcccaagcaggagaatgaaggaggagagaaggccgccctggagagccaggtgcgggagctgctggccgaggccaaggccaaggacagcgagatcaaccggctgcggtctgagctgaagaagtacaaggagaagaggaccctgaatgctgagggcacagatgccctgggccccaacgtggatggcacctctgtgtcccctggggacacagagcccatgatccgggccctggaggagaagaacaagaacttccagaaggagctgagtgacctggaggaggagaacagagtgctgaaggagaagctgatctacctggagcacagccccaacagcgagggcgccgccagccacactggagacagcagctgccccaccagcatcacccaggagagcagctttggcagccccactggaaaccagatgagcagtgacattgatgagtacaagaagaacatccatggaaatgccctgcggaccagcggcagcagcagcagtgatgtgaccaaggccagcctgagcccagatgccagtgactttgagcacatcacagctgagacccccagccggcccctgagcagcaccagcaaccccttcaagagcagcaagtgcagcacagctggcagcagccccaacagcgtgtctgagctgagcctggccagcctgacagagaagatccagaagatggaggagaaccaccacagcacagctgaggagctgcaggccaccctgcaggagctgagtgaccagcagcagatggtgcaggagctgacagcagaaaatgagaagctggtggatgagaagaccatcctggagaccagcttccaccagcaccgggagagagctgagcagctgagccaggagaatgagaagctgatgaacctgctgcaggagcgggtgaagaatgaggagcccaccacccaggagggcaagatcatcgagctggagcagaagtgcaccggcatcctggagcagggccgctttgagcgggagaagctgctgaacatccagcagcagctgacctgcagcctgaggaaggtggaggaggagaaccagggcgccctggagatgatcaagaggctgaaggaggagaatgagaagctgaatgagttcctggagctggagcggcacaacaacaacatgatggccaagaccctggaggagtgccgggtgaccctggagggcctgaagatggagaatggcagcctgaagagccacctgcagggcgagaagcagaaggccacagaggccagcgctgtggagcagacagctgagagctgtgaggtgcaggagatgctgaaggtggcccgggcagagaaggacctgctggagctgagctgcaatgagctgcggcaggagctgctgaaggccaatggagagatcaagcacgtgagcagcctgctggccaaggtggagaaggactacagctacctgaaggagatctgtgaccaccaggccgagcagctgagcaggaccagcctgaagctgcaggagaaggccagcgagagtgatgctgagatcaaggacatgaaggagaccatctttgagctggaggaccaggtggagcagcacagagctgtgaagctgcacaacaaccagctgatcagcgagctggagagcagcgtcatcaagctggaggagcagaagagtgacctggagcggcagctgaagaccctgaccaagcagatgaaggaggagacagaggagtggaggcgcttccaggccgacctgcagacagctgtggtggtggccaatgacatcaagtgtgaggcccagcaggagctgaggacagtgaagaggaagctgctggaggaggaggagaagaatgcccggctgcagaaggagctgggagatgtgcagggccacggccgggtggtgaccagcagagctgccccacccagcctgggctctgtgtcctag

SEQ ID NO: 171337 - DNA, 3090 bp, synthetic construct
  misc_feature 1..3090: note = Description of Artificial Sequence: Synthetic coding sequence
  source 1..3090: mol_type = other DNA
atgaggtctgctgccaagccctggaacccagccatccgggccggcggccacggccctgacagagtgcggcccctgcctgctgccagcagcggcatgaagagcagcaagagcagcaccagcctggcctttgagagccggctgagccggctgaagagggccagcagcgaggacaccctgaacaagccaggcagcacagctgccagcggcgtggtgcggctgaagaagacagccacagctggggccatcagcgagctgacagagagccggctgcggagcggcaccggggccttcaccaccaccaagaggacaggcatcccagccccccgggagttctctgtgacagtgtcccgggagaggtctgtgccccggggccccagcaaccccaggaagtctgtgagcagccccaccagcagcaacacccccacccccaccaagcacctgcggacccccagcaccaagcccaagcaggagaatgaaggaggagagaaggccgccctggagagccaggtgcgggagctgctggccgaggccaaggccaaggacagcgagatcaaccggctgcggtctgagctgaagaagtacaaggagaagaggaccctgaatgctgagggcacagatgccctgggccccaacgtggatggcacctctgtgtcccctggggacacagagcccatgatccgggccctggaggagaagaacaagaacttccagaaggagctgagtgacctggaggaggagaacagagtgctgaaggagaagctgatctacctggagcacagccccaacagcgagggcgccgccagccacactggagacagcagctgccccaccagcatcacccaggagagcagctttggcagccccactggaaaccagatgagcagtgacattgatgagtacaagaagaacatccatggaaatgccctgcggaccagcggcagcagcagcagtgatgtgaccaaggccagcctgagcccagatgccagtgactttgagcacatcacagctgagacccccagccggcccctgagcagcaccagcaaccccttcaagagcagcaagtgcagcacagctggcagcagccccaacagcgtgtctgagctgagcctggccagcctgacagagaagatccagaagatggaggagaaccaccacagcacagctgaggagctgcaggccaccctgcaggagctgagtgaccagcagcagatggtgcaggagctgacagcagaaaatgagaagctggtggatgagaagaccatcctggagaccagcttccaccagcaccgggagagagctgagcagctgagccaggagaatgagaagctgatgaacctgctgcaggagcgggtgaagaatgaggagcccaccacccaggagggcaagatcatcgagctggagcagaagtgcaccggcatcctggagcagggccgctttgagcgggagaagctgctgaacatccagcagcagctgacctgcagcctgaggaaggtggaggaggagaaccagggcgccctggagatgatcaagaggctgaaggaggagaatgagaagctgaatgagttcctggagctggagcggcacaacaacaacatgatggccaagaccctggaggagtgccgggtgaccctggagggcctgaagatggagaatggcagcctgaagagccacctgcagggcgagaagcagaaggccacagaggccagcgctgtggagcagacagctgagagctgtgaggtgcaggagatgctgaaggtggcccgggcagagaaggacctgctggagctgagctgcaatgagctgcggcaggagctgctgaaggccaatggagagatcaagcacgtgagcagcctgctggccaaggtggagaaggactacagctacctgaaggagatctgtgaccaccaggccgagcagctgagcaggaccagcctgaagctgcaggagaaggccagcgagagtgatgctgagatcaaggacatgaaggagaccatctttgagctggaggaccaggtggagcagcacagagctgtgaagctgcacaacaaccagctgatcagcgagctggagagcagcgtcatcaagctggaggagcagaagagtgacctggagcggcagctgaagaccctgaccaagcagatgaaggaggagacagaggagtggaggcgcttccaggccgacctgcagacagctgtggtggtggccaatgacatcaagtgtgaggcccagcaggagctgaggacagtgaagaggaagctgctggaggaggaggagaagaatgcccggctgcagaaggagctgggagatgtgcagggccacggccgggtggtgaccagcagagctgcccctcctcctgtggatgaggagcctgagagcagcgaggtggatgctgctggccgctggccaggagtgtgtgtgtccaggaccagccccaccccacctgagagcgccaccaccgtgaagagcctcatcaagagctttgacctgggccggcctgggggcgccggccagaacatctctgtgcacaagacccccaggagccccctgagcggcatccctgtgaggacagccccagctgctgctgtgagccccatgcagaggcacagcacctacagctctgtgcggcctgccagccggggcgtgacccagaggctggacctgcctgacctgcccctgagtgacatcctgaagggccgcacagagaccctgaagccagacccccacctgaggaagagccccagcctggagagcctgagcaggcctcccagcctgggctttggagacacccggctgctgagcgccagcacccgggcctggaagccccagagcaagctgtctgtggagaggaaggaccccctggccgccctggcccgggagtatggaggcagcaagagaaatgccctgctgaagtggtgccagaagaagacccagggctacgccaagaggaacctgctgctggcctttgaggccgctgagagcgtgggcatcaagcccagcctggagctgtctgagatgctgtacacagacagaccagactggcagagcgtgatgcagtatgtggcccagatctacaagtactttgagacctag

SEQ ID NO: 171338 - DNA, 237 bp, synthetic construct
  misc_feature 1..237: note = Description of Artificial Sequence: Synthetic coding sequence
  source 1..237: mol_type = other DNA
atgaggtctgctgccaagccctggaacccagccatccgggccggcggccacggccctgacagagtgcggcccctgcctgctgccagcagcggcatgaagagcagcaagagcagcaccagcctggcctttgagagccggctgagccggctgaagagggccagcagcgaggacaccctgaacaagccaggcagcacagctgccagcggcgtggtgcggctgaagaagacagccacctag

SEQ ID NO: 171339 - DNA, 1227 bp, synthetic construct
  misc_feature 1..1227: note = Description of Artificial Sequence: Synthetic coding sequence
  source 1..1227: mol_type = other DNA
atgaaggagaccatctttgagctggaggaccaggtggagcagcacagagctgtgaagctgcacaacaaccagctgatcagcgagctggagagcagcgtcatcaagctggaggagcagaagagtgacctggagcggcagctgaagaccctgaccaagcagatgaaggaggagacagaggagtggaggcgcttccaggccgacctgcagacagctgtggtggtggccaatgacatcaagtgtgaggcccagcaggagctgaggacagtgaagaggaagctgctggaggaggaggagaagaatgcccggctgcagaaggagctgggagatgtgcagggccacggccgggtggtgaccagcagagctgcccctcctcctgtggatgaggagcctgagagcagcgaggtggatgctgctggccgctggccaggagtgtgtgtgtccaggaccagccccaccccacctgagagcgccaccaccgtgaagagcctcatcaagagctttgacctgggccggcctgggggcgccggccagaacatctctgtgcacaagacccccaggagccccctgagcggcatccctgtgaggacagccccagctgctgctgtgagccccatgcagaggcacagcacctacagctctgtgcggcctgccagccggggcgtgacccagaggctggacctgcctgacctgcccctgagtgacatcctgaagggccgcacagagaccctgaagccagacccccacctgaggaagagccccagcctggagagcctgagcaggcctcccagcctgggctttggagacacccggctgctgagcgccagcacccgggcctggaagccccagagcaagctgtctgtggagaggaaggaccccctggccgccctggcccgggagtatggaggcagcaagagaaatgccctgctgaagtggtgccagaagaagacccagggctacgccaacatcgacatcaccaacttcagcagctcctggagcgatggcctggccttctgtgccctgctgcacacctacctgcctgcccacatcccctaccaggagctgaacagccaggagaagaagaggaacctgctgctggcctttgaagctgctgagagcgtgggcatcaagcccagcctggagctgtctgagatgctgtacacagacagaccagactggcagagcgtgatgcagtatgtggcccagatctacaagtactttgagacctag

SEQ ID NO: 171340 - DNA, 3354 bp, synthetic construct
  misc_feature 1..3354: note = Description of Artificial Sequence: Synthetic coding sequence
  source 1..3354: mol_type = other DNA
atgaagaaggccagccgctctgtgggctctgtgcccaaggtgtctgccatcagcaagacccagacagctgagaagatcaagccagagaacagcagcagcgccagcactggaggcaagctggtgaagccaggcacagctgccagcctgagcaagaccaagagcagtgatgacctgctggccggcatggccggcggcgtgacagtgaccaacggggtgaagggcaagaagagcacctgccccagcgctgcccccagcgccagcgccccagccatgaccaccgtggagaacaagagcaagatcagcactggaacagccagcagcaccaagaggagcaccagcacaggcaacaaggagagcagcagcacccgggagcggctgcgggagaggacccggctgaaccagagcaagaagctgcccagcgctggccagggcgccaatgacatggccctggccaagaggagccgcagcaggacagccacagaatgtgatgtgaggatgagcaagagcaagagtgacaaccagatcagtgacagagctgccctggaggccaaggtgaaggacctgctgaccctggccaagaccaaggatgtggagatcctgcacctgagaaatgagctgcgggacatgagggcccagctgggcatcaatgaagaccacagtgaaggagatgagaagtctgagaaggagaccatcatggcccaccagcccacagatgtggagagcaccctgctgcagctgcaggagcagaacacagccatccgggaggagctgaaccagctgaagaatgaaaataggatgctgaaggaccggctgaatgccctgggcttcagcctggagcagaggctggacaacagcgagaagctgtttggctaccagagcctgagccctgagatcaccccagacaaccagagtgatggcggcggcaccctgaccagctctgtggagggcagcgcccctggctctgtggaggacctgctgagccaggatgagaacaccctgatggaccaccagcacagcaacagcatggacaacctggacagcgagtgcagcgaggtgtaccagcccctgaccagcagtgatgatgccctggatgcccccagcagcagcgagagcgagggcatccccagcattgaaagaagcaggaagggcagcagtggaaatgccagcgaggtgtctgtggcctgcctgacagagcgcatccaccagatggaggagaaccagcacagcaccagcgaggagctgcaggccaccctgcaggagctggccgacctgcagcagatcacccaggagctgaacagtgaaaatgaaaggctgggggaggagaaggtgatcctgatggagagcctgtgccagcagagcgacaagctggagcacttcagccggcagatcgagtacttccgcagcctgctggatgagcaccacatctcctatgtgattgatgaagatgtgaagagcggccgctacatggagctggagcagcgctacatggacctggccgagaatgccaggtttgagcgggagcagctgctgggcgtgcagcagcacctgagcaacaccctgaagatggccgagcaggacaacaaggaggcccaggagatgattggagccctgaaggagaggagccaccacatggagcgcatcatcgagagcgagcagaagggcaaggccgccctggccgccaccctggaggagtacaaggccaccgtggccagtgaccagatcgagatgaaccggctgaaggcccagctggagaatgagaagcagaaggtggccgagctgtacagcatccacaacagcggggacaagagtgacatccaggacctgctggagagcgtgcggctggacaaggagaaggccgagaccctggccagcagcctgcaggaggacctggcccacaccagaaatgatgccaaccggctgcaggatgccatcgccaaggtggaggatgagtaccgggccttccaggaggaggccaagaagcagatcgaggacctgaacatgaccctggagaagctgcggagtgacctggatgagaaggagacagagaggagtgacatgaaggagaccatctttgagctggaggatgaggtggagcagcacagagctgtgaagctgcatgacaacctgatcatcagtgacctggagaacacagtgaagaagctgcaggaccagaagcatgacatggagcgggagatcaagaccctgcaccggcggctgcgggaggagagcgctgagtggaggcagttccaggccgacctgcagacagctgtggtgattgccaatgacatcaagtctgaggcccaggaggagattggagacctgaagaggcggctgcacgaggcccaggagaagaatgagaagctgaccaaggagctggaggagatcaagagcaggaagcaggaggaggagcggggccgggtgtacaactacatgaatgctgtggagcgggacctggccgccctgcggcagggcatgggcctgagcagaagaagcagcaccagcagcgagcccacccccaccgtgaagaccctcatcaagagctttgacagcgccagccaggtgcccaacccagctgctgctgccatccccaggacccccctgagccccagccccatgaagaccccacctgctgctgctgtgagccccatgcagaggcacagcatcagcggccccatcagcaccagcaagcccctgacagccctgagtgacaagaggcccaactacggggagatccctgtgcaggagcacctgctgcggaccagcagcgccagcaggcctgccagcctgccccgggtgcctgccatggagagcgccaagaccctgtctgtgtccagaagaagcagcgaggaggtgaagagggacatcagcgcccaggagggcgccagccctgccagcctgatggccatgggcaccaccagcccccagctgagcctgagcagcagccccacagcctctgtgacccccaccaccaggagccgcatccgggaggagaggaaggaccccctgagcgccctggcccgggagtatggaggcagcaagagaaatgccctgctgaagtggtgccagaagaagacagagggctaccagaacatcgacatcaccaacttcagcagctcctggaatgatggcctggccttctgtgccctgctgcacacctacctgcctgcccacatcccctaccaggagctgaacagccaggacaagagaagaaacttcatgctggccttccaggccgctgagagcgtgggcatcaagagcaccctggacatcaatgagatggtgaggacagagaggccagactggcagaatgtgatgctgtatgtgacagccatctacaagtactttgagacctag

SEQ ID NO: 171341 - DNA, 2820 bp, synthetic construct
  misc_feature 1..2820: note = Description of Artificial Sequence: Synthetic coding sequence
  source 1..2820: mol_type = other DNA
gtgcctgaggccgtgcgctggggctacttcatccctgagcagagccagtttgcctgcaagtgcatcaccaagaggcagcccaggatgaagaaggccagccgctctgtgggctctgtgcccaaggtgtctgccatcagcaagacccagacagctgagaagatcaagccagagaacagcagcagcgccagcactggaggcaagctggtgaagccaggcacagctgccagcctgagcaagaccaagagcagtgatgacctgctggccggcatggccggcggcgtgacagtgaccaacggggtgaagggcaagaagagcacctgccccagcgctgcccccagcgccagcgccccagccatgaccaccgtggagaacaagagcaagatcagcactggaacagccagcagcaccaagaggagcaccagcacaggcaacaaggagagcagcagcacccgggagcggctgcgggagaggacccggctgaaccagagcaagaagctgcccagcgctggccagggcgccaatgacatggccctggccaagaggagccgcagcaggacagccacagaatgtgatgtgaggatgagcaagagcaagagtgacaaccagatcagtgacagagctgccctggaggccaaggtgaaggacctgctgaccctggccaagaccaaggatgtggagatcctgcacctgagaaatgagctgcgggacatgagggcccagctgggcatcaatgaagaccacagtgaaggagatgagaagtctgagaaggagaccatcatggcccaccagcccacagatgtggagagcaccctgctgcagctgcaggagcagaacacagccatccgggaggagctgaaccagctgaagaatgaaaataggatgctgaaggaccggctgaatgccctgggcttcagcctggagcagaggctggacaacagcgagaagctgtttggctaccagagcctgagccctgagatcaccccagacaaccagagtgatggcggcggcaccctgaccagctctgtggagggcagcgcccctggctctgtggaggacctgctgagccaggatgagaacaccctgatggaccaccagcacagcaacagcatggacaacctggacagcgagtgcagcgaggtgtaccagcccctgaccagcagtgatgatgccctggatgcccccagcagcagcgagagcgagggcatccccagcattgaaagaagcaggaagggcagcagtggaaatgccagcgaggtgtctgtggcctgcctgacagagcgcatccaccagatggaggagaaccagcacagcaccagcgaggagctgcaggccaccctgcaggagctggccgacctgcagcagatcacccaggagctgaacagtgaaaatgaaaggctgggggaggagaaggtgatcctgatggagagcctgtgccagcagagcgacaagctggagcacttcagccggcagatcgagtacttccgcagcctgctggatgagcaccacatctcctatgtgattgatgaagatgtgaagagcggccgctacatggagctggagcagcgctacatggacctggccgagaatgccaggtttgagcgggagcagctgctgggcgtgcagcagcacctgagcaacaccctgaagatggccgagcaggacaacaaggaggcccaggagatgattggagccctgaaggagaggagccaccacatggagcgcatcatcgagagcgagcagaagggcaaggccgccctggccgccaccctggaggagtacaaggccaccgtggccagtgaccagatcgagatgaaccggctgaaggcccagctggagaatgagaagcagaaggtggccgagctgtacagcatccacaacagcggggacaagagtgacatccaggacctgctggagagcgtgcggctggacaaggagaaggccgagaccctggccagcagcctgcaggaggacctggcccacaccagaaatgatgccaaccggctgcaggatgccatcgccaaggtggaggatgagtaccgggccttccaggaggaggccaagaagcagatcgaggacctgaacatgaccctggagaagctgcggagtgacctggatgagaaggagacagagaggagtgacatgaaggagaccatctttgagctggaggatgaggtggagcagcacagagctgtgaagctgcatgacaacctgatcatcagtgacctggagaacacagtgaagaagctgcaggaccagaagcatgacatggagcgggagatcaagaccctgcaccggcggctgcgggaggagagcgctgagtggaggcagttccaggccgacctgcagacagctgtggtgattgccaatgacatcaagtctgaggcccaggaggagattggagacctgaagaggcggctgcacgaggcccaggagaagaatgagaagctgaccaaggagctggaggagatcaagagcaggaagcaggaggaggagcggggccgggtgtacaactacatgaatgctgtggagcgggacctggccgccctgcggcagggcatgggcctgagcagaagaagcagcaccagcagcgagcccacccccaccgtgaagaccctcatcaagagctttgacagcgccagccaggtgcccaacccagctgctgctgccatccccaggacccccctgagccccagccccatgaagaccccacctgctgctgctgtgagccccatgcagatggagagcagctctgtggcccatgctggcatgcagtggagggacctgggcagcctgcagcccctgcccccaggcttcaagtag

SEQ ID NO: 171342 - DNA, 2370 bp, synthetic construct
  misc_feature 1..2370: note = Description of Artificial Sequence: Synthetic coding sequence
  source 1..2370: mol_type = other DNA
atgaagaaggccagccgctctgtgggctctgtgcccaaggtgtctgccatcagcaagacccagacagctgagaagatcaagccagagaacagcagcagcgccagcactggaggcaagctggtgaagccaggcacagctgccagcctgagcaagaccaagagcagtgatgacctgctggccggcatggccggcggcgtgacagtgaccaacggggtgaagggcaagaagagcacctgccccagcgctgcccccagcgccagcgccccagccatgaccaccgtggagaacaagagcaagatcagcactggaacagccagcagcaccaagaggagcaccagcacaggcaacaaggagagcagcagcacccgggagcggctgcgggagaggacccggctgaaccagagcaagaagctgcccagcgctggccagggcgccaatgacatggccctggccaagaggagccgcagcaggacagccacagaatgtgatgtgaggatgagcaagagcaagagtgacaaccagatcagtgacagagctgccctggaggccaaggtgaaggacctgctgaccctggccaagaccaaggatgtggagatcctgcacctgagaaatgagctgcgggacatgagggcccagctgggcatcaatgaagaccacagtgaaggagatgagaagtctgagaaggagaccatcatggcccaccagcccacagatgtggagagcaccctgctgcagctgcaggagcagaacacagccatccgggaggagctgaaccagctgaagaatgaaaataggatgctgaaggaccggctgaatgccctgggcttcagcctggagcagaggctggacaacagcgagaagctgtttggctaccagagcctgagccctgagatcaccccagacaaccagagtgatggcggcggcaccctgaccagctctgtggagggcagcgcccctggctctgtggaggacctgctgagccaggatgagaacaccctgatggaccaccagcacagcaacagcatggacaacctggacagcgagtgcagcgaggtgtaccagcccctgaccagcagtgatgatgccctggatgcccccagcagcagcgagagcgagggcatccccagcattgaaagaagcaggaagggcagcagtggaaatgccagcgaggtgtctgtggcctgcctgacagagcgcatccaccagatggaggagaaccagcacagcaccagcgaggagctgcaggccaccctgcaggagctggccgacctgcagcagatcacccaggagctgaacagtgaaaatgaaaggctgggggaggagaaggtgatcctgatggagagcctgtgccagcagagcgacaagctggagcacttcagccggcagatcgagtacttccgcagcctgctggatgagcaccacatctcctatgtgattgatgaagatgtgaagagcggccgctacatggagctggagcagcgctacatggacctggccgagaatgccaggtttgagcgggagcagctgctgggcgtgcagcagcacctgagcaacaccctgaagatggccgagcaggacaacaaggaggcccaggagatgattggagccctgaaggagaggagccaccacatggagcgcatcatcgagagcgagcagaagggcaaggccgccctggccgccaccctggaggagtacaaggccaccgtggccagtgaccagatcgagatgaaccggctgaaggcccagctggagaatgagaagcagaaggtggccgagctgtacagcatccacaacagcggggacaagagtgacatccaggacctgctggagagcgtgcggctggacaaggagaaggccgagaccctggccagcagcctgcaggaggacctggcccacaccagaaatgatgccaaccggctgcaggatgccatcgccaaggtggaggatgagtaccgggccttccaggaggaggccaagaagcagatcgaggacctgaacatgaccctggagaagctgcggagtgacctggatgagaaggagacagagaggagtgacatgaaggagaccatctttgagctggaggatgaggtggagcagcacagagctgtgaagctgcatgacaacctgatcatcagtgacctggagaacacagtgaagaagctgcaggaccagaagcatgacatggagcgggagatcaagaccctgcaccggcggctgcgggaggagagcgctgagtggaggcagttccaggccgacctgcagacagctgtggtgattgccaatgacatcaagtctgaggcccaggaggagattggagacctgaagaggcggctgcacgaggcccaggagaagaatgagaagctgacctag

SEQ ID NO: 171343 - DNA, 3354 bp, synthetic construct; identical to SEQ ID NO: 171340
  misc_feature 1..3354: note = Description of Artificial Sequence: Synthetic coding sequence
  source 1..3354: mol_type = other DNA

SEQ ID NO: 171344 - DNA, 3237 bp, synthetic construct
  misc_feature 1..3237: note = Description of Artificial Sequence: Synthetic coding sequence
  source 1..3237: mol_type = other DNA
atgaagaaggccagccgctctgtgggctctgtgcccaaggtgtctgccatcagcaagacccagacagctgagaagatcaagccagagaacagcagcagcgccagcactggaggcaagctggtgaagccaggcacagctgccagcctgagcaagaccaagagcagtgatgacctgctggccggcatggccggcggcgtgacagtgaccaacggggtgaagggcaagaagagcacctgccccagcgctgcccccagcgccagcgccccagccatgaccaccgtggagaacaagagcaagatcagcactggaacagccagcagcaccaagaggagcaccagcacaggcaacaaggagagcagcagcacccgggagcggctgcgggagaggacccggctgaaccagagcaagaagctgcccagcgctggccagggcgccaatgacatggccctggccaagaggagccgcagcaggacagccacagaatgtgatgtgaggatgagcaagagcaagagtgacaaccagatcagtgacagagctgccctggaggccaaggtgaaggacctgctgaccctggccaagaccaaggatgtggagatcctgcacctgagaaatgagctgcgggacatgagggcccagctgggcatcaatgaagaccacagtgaaggagatgagaagtctgagaaggagaccatcatggcccaccagcccacagatgtggagagcaccctgctgcagctgcaggagcagaacacagccatccgggaggagctgaaccagctgaagaatgaaaataggatgctgaaggaccggctgaatgccctgggcttcagcctggagcagaggctggacaacagcgagaagctgtttggctaccagagcctgagccctgagatcaccccagacaaccagagtgatggcggcggcaccctgaccagctctgtggagggcagcgcccctggctctgtggaggacctgctgagccaggatgagaacaccctgatggaccaccagcacagcaacagcatggacaacctggacagcgagtgcagcgaggtgtaccagcccctgaccagcagtgatgatgccctggatgcccccagcagcagcgagagcgagggcatccccagcattgaaagaagcaggaagggcagcagtggaaatgccagcgaggtgtctgtggcctgcctgacagagcgcatccaccagatggaggagaaccagcacagcaccagcgaggagctgcaggccaccctgcaggagctggccgacctgcagcagatcacccaggagctgaacagtgaaaatgaaaggctgggggaggagaaggtgatcctgatggagagcctgtgccagcagagcgacaagctggagcacttcagccggcagatcgagtacttccgcagcctgctggatgagcaccacatctcctatgtgattgatgaagatgtgaagagcggccgctacatggagctggagcagcgctacatggacctggccgagaatgccaggtttgagcgggagcagctgctgggcgtgcagcagcacctgagcaacaccctgaagatggccgagcaggacaacaaggaggcccaggagatgattggagccctgaaggagaggagccaccacatggagcgcatcatcgagagcgagcagaagggcaaggccgccctggccgccaccctggaggagtacaaggccaccgtggccagtgaccagatcgagatgaaccggctgaaggcccagctggagaatgagaagcagaaggtggccgagctgtacagcatccacaacagcggggacaagagtgacatccaggacctgctggagagcgtgcggctggacaaggagaaggccgagaccctggccagcagcctgcaggaggacctggcccacaccagaaatgatgccaaccggctgcaggatgccatcgccaaggtggaggatgagtaccgggccttccaggaggaggccaagaagcagatcgaggacctgaacatgaccctggagaagctgcggagtgacctggatgagaaggagacagagaggagtgacatgaaggagaccatctttgagctggaggatgaggtggagcagcacagagctgtgaagctgcatgacaacctgatcatcagtgacctggagaacacagtgaagaagctgcaggaccagaagcatgacatggagcgggagatcaagaccctgcaccggcggctgcgggaggagagcgctgagtggaggcagttccaggccgacctgcagacagctgtggtgattgccaatgacatcaagtctgaggcccaggaggagattggagacctgaagaggcggctgcacgaggcccaggagaagaatgagaagctgaccaaggagctggaggagatcaagagcaggaagcaggaggaggagcggggccgggtgtacaactacatgaatgctgtggagcgggacctggccgccctgcggcagggcatgggcctgagcagaagaagcagcaccagcagcgagcccacccccaccgtgaagaccctcatcaagagctttgacagcgccagccaggtgcccaacccagctgctgctgccatccccaggacccccctgagccccagccccatgaagaccccacctgctgctgctgtgagccccatgcagaggcacagcatcagcggccccatcagcaccagcaagcccctgacagccctgagtgacaagaggcccaactacggggagatccctgtgcaggagcacctgctgcggaccagcagcgccagcaggcctgccagcctgccccgggtgcctgccatggagagcgccaagaccctgtctgtgtccagaagaagcagcgaggaggtgaagagggacatcagcgcccaggagggcgccagccctgccagcctgatggccatgggcaccaccagcccccagctgagcctgagcagcagccccacagcctctgtgacccccaccaccaggagccgcatccgggaggagaggaaggaccccctgagcgccctggcccgggagtatggaggcagcaagagaaatgccctgctgaagtggtgccagaagaagacagagggctaccagaggaggaacttcatgctggccttccaggccgctgagagcgtgggcatcaagagcaccctggacatcaatgagatggtgaggacagagaggccagactggcagaatgtgatgctgtatgtgacagccatctacaagtactttgagacctag

SEQ ID NO: 171345 - DNA, 2781 bp, synthetic construct
  misc_feature 1..2781: note = Description of Artificial Sequence: Synthetic coding sequence
  source 1..2781: mol_type = other DNA
atgaccaccaaggactaccccagcctgtggggcttcggcaccaccaagaccttcaagatccccatcgagcacctggacttcaagtacatcgagaagtgcagtgatgtgaagcacctggagaagatcctgtgtgtgctgcggagcggggaggagggctactacccagagctgacagagttctgtgagaagcacctgcaggccctggcccctgagagccgggccctgaggaaggacaagccagctgccacagctgccagcttcaccgctgaggagtgggagaagattgatggagacatcaagtcctgggtgtctgagatcaagaaggaggaggacaagatgcacttccacgagacagagaccttccctgccatgaaggacaacctgccccctgtgcggggcagcaacagctgcctgcacgtgggcaaggagaagtacagcaagaggcccaccaagaagaagaccccccgggactatgcagagtgggacaagtttgatgtggagaaggaatgtctgaagattgatgaggactacaaggagaagacagtgattgacaagagccacctgagcaagattgagaccagaattgacacagctggcctgacagagaaggagaaggacttcctggccacccgggagaaggagaagggaaatgaggccttcaacagcggggactatgaggaggccgtgatgtactacaccaggagcatcagcgccctgcccaccgtggtggcctacaacaacagagcccaggccgagatcaagctgcagaactggaacagcgccttccaggactgtgagaaggtgctggagctggagcctggaaatgtgaaggccctgctgcggcgggccaccacctacaagcaccagaacaagctgcgggaggccacagaggacctgagcaaggtgctggatgtggagccagacaatgacctggccaagaagaccctgtctgaggtggagcgggacctgaagaacagcgaggccgccagcgagacccagaccaagggcaagaggatggtgatccaggagattgaaaattctgaagatgaggagggcaagagcggcaggaagcatgaagatggcggcggggacaagaagccagctgagcctgctggagctgcccgggccgcccagccctgtgtgatgggcaacatccagaagaagctgaccgggaaggccgagggcggcaagaggcctgcccggggggccccccagaggggccagaccccagaggccggggctgacaagaggagcccccggcgggccagcgctgctgctgctgctgggggcggggccaccggccaccctgggggcggccagggcgcagaaaatcctgctggcctgaagagccagggcaatgaactcttccgcagcggccagtttgctgaggccgccggcaagtacagcgctgccatcgccctgctggagcccgccggcagcgagattgctgatgacctgagcatcctgtacagcaacagagctgcctgctacctgaaggagggcaactgcagcggctgcatccaggactgcaacagagccctggagctgcaccccttctccatgaagcccctgctgcggcgggccatggcctatgagaccctggagcagtatggcaaggcctacgtggactacaagacagtgctgcagattgactgtggcctgcagctggccaatgacagcgtgaaccggctgagccgcatcctgatggagctggatggccccaactggagggagaagctgagccccatcccagctgtgcctgcctctgtgcccctgcaggcctggcacccagccaaggagatgatcagcaagcaggccggggacagcagcagccaccggcagcagggcatcacagatgagaagaccttcaaggccctgaaggaggagggcaaccagtgtgtgaatgacaagaactacaaggatgccctgagcaagtacagcgagtgcctgaagatcaacaacaaggaatgtgccatctacaccaacagagccctgtgctacctgaagctgtgccagtttgaggaggccaagcaggactgtgaccaggccctgcagctggctgatggaaatgtgaaggccttctaccgccgggccctggcccacaagggcctgaagaactaccagaagagcctgattgacctgaacaaggtgatcctgctggaccccagcatcatcgaggccaagatggagctggaggaggtgacccggctgctgaacctgaaggacaagacagcccccttcaacaaggagaaggagaggaggaagattgagatccaggaggtgaatgaaggcaaggaggagcccggccggcctgctggggaggtgtccatgggctgcctggccagcgagaagggcggcaagagcagccgcagcccagaagatcctgagaagctgcccatcgccaagcccaacaatgcctatgaatttggccagatcatcaatgccctgagcaccaggaaggacaaggaggcctgtgcccacctgctggccatcacagcccccaaggacctgcccatgttcctgagcaacaagctggagggggacaccttcctgctgctgatccagagcctgaagaacaacctgattgagaaggaccccagcctggtgtaccagcacctgctgtacctgagcaaggccgagcgcttcaagatgatgctgaccctcatcagcaagggccagaaggagctgattgagcagctgtttgaggacctgagtgacacccccaacaaccacttcaccctggaggacatccaggccctgaagaggcagtatgagctgtag

SEQ ID NO: 171346 - DNA, 2781 bp, synthetic construct; identical to SEQ ID NO: 171345
  misc_feature 1..2781: note = Description of Artificial Sequence: Synthetic coding sequence
  source 1..2781: mol_type = other DNA

SEQ ID NO: 171347 - DNA, 1044 bp, synthetic construct
  misc_feature 1..1044: note = Description of Artificial Sequence: Synthetic coding sequence
  source 1..1044: mol_type = other DNA
atggccgcccagaggggcatgcccagcagcgctgtgcgggtgctggaggaggccctgggcatgggcctgacagctgctggagatgcccgggacacagcagatgctgtggccgctgagggcgcctactacctggagcaggtgaccatcacagaggcctctgaagatgattatgaatatgaggagatcccagatgacaacttcagcatccctgagggggaggaggacctggccaaggccatccagatggcccaggagcaggccacagacacagagatcctggagaggaagacagtgctgcccagcaagcatgctgtgcctgaggtgattgaggacttcctgtgcaacttcctgatcaagatgggcatgaccaggaccctggactgcttccagagcgagtggtatgagctgatccagaagggcgtgacagagctgaggacagtgggcaatgtgcctgatgtgtacacccagatcatgctgctggagaatgaaaacaagaacctgaagaaggacctgaagcactacaagcaggccgctgacaaggcccgggaggacctgctgaagatccagaaggagcgggacttccacaggatgcaccacaagagaattgtgcaggagaagaacaagctgatcaatgacctgaagggcctgaagctgcactacgccagctatgagcccaccatccgggtgctgcacgagaagcaccacaccctgctgaaggagaagatgctgaccagcctggagcgggacaaggtggtgggccagatcagcggcctgcaggagaccctgaagaagctgcagaggggccacagctaccacggcccccagatcaaggtggaccacagccgggagaaggaaaatgcccctgagggccccacccagaagggcctgcgggaggcccgggagcagaacaagtgcaagaccaagatgaagggcaacaccaagcagtggacaggcaacagccagacctggaacaagacagtgcccctgcaggacaccatcggccggcggcaggagaacaacagcgcccaccagcacatcgactag

SEQ ID NO: 171348 - DNA, 1896 bp, synthetic construct
  misc_feature 1..1896: note = Description of Artificial Sequence: Synthetic coding sequence
  source 1..1896: mol_type = other DNA
atggccgcccagaggggcatgcccagcagcgctgtgcgggtgctggaggaggccctgggcatgggcctgacagctgctggagatgcccgggacacagcagatgctgtggccgctgagggcgcctactacctggagcaggtgaccatcacagaggcctctgaagatgattatgaatatgaggagatcccagatgacaacttcagcatccctgagggggaggaggacctggccaaggccatccagatggcccaggagcaggccacagacacagagatcctggagaggaagacagtgctgcccagcaagcatgctgtgcctgaggtgattgaggacttcctgtgcaacttcctgatcaagatgggcatgaccaggaccctggactgcttccagagcgagtggtatgagctgatccagaagggcgtgacagagctgaggacagtgggcaatgtgcctgatgtgtacacccagatcatgctgctggagaatgaaaacaagaacctgaagaaggacctgaagcactacaagcaggccgctgacaaggcccgggaggacctgctgaagatccagaaggagcgggacttccacaggatgcaccacaagagaattgtgcaggagaagaacaagctgatcaatgacctgaagggcctgaagctgcactacgccagctatgagcccaccatccgggtgctgcacgagaagcaccacaccctgctgaaggagaagatgctgaccagcctggagcgggacaaggtggtgggccagatcagcggcctgcaggagaccctgaagaagctgcagaggggccacagctaccacggcccccagatcaaggtggaccacagccgggagaaggaaaatgcccctgagggccccacccagaagggcctgcgggaggcccgggagcagaacaagtgcaagaccaagatgaagggcaacaccaaggacagcgagttccccatcgacatgcagcccaaccccaacctgaatgtgtccaaggagagcctgagccctgccaagtttgactacaagctgaagaacatcttccggctgcacgagctgcctgtgtcctgtgtgtccatgcagccccacaaggacatcctggtgtcctgtggggaggaccggctgtggaaggtgctgggcctgcccaagtgcaatgtgctgctgactggatttggccacacagactggctgagtgactgctgcttccaccccagcggggacaagctggccaccagcagcggggacaccaccgtgaagctgtgggacctgtgcaagggggactgcatcctgacctttgagggccacagcagagctgtgtggagctgcacctggcacagctgtggcaactttgtggccagcagcagcctggacaagaccagcaagatctgggatgtgaacagcgagcgctgccgctgcaccctgtatggccacacagacagcgtgaacagcattgagttcttccccttcagcaacaccctgctgaccagcagcgctgacaagaccctgagcatctgggatgccaggacaggcatctgtgagcagagcctgtatggccacatgcacagcatcaatgatgccatctttgacccccggggccacatgattgccagctgtgatgcctgtggggtgaccaagctgtgggacttcaggaagctgctgcccatcgtgtccattgacatcggccccagccctggaaatgaggtgaactttgacagcagcggccgggtgctggcccaggccagcggaaatggagtcatccacctgctggacctgaagtctggagagatccacaagctgatgggccatgaaaatgaggcccacacagtggtgttcagccatgatggagagatcctcttcagcggcggcagtgatggcaccgtgaggacctggagctag

SEQ ID NO: 171349 - DNA, 1614 bp, synthetic construct
  misc_feature 1..1614: note = Description of Artificial Sequence: Synthetic coding sequence
  source 1..1614: mol_type = other DNA
atgaccatgaacatgaagcgctaccagatgaccatcctggccagccagaaggtgaagaagatctggcagaagcagttccgctggcccaagaaccggctgcagatcctgaagttctggtatgagctgatccagaagggcgtgacagagctgaggacagtgggcaatgtgcctgatgtgtacacccagatcatgctgctggagaatgaaaacaagaacctgaagaaggacctgaagcactacaagcaggccgctgacaaggcccgggaggacctgctgaagatccagaaggagcgggacttccacaggatgcaccacaagagaattgtgcaggagaagaacaagctgatcaatgacctgaagggcctgaagctgcactacgccagctatgagcccaccatccgggtgctgcacgagaagcaccacaccctgctgaaggagaagatgctgaccagcctggagcgggacaaggtggtgggccagatcagcggcctgcaggagaccctgaagaagctgcagaggggccacagctaccacggcccccagatcaaggtggaccacagccgggagaaggaaaatgcccctgagggccccacccagaagggcctgcgggaggcccgggagcagaacaagtgcaagaccaagatgaagggcaacaccaaggacagcgagttccccatcgacatgcagcccaaccccaacctgaatgtgtccaaggagagcctgagccctgccaagtttgactacaagctgaagaacatcttccggctgcacgagctgcctgtgtcctgtgtgtccatgcagccccacaaggacatcctggtgtcctgtggggaggaccggctgtggaaggtgctgggcctgcccaagtgcaatgtgctgctgactggatttggccacacagactggctgagtgactgctgcttccaccccagcggggacaagctggccaccagcagcggggacaccaccgtgaagctgtgggacctgtgcaagggggactgcatcctgacctttgagggccacagcagagctgtgtggagctgcacctggcacagctgtggcaactttgtggccagcagcagcctggacaagaccagcaagatctgggatgtgaacagcgagcgctgccgctgcaccctgtatggccacacagacagcgtgaacagcattgagttcttccccttcagcaacaccctgctgaccagcagcgctgacaagaccctgagcatctgggatgccaggacaggcatctgtgagcagagcctgtatggccacatgcacagcatcaatgatgccatctttgacccccggggccacatgattgccagctgtgatgcctgtggggtgaccaagctgtgggacttcaggaagctgctgcccatcgtgtccattgacatcggccccagccctggaaatgaggtgaactttgacagcagcggccgggtgctggcccaggccagcggaaatggagtcatccacctgctggacctgaagtctggagagatccacaagctgatgggccatgaaaatgaggcccacacagtggtgttcagccatgatggagagatcctcttcagcggcggcagtgatggcaccgtgaggacctggagctag

SEQ ID NO: 171350 - DNA, 756 bp, synthetic construct
  misc_feature 1..756: note = Description of Artificial Sequence: Synthetic coding sequence
  source 1..756: mol_type = other DNA
atgggcgtgggcaccaaggcccgggccagccactggaggcggctgctgagcctgggcgccaccccagaggagcccctgctggacttcaagatcccagatgacaacttcagcatccctgagggggaggaggacctggccaaggccatccagatggcccaggagcaggccacagacacagagatcctggagaggaagacagtgctgcccagcaagcatgctgtgcctgaggtgattgaggacttcctgtgcaacttcctgatcaagatgggcatgaccaggaccctggactgcttccagagcgagtggtatgagctgatccagaagggcgtgacagagctgaggacagtgggcaatgtgcctgatgtgtacacccagatcatgctgctggagaatgaaaacaagaacctgaagaaggacctgaagcactacaagcaggccgctgacaaggcccgggaggacctgctgaagatccagaaggagcgggacttccacaggatgcaccacaagagaattgtgcaggagaagaacaagctgatcaatgacctgaagggcctgaagctgcactacgccagctatgagcccaccatccgggtgctgcacgagaagcaccacaccctgctgaaggagaagatgctgaccagcctggagcgggacaaggtggtgggccagatcagcggcctgcaggagaccctgaagaagctgcagaggggccacagctaccacggcccccagatcaagggcaagtgcaagatgtag

SEQ ID NO: 171351 - DNA, 552 bp, synthetic construct
  misc_feature 1..552: note = Description of Artificial Sequence: Synthetic coding sequence
  source 1..552: mol_type = other DNA
atggccgcccagaggggcatgcccagcagcgctgtgcgggtgctggaggaggccctgggcatgggcctgacagctgctggagatgcccgggacacagcagatgctgtggccgctgagggcgcctactacctggagcaggtgaccatcacagaggcctctgaagatgattatgaatatgaggagatcccagatgacaacttcagcatccctgagggggaggaggacctggccaaggccatccagatggcccaggagcaggccacagacacagagatcctggagaggaagacagtgctgcccagcaagcatgctgtgcctgaggtgattgaggacttcctgtgcaacttcctgatcaagatgggcatgaccaggaccctggactgcttccagagcgagtggtatgagctgatccagaagggcgtgacagagctgaggacagtgggcaatgtgcctgatgtgtacacccagatcatgctgctggagaatgaaaacaagaacctgaagaaggacctgaagcactacaagcaggccgcagaatatgtgatcttctag

SEQ ID NO: 171352 - DNA, 768 bp, synthetic construct
  misc_feature 1..768: note = Description of Artificial Sequence: Synthetic coding sequence
  source 1..768: mol_type = other DNA
gacagcgagttccccatcgacatgcagcccaaccccaacctgaatgtgtccaaggagagcctgagccctgccaagtttgactacaagctgaagaacatcttccggctgcacgagctgcctgtgtcctgtgtgtccatgcagccccacaaggacatcctggtgtcctgtggggaggaccggctgtggaaggtgctgggcctgcccaagtgcaatgtgctgctgactggatttggccacacagactggctgagtgactgctgcttccaccccagcgagcgctgccgctgcaccctgtatggccacacagacagcgtgaacagcattgagttcttccccttcagcaacaccctgctgaccagcagcgctgacaagaccctgagcatctgggatgccaggacaggcatctgtgagcagagcctgtatggccacatgcacagcatcaatgatgccatctttgacccccggggccacatgattgccagctgtgatgcctgtggggtgaccaagctgtgggacttcaggaagctgctgcccatcgtgtccattgacatcggccccagccctggaaatgaggtgaactttgacagcagcggccgggtgctggcccaggccagcggaaatggagtcatccacctgctggacctgaagtctggagagatccacaagctgatgggccatgaaaatgaggcccacacagtggtgttcagccatgatggagagatcctcttcagcggcggcagtgatggcaccgtgaggacctggagctag

SEQ ID NO: 171353 - DNA, 1314 bp, synthetic construct
  misc_feature 1..1314: note = Description of Artificial Sequence: Synthetic coding sequence
  source 1..1314: mol_type = other DNA
atgaggaggagcagcaggcctggcagcgccagcagcagcaggaagcacacccccaacttcttcagcgagaacagctccatgagcatcaccagcgaggacagcaagggcctgcggtctgctgagcccggccctggagagcctgagggccggcgggcccggggccccagctgtggggagcccgccctgtctgctggggtgcctgggggcaccacctgggccggcagcagccagcagaagccagcccccaggagccacaactggcagacagcctgtggggccgccaccgtgcggggcggggccagcgagcccaccggcagccctgtggtgtctgaggagcccctggacctgctgcccaccctggacctgcggcaggagatgcccccacccagggtcttcaagagcttcctgagcctgctcttccagggcctgtctgtgctgctgagcctggccggagatgtgctggtgtccatgtaccgggaggtgtgcagcatccgcttcctgttcaccgctgtgtccctgctgagcctcttcctgagcgccttctggctgggcctgctgtacctggtgagccccctggagaatgagcccaaggagatgctgaccctgtctgagtaccacgagcgggtgcgcagccagggccagcagctgcagcagctgcaggccgagctggacaagctgcacaaggaggtgtccacagtgcgggccgccaacagcgagcgggtggccaagctggtgttccagaggctgaatgaagattttgtgaggaagccagactatgccctgagctctgtgggcgccagcattgacctgcagaagaccagccatgactatgctgacaggaacacagcctacttctggaaccgcttctccttctggaactatgcccggcccccaacagtcatcctggagccccacgtgtttcctggcaactgctgggcctttgaaggagaccagggccaggtggtgatccagctgcccggccgggtgcagctgagtgacatcaccctgcagcaccccccacccagcgtggagcacactggaggagccaacagcgccccccgggactttgctgtgtttggcctgcaggtgtatgatgaaacagaggtgtccctgggcaagttcacctttgatgtggagaagtctgagatccagaccttccacctgcagaatgaccccccagctgccttccccaaggtgaagatccagatcctgagcaactggggccacccccgcttcacctgcctgtacagagtgcgggcccatggagtgaggaccagcgagggcgctgagggcagcgcccagggcccccactag

SEQ ID NO: 171354 - DNA, 1377 bp, synthetic construct
  misc_feature 1..1377: note = Description of Artificial Sequence: Synthetic coding sequence
  source 1..1377: mol_type = other DNA
atgagccagaggcaggtgctgcaggtgtttgagcagtaccagaaggcccggacccagtttgtgcagatggtggccgagctggccacccggccccagaacatcgagaccctgcagaatgctggggtgatgagcctgctgcggaccctgctgctggatgtggtgcccaccatccagcagacagctgccctggccctgggccgcctggccaactacaatgatgacctggccgaggccgtggtgaagtgtgacatcctgccccagctggtgtacagcctggccgagcagaaccgcttctacaagaaggctgctgcctttgtgctgcgggctgtgggcaagcacagcccccagctggcccaggccatcgtggactgtggggccctggacaccctggtgatctgcctggaggactttgatcctggggtgaaggaggccgccgcctgggccctgcgctacatcgcccggcacaatgctgagctgagccaggccgtggtggatgctggagctgtgcccctgctggtgctgtgcatccaggagcctgagatcgccctgaagagaattgctgccagcgccctgagtgacatcgccaagcacagccctgagctggcccagacagtggtggatgctggagctgtggcccacctggcccagatgatcctgaacccagatgccaagctgaagcaccagatcctgagcgccctgagccaggtgtccaagcacagcgtggacctggccgagatggtggtggaggccgagatcttccctgtggtgctgacctgcctgaaggacaaggatgaatatgtgaagaagaatgccagcaccctcatccgggagatcgccaagcacaccccagagctgagccagctggtggtgaatgctgggggcgtggccgctgtgattgactgcatcggcagctgcaagggcaacacccggctgcccggcatcatgatgctgggctacgtggccgcccacagcgagaacctggccatggccgtcatcatcagcaaaggagtgccccagctgtctgtgtgcctgtctgaggagcctgaggaccacatcaaggctgctgctgcctgggccctgggccagatcggccgccacaccccagagcacgcccgggctgtggccgtgaccaacaccctgcctgtgctgctgagcctgtacatgagcacagagagcagcgaggacctgcaggtgaagagcaagaaggccatcaagaacatcctgcagaagtgcacctacctgcctgccctggagcccttcctgtatgatgccccacccaacatcctgaagcacgtggtgggccagttcagcaaggtgctcttcccctggatcttccgctacaccagcgctgagggcggccagctgagcaccacctag

SEQ ID NO: 171355 - DNA, 813 bp, synthetic construct
  misc_feature 1..813: note = Description of Artificial Sequence: Synthetic coding sequence
  source 1..813: mol_type = other DNA
atgagccagaggcaggtgctgcaggtgtttgagcagtaccagaaggcccggacccagtttgtgcagatggtggccgagctggccacccggccccagaacatcgagaccctgcagaatgctggggtgatgagcctgctgcggaccctgctgctggatgtggtgcccaccatccagcagacagctgccctggccctgggccgcctggccaactacaatgatgacctggccgaggccgtggtgaagtgtgacatcctgccccagctggtgtacagcctggccgagcagaatggagtgccccagctgtctgtgtgcctgtctgaggagcctgaggaccacatcaaggctgctgctgcctgggccctgggccagatcggccgccacaccccagagcacgcccgggctgtggccgtgaccaacaccctgcctgtgctgctgagcctgtacatgagcacagagagcagcgaggacctgcaggtgaagagcaagaaggccatcaagaacatcctgcagaagtgcacctacctgcctgccctggagcccttcctgtatgatgccccacccaacatcctgaagcacgtggtgggccagttcagcaaggtgctgccccatgacagcaaggcccggcggctgtttgtgaccagcggcggcctgaagaaggtgcaggagatcaaggccgagcccggcagcctgctgcaggagtacatcaacagcatcaacagctgctacccagaggagatcgtgcgctactacagccctggctacagcgacaccctgctgcagagggtggacagctaccagcccctgaacaactag

SEQ ID NO: 171356 - DNA, 1758 bp, synthetic construct
  misc_feature 1..1758: note = Description of Artificial Sequence: Synthetic coding sequence
  source 1..1758: mol_type = other DNA
atgagccagaggcaggtgctgcaggtgtttgagcagtaccagaaggcccggacccagtttgtgcagatggtggccgagctggccacccggccccagaacatcgagaccctgcagaatgctggggagcccggggcccggacccctgtggccccccgggccctgagcccccggcggctgcggcctgctgccctgcctgtggagctgctgggcagccgctctgtgggcaccggggtgaggaagagcatccacagcttccagagggtgtttggaggccaggccgagcgggtgaagctgcctgatggctgcggccgctgtgccctgagcctcttccccagcagcctgcacactggagtgatgagcctgctgcggaccctgctgctggatgtggtgcccaccatccagcagacagctgccctggccctgggccgcctggccaactacaatgatgacctggccgaggccgtggtgaagtgtgacatcctgccccagctggtgtacagcctggccgagcagaaccgcttctacaagaaggctgctgcctttgtgctgcgggctgtgggcaagcacagcccccagctggcccaggccatcgtggactgtggggccctggacaccctggtgatctgcctggaggactttgatcctggggtgaaggaggccgccgcctgggccctgcgctacatcgcccggcacaatgctgagctgagccaggccgtggtggatgctggagctgtgcccctgctggtgctgtgcatccaggagcctgagatcgccctgaagagaattgctgccagcgccctgagtgacatcgccaagcacagccctgagctggcccagacagtggtggatgctggagctgtggcccacctggcccagatgatcctgaacccagatgccaagctgaagcaccagatcctgagcgccctgagccaggtgtccaagcacagcgtggacctggccgagatggtggtggaggccgagatcttccctgtggtgctgacctgcctgaaggacaaggatgaatatgtgaagaagaatgccagcaccctcatccgggagatcgccaagcacaccccagagctgagccagctggtggtgaatgctgggggcgtggccgctgtgattgactgcatcggcagctgcaagggcaacacccggctgcccggcatcatgatgctgggctacgtggccgcccacagcgagaacctggccatggccgtcatcatcagcaaaggagtgccccagctgtctgtgtgcctgtctgaggagcctgaggaccacatcaaggctgctgctgcctgggccctgggccagatcggccgccacaccccagagcacgcccgggctgtggccgtgaccaacaccctgcctgtgctgctgagcctgtacatgagcacagagagcagcgaggacctgcaggtgaagagcaagaaggccatcaagaacatcctgcagaagtgcacctacctgcctgccctggagcccttcctgtatgatgccccacccaacatcctgaagcacgtggtgggccagttcagcaaggtgctgccccatgacagcaaggcccggcggctgtttgtgaccagcggcggcctgaagaaggtgcaggagatcaaggccgagcccggcagcctgctgcaggagtacatcaacagcatcaacagctgctacccagaggagatcgtgcgctactacagccctggctacagcgacaccctgctgcagagggtggacagctaccagcccctgaacaactag

SEQ ID NO: 171357 - DNA, 1530 bp, synthetic construct
  misc_feature 1..1530: note = Description of Artificial Sequence: Synthetic coding sequence
  source 1..1530: mol_type = other DNA
atgagccagaggcaggtgctgcaggtgtttgagcagtaccagaaggcccggacccagtttgtgcagatggtggccgagctggccacccggccccagaacatcgagaccctgcagaatgctggggtgatgagcctgctgcggaccctgctgctggatgtggtgcccaccatccagcagacagctgccctggccctgggccgcctggccaactacaatgatgacctggccgaggccgtggtgaagtgtgacatcctgccccagctggtgtacagcctggccgagcagaaccgcttctacaagaaggctgctgcctttgtgctgcgggctgtgggcaagcacagcccccagctggcccaggccatcgtggactgtggggccctggacaccctggtgatctgcctggaggactttgatcctggggtgaaggaggccgccgcctgggccctgcgctacatcgcccggcacaatgctgagctgagccaggccgtggtggatgctggagctgtgcccctgctggtgctgtgcatccaggagcctgagatcgccctgaagagaattgctgccagcgccctgagtgacatcgccaagcacagccctgagctggcccagacagtggtggatgctggagctgtggcccacctggcccagatgatcctgaacccagatgccaagctgaagcaccagatcctgagcgccctgagccaggtgtccaagcacagcgtggacctggccgagatggtggtggaggccgagatcttccctgtggtgctgacctgcctgaaggacaaggatgaatatgtgaagaagaatgccagcaccctcatccgggagatcgccaagcacaccccagagctgagccagctggtggtgaatgctgggggcgtggccgctgtgattgactgcatcggcagctgcaagggcaacacccggctgcccggcatcatgatgctgggctacgtggccgcccacagcgagaacctggccatggccgtcatcatcagcaaaggagtgccccagctgtctgtgtgcctgtctgaggagcctgaggaccacatcaaggctgctgctgcctgggccctgggccagatcggccgccacaccccagagcacgcccgggctgtggccgtgaccaacaccctgcctgtgctgctgagcctgtacatgagcacagagagcagcgaggacctgcaggtgaagagcaagaaggccatcaagaacatcctgcagaagtgcacctacctgcctgccctggagcccttcctgtatgatgccccacccaacatcctgaagcacgtggtgggccagttcagcaaggtgctgccccatgacagcaaggcccggcggctgtttgtgaccagcggcggcctgaagaaggtgcaggagatcaaggccgagcccggcagcctgctgcaggagtacatcaacagcatcaacagctgctacccagaggagatcgtgcgctactacagccctggctacagcgacaccctgctgcagagggtggacagctaccagcccctgaacaactag

SEQ ID NO: 171358 - DNA, 741 bp, synthetic construct
  misc_feature 1..741: note = Description of Artificial Sequence: Synthetic coding sequence
  source 1..741: mol_type = other DNA
atgagccagaggcaggtgctgcaggtgtttgagcagtaccagaaggcccggacccagtttgtgcagatggtggccgagctggccacccggccccagaacatcgagaccctgcagaatgctggggagcccggggcccggacccctgtggccccccgggccctgagcccccggcggctgcggcctgctgccctgcctgtggagctgctgggcagccgctctgtgggcaccggggtgaggaagagcatccacagcttccagagggtgtttggaggccaggccgagcgggtgaagctgcctgatggctgcggccgctgtgccctgagcctcttccccagcagcctgcacactggagtgatgagcctgctgcggaccctgctgctggatgtggtgcccaccatccagcagacagctgccctggccctgggccgcctggccaactacaatgatgacctggccgaggccgtggtgaagtgtgacatcctgccccagctggtgtacagcctggccgagcagaaccgcttctacaagaaggctgctgcctttgtgctgcgggctgtgggcaagcacagcccccagctggcccaggccatcgtggactgtggggccctggacaccctggtgatctgcctggaggactttgatcctggggtgaaggaggccgccgcctgggccctgcgctacatcgcccggcacaatgctgagctgagccaggccgtggtggatgctggagctgtgccctag

SEQ ID NO: 171359 - DNA, 576 bp, synthetic construct
  misc_feature 1..576: note = Description of Artificial Sequence: Synthetic coding sequence
  source 1..576: mol_type = other DNA
atgagccagaggcaggtgctgcaggtgtttgagcagtaccagaaggcccggacccagtttgtgcagatggtggccgagctggccacccggccccagaacatcgagaccctgcagaatgctggggtgatgagcctgctgcggaccctgctgctggatgtggtgcccaccatccagcagacagctgccctggccctgggccgcctggccaactacaatgatgacctggccgaggccgtggtgaagtgtgacatcctgccccagctggtgtacagcctggccgagcagaatggagtgccccagctgtctgtgtgcctgtctgaggagcctgaggaccacatcaaggctgctgctgcctgggccctgggccagatcggccgccacaccccagagcacgcccgggctgtggccgtgaccaacaccctgcctgtgctgctgagcctgtacatgagcacagagagcagcgaggacctgcaggtgaagagcaagaaggccatcaagaacatcctgcagaagtgcacctacctgcctgccctggagcccttcctgtatgatgccccacccaacatcctgaagtag

SEQ ID NO: 171360 - DNA, 1455 bp, synthetic construct
  misc_feature 1..1455: note = Description of Artificial Sequence: Synthetic coding sequence
  source 1..1455: mol_type = other DNA
atgcacagcctgaccatggacctgtggatccccaacggccaggccggcgtgatgagcctgctgcggaccctgctgctggatgtggtgcccaccatccagcagacagctgccctggccctgggccgcctggccaactacaatgatgacctggccgaggccgtggtgaagtgtgacatcctgccccagctggtgtacagcctggccgagcagaaccgcttctacaagaaggccgccgcctttgtgctgcgggctgtgggcaagcacagcccccagctggcccaggccatcgtggactgtggggccctggacaccctggtgatctgcctggaggactttgaccccggggtgaaggaggccgccgcctgggccctgcgctacatcgcccggcacaatgctgagctgagccaggccgtggtggatgctggagctgtgcccctgctggtgctgtgcatccaggagcctgagatcgccctgaagagaattgctgccagcgccctgagtgacatcgccaagcacagccctgagctggcccagacagtggtggatgctggagctgtggcccacctggcccagatgatcctgaacccagatgccaagctgaagcaccagatcctgagcgccctgagccaggtgtccaagcacagcgtggacctggccgagatggtggtggaggccgagatcttccctgtggtgctgacctgcctgaaggacaaggatgaatatgtgaagaagaatgccagcaccctcatccgggagatcgccaagcacaccccagagctgagccagctggtggtgaatgctgggggcgtggccgccgtcatcgactgcatcggcagctgcaagggcaacacccggctgcccggcatcatgatgctgggctacgtggccgcccacagcgagaacctggccatggctgtgatcatcagcaagggcgtgccccagctgtctgtgtgcctgtctgaggagcctgaggaccacatcaaggctgctgctgcctgggccctgggccagatcggccgccacaccccagagcacgcccgggctgtggccgtgaccaacaccctgcctgtgctgctgagcctgtacatgagcacagagagcagcgaggacctgcaggtgaagagcaagaaggccatcaagaacatcctgcagaagtgcacctacctgcctgccctggagcccttcctgtatgatgccccacccaacatcctgaagcacgtggtgggccagttcagcaaggtgctgccccatgacagcaaggcccggcggctgtttgtgaccagcggcggcctgaagaaggtgcaggagatcaaggccgagcccggcagcctgctgcaggagtacatcaacagcatcaacagctgctacccagaggagatcgtgcgctactacagccctggctacagcgacaccctgctgcagagggtggacagctaccagcccctgaacaactag

SEQ ID NO: 171361 - DNA, 1506 bp, synthetic construct
  misc_feature 1..1506: note = Description of Artificial Sequence: Synthetic coding sequence
  source 1..1506: mol_type = other DNA
atggagaccaatgaaagcacagagggcagccgcagccgcagccgcagcctggacatccagcccagcagcgagggcctgggccccaccagcgagcccttccccagcagtgatgacagccccaggtctgccctggccgccgccacagctgctgctgctgctgctgccagcgctgctgctgccacagctgccttcaccacagccaaggccgccgccctgagcaccaagaccccagccccctgcagcgagttcatggagcccagcagtgaccccagcctgctgggggagccctgtgccggccctggcttcacccacaacatcgcccacggcagcctgggctttgagcctgtgtatgtgtcctgcatcgcccaggacacctgcaccaccacagaccacagcagcaaccctggccctgtgcccggcagcagcagcggccctgtgctgggcagcagcagtggagctggccacggcagcggcagcggcagcggccctggctgcggctctgtgcccggcagcggcagcggccctggccctggcagcggccctggcagcggccctggccacggcagcggcagccaccctggccctgccagcggccctggccctgacaccggcccagattctgagctgagcccctgcatccccccaggcttcaggaacctggtggccgacagagtgcccaactacacctcctggagccagcactgcccctgggagccccagaagcagcccccctgggagttcctgcaggtgctggagcccggggcccggggcctgtggaagcccccagacatcaagggcaagctgatggtgtgctatgagaccctgccccggggccagtgcctgctgtacaactgggaggaggagcgggccaccaaccacctggaccaggtgcccagcatgcaggacggcagcgagagcttcttcttcagacatggccaccggggcctgctgaccatgcagctgaagagccccatgcccagcagcaccacccagaaggacagctaccagcccccaggaaatgtgtactggcccctgcggggcaagcgggaggccatgctggagatgctgctgcagcaccagatctgcaaggaggtgcaggccgagcaggagcccaccaggaagctgtttgaggtggagagcgtgacccaccacgactacaggatggagctggcccaggccggcaccccagcccccaccaagccccatgactaccggcaggagcagcctgagaccttctggatccagagggccccccagctgcccacctggtggcccctgcccacccaggtgcctgctgctgaggactacctgacctggaaggagtggggcttcaccggggtgcaggaggtgctgagcgccctgctgcgggccaccccaggagagtacagcgtgaacatctgtggcatgaatgagcaccctgtgtgcagcaggacctggaccaaccggctgtgccaccaggagatgggcagcaagaagacagtgacccaggaggaccggggctggtag

SEQ ID NO: 171362 - DNA, 1458 bp, synthetic construct
  misc_feature 1..1458: note = Description of Artificial Sequence: Synthetic coding sequence
  source 1..1458: mol_type = other DNA
atggagaccaatgaaagcacagagggcagccgcagccgcagccgcagcctggacatccagcccagcagcgagggcctgggccccaccagcgagcccttccccagcagtgatgacagccccaggtctgccctggccgccgccacagctgctgctgctgctgctgccagcgctgctgctgccacagctgccttcaccacagccaaggccgccgccctgagcaccaagaccccagccccctgcagcgagttcatggagcccagcagtgaccccagcctgctgggggagccctgtgccggccctggcttcacccacaacatcgcccacggcagcctgggctttgagcctgtgtatgtgtcctgcatcgcccaggacacctgcaccaccacagaccacagcagcaaccctggccctgtgcccggcagcagcagcggccctgtgctgggcagcagcagtggagctggccacggcagcggcagcggcagcggccctggctgcggctctgtgcccggcagcggcagcggccctggccctggcagcggccctggcagcggccctggccacggcagcggcagccaccctggccctgccagcggccctggccctgacaccggcccagattctgagctgagcccctgcatccccccaggcttcaggaacctggtggccgacagagtgcccaactacacctcctggagccagcactgcccctgggagccccagaagcagcccccctgggagttcctgcaggtgctggagcccggggcccggggcctgtggaagcccccagacatcaagggcaagctgatggtgtgctatgagaccctgccccggggccagtgcctgctgtacaactgggaggaggagcgggccaccaaccacctggaccaggtgcccagcatgcaggacggcagcgagagcttcttcttcagacatggccaccggggcctgctgaccatgcagctgaagagccccatgcccagcagcaccacccagaaggacagctaccagcccccaggaaatgtgtactggcccctgcggggcaagcgggaggccatgctggagatgctgctgcagcaccagatctgcaaggaggtgcaggccgagcaggagcccaccaggaagctgtttgaggtggagagcgtgacccaccacgactacaggatggagctggcccaggccggcaccccagcccccaccaagccccatgactaccggcaggagcagcctgagaccttctggatccagagggccccccagctgcccggggtgagcaacatccgcaccctggacacccccttcaggaagaactgcagcttcagcacccctgtgcccctgagcctgggcaagctgctgccctatgagcctgagaactacccctaccagctgggggagatcagcagcctgccctgccctgggggccgcctgggcggcggcggcggccgcatgacccccttctag

SEQ ID NO: 171363 - DNA, 1281 bp, synthetic construct
  misc_feature 1..1281: note = Description of Artificial Sequence: Synthetic coding sequence
  source 1..1281: mol_type = other DNA
atggagaccaatgaaagcacagagggcagccgcagccgcagccgcagcctggacatccagcccagcagcgagggcctgggccccaccagcgagcccttccccagcagtgatgacagccccaggtctgccctggccgccgccacagctgctgctgctgctgctgccagcgctgctgctgccacagctgccttcaccacagccaaggccgccgccctgagcaccaagaccccagccccctgcagcgagttcatggagcccagcagtgaccccagcctgctgggggagccctgtgccggccctggcttcacccacaacatcgcccacggcagcctgggctttgagcctgtgtatgtgtcctgcatcgcccaggacacctgcaccaccacagaccacagcagcaaccctggccctgtgcccggcagcagcagcggccctgtgctgggcagcagcagtggagctggccacggcagcggcagcggcagcggccctggctgcggctctgtgcccggcagcggcagcggccctggccctggcagcggccctggcagcggccctggccacggcagcggcagccaccctggccctgccagcggccctggccctgacaccggcccagattctgagctgagcccctgcatccccccaggcttcaggaacctggtggccgacagagtgcccaactacacctcctggagccagcactgcccctgggagccccagaagcagcccccctgggagttcctgcaggtgctggagcccggggcccggggcctgtggaagcccccagacatcaagggcaagctgatggtgtgctatgagaccctgccccggggccagtgcctgctgtacaactgggaggaggagcgggccaccaaccacctggaccaggtgcccagcatgcaggacggcagcgagagcttcttcttcagacatggccaccggggcctgctgaccatgcagctgaagagccccatgcccagcagcaccacccagaaggacagctaccagcccccaggaaatgtgtactggcccctgcggggcaagcgggaggccatgctggagatgctgctgcagcaccagatctgcaaggaggtgcaggccgagcaggagcccaccaggaagctgtttgaggtggagagcgtgacccaccacgactacaggatggagctggcccaggccggcaccccagcccccaccaagccccatgactaccggcaggagcagcctgagaccttctggatccagagggccccccagctgcctgtgtgtgagggggactag

SEQ ID NO: 171364 - DNA, 3966 bp, synthetic construct
  misc_feature 1..3966: note = Description of Artificial Sequence: Synthetic coding sequence
  source 1..3966: mol_type = other DNA
atggagctggaggatggagtggtgtaccaggaggagcccggcggcagcggggctgtgatgtctgagcgggtgtctggcctggccggcagcatctaccgggagtttgagcggctgattggccgctatgatgaggaggtggtgaaggagctgatgcccctggtggtggccgtgctggagaacctggacagcgtgtttgcccaggaccaggagcaccaggtggagctggagctgctgagagatgacaatgagcagctgatcacccagtatgagcgggagaaggccctgaggaagcatgctgaggagaagttcatcgagtttgaggacagccaggagcaggagaagaaggacctgcagaccagggtggagagcctggagagccagacccggcagctggagctgaaggccaagaactatgctgaccagatcagccggctggaggagcgggaggccgagctgaagaaggagtacaatgccctgcaccagaggcacacagagatgatccacaactacatggagcacctggagaggaccaagctgcaccagctgagcggcagtgaccagctggagagcacagcccacagccgcatcaggaaggagcggcccatcagcctgggcatcttccccctgcctgctggagatggcctgctgaccccagatgcccagaagggcggggagaccccaggcagcgagcagtggaagttccaggagctgagccagcccaggagccacaccagcctgaaggtgagcaacagccctgagccccagaaggctgtggagcaggaggatgagctgagtgatgtgtcccagggcggcagcaaggccaccaccccagccagcacagccaacagtgatgtggccaccatccccacagacacccccctgaaggaggagaatgaaggatttgtgaaggtgacagatgcccccaacaagtctgagatcagcaagcacatcgaggtgcaggtggcccaggagaccagaaatgtgtccacaggcagcgcagaaaatgaggagaagtctgaggtgcaggccatcatcgagagcaccccagagctggacatggacaaggacctgagcggctacaagggcagcagcacccccaccaagggcatcgagaacaaggcctttgacaggaacacagagagcctgtttgaggagctgagcagcgctggcagcggcctgattggagatgtggatgagggcgctgacctgctgggcatgggccgggaggtggagaacctgatcctggagaacacccagctgctggagaccaagaatgccctgaacatcgtgaagaatgacctgattgccaaggtggatgagctgacctgtgagaaggatgtgctgcagggcgagctggaggccgtgaagcaggccaagctgaagctggaggagaagaaccgggagctggaggaggagctgaggaaggcccgggcagaggctgaagatgcccggcagaaggccaaggatgatgatgacagcgacatccccacagcccagaggaagcgcttcaccagggtggagatggcccgggtgctgatggagaggaaccagtacaaggagcggctgatggagctgcaggaggccgtgcgctggacagagatgatccgggccagccgggagaacccagccatgcaggagaagaagaggagcagcatctggcagttcttcagccgcctcttcagcagcagcagcaacaccaccaagaagccagagccccctgtgaacctgaagtacaatgcccccaccagccacgtgacccccagcgtgaagaagaggagcagcaccctgagccagctgcccggggacaagagcaaggcctttgacttcctgtctgaggagacagaggccagcctggccagcagaagagagcagaagcgggagcagtaccggcaggtgaaggcccacgtgcagaaggaggatggccgggtgcaggccttcggctggagcctgccccagaagtacaagcaggtgaccaacggccagggcgagaacaagatgaagaacctgcctgtgcctgtgtacctgcggcccctggatgagaaggacacctccatgaagctgtggtgtgctgtgggcgtgaacctgagcggcggcaagaccagagatggcggctctgtggtgggcgccagcgtcttctacaaggatgtggccggcctggacacagagggcagcaagcagaggtctgccagccagagcagcctggacaagctggaccaggagctgaaggagcagcagaaggagctgaagaaccaggaggagctgagcagcctggtgtggatctgcaccagcacccacagcgccaccaaggtgctgatcattgatgctgtgcagcccggcaacatcctggacagcttcaccgtgtgcaacagccacgtgctgtgcatcgcctctgtgcctggggcccgggagacagactacccagctggggaggacctgtctgagagcggccaggtggacaaggccagcctgtgtggctccatgaccagcaacagcagcgctgagacagacagcctgctgggcggcatcaccgtggtgggctgcagcgctgagggcgtgactggagctgccaccagccccagcaccaacggggccagccctgtgatggacaagcccccagagatggaggctgaaaattctgaggtggatgaaaatgtgcccacagctgaggaggccacagaggccacagagggcaatgccggcagcgcagaagatactgtggacatcagccagacaggagtgtacacagaacatgtgttcacagaccccctgggcgtgcagatccctgaggacctgagccctgtgtaccagagcagcaatgacagtgatgcctacaaggaccagatctctgtgctgcccaatgagcaggacctggtgcgggaggaggcccagaagatgagcagcctgctgcccaccatgtggctgggcgcccagaatggctgcctgtatgtgcacagctctgtggcccagtggaggaagtgcctgcacagcatcaagctgaaggacagcatcctgagcatcgtgcacgtgaagggcatcgtgctggtggccctggctgatggcaccctggccatcttccaccggggcgtggatggccagtgggacctgagcaactaccacctgctggacctgggccggccccaccacagcatccgctgcatgacagtggtgcatgacaaggtgtggtgtggctacagaaacaagatctacgtggtgcagcccaaggccatgaagattgagaagagctttgatgcccaccccaggaaggagagccaggtgcggcagctggcctgggtgggagatggagtgtgggtgtccatccggctggacagcaccctgcggctgtaccacgcccacacctaccagcacctgcaggatgtggacatcgagccctacgtgtccaagatgctgggcaccgggaagctgggcttctcctttgtgcgcatcacagccctgatggtgtcctgcaaccggctgtgggtgggcactggaaatggagtcatcatcagcatccccctgacagagaccaacaagaccagcggcgtgcccggcaaccggcccggcagcgtcatccgggtgtatggagatgagaacagcgacaaggtgaccccaggcaccttcatcccctactgcagcatggcccacgcccagctgtgcttccacggccacagagatgctgtgaagttctttgtggccgtgcccggccaggtgatcagcccccagagcagcagcagcggcacagacctgactggagacaaggccggccccagcgcccaggagcccggcagccagacccccctgaagtccatgctggtgatctctggaggagagggctacatcgacttcaggatgggagatgaaggaggagagagcgagctgctgggggaggacctgcccctggagcccagcgtgaccaaggccgagaggagccacctgattgtgtggcaggtgatgtatggaaatgaatag

SEQ ID NO: 171365 - DNA, 3924 bp, synthetic construct
  misc_feature 1..3924: note = Description of Artificial Sequence: Synthetic coding sequence
  source 1..3924: mol_type = other DNA
atggagctggaggatggagtggtgtaccaggaggagcccggcggcagcggggctgtgatgtctgagcgggtgtctggcctggccggcagcatctaccgggagtttgagcggctgattggccgctatgatgaggaggtggtgaaggagctgatgcccctggtggtggccgtgctggagaacctggacagcgtgtttgcccaggaccaggagcaccaggtggagctggagctgctgagagatgacaatgagcagctgatcacccagtatgagcgggagaaggccctgaggaagcatgctgaggagaagttcatcgagtttgaggacagccaggagcaggagaagaaggacctgcagaccagggtggagagcctggagagccagacccggcagctggagctgaaggccaagaactatgctgaccagatcagccggctggaggagcgggaggccgagctgaagaaggagtacaatgccctgcaccagaggcacacagagatgatccacaactacatggagcacctggagaggaccaagctgcaccagctgagcggcagtgaccagctggagagcacagcccacagccgcatcaggaaggagcggcccatcagcctgggcatcttccccctgcctgctggagatggcctgctgaccccagatgcccagaagggcggggagaccccaggcagcgagcagtggaagttccaggagctgagccagcccaggagccacaccagcctgaaggatgagctgagtgatgtgtcccagggcggcagcaaggccaccaccccagccagcacagccaacagtgatgtggccaccatccccacagacacccccctgaaggaggagaatgaaggatttgtgaaggtgacagatgcccccaacaagtctgagatcagcaagcacatcgaggtgcaggtggcccaggagaccagaaatgtgtccacaggcagcgcagaaaatgaggagaagtctgaggtgcaggccatcatcgagagcaccccagagctggacatggacaaggacctgagcggctacaagggcagcagcacccccaccaagggcatcgagaacaaggcctttgacaggaacacagagagcctgtttgaggagctgagcagcgctggcagcggcctgattggagatgtggatgagggcgctgacctgctgggcatgggccgggaggtggagaacctgatcctggagaacacccagctgctggagaccaagaatgccctgaacatcgtgaagaatgacctgattgccaaggtggatgagctgacctgtgagaaggatgtgctgcagggcgagctggaggccgtgaagcaggccaagctgaagctggaggagaagaaccgggagctggaggaggagctgaggaaggcccgggcagaggctgaagatgcccggcagaaggccaaggatgatgatgacagcgacatccccacagcccagaggaagcgcttcaccagggtggagatggcccgggtgctgatggagaggaaccagtacaaggagcggctgatggagctgcaggaggccgtgcgctggacagagatgatccgggccagccgggagaacccagccatgcaggagaagaagaggagcagcatctggcagttcttcagccgcctcttcagcagcagcagcaacaccaccaagaagccagagccccctgtgaacctgaagtacaatgcccccaccagccacgtgacccccagcgtgaagaagaggagcagcaccctgagccagctgcccggggacaagagcaaggcctttgacttcctgtctgaggagacagaggccagcctggccagcagaagagagcagaagcgggagcagtaccggcaggtgaaggcccacgtgcagaaggaggatggccgggtgcaggccttcggctggagcctgccccagaagtacaagcaggtgaccaacggccagggcgagaacaagatgaagaacctgcctgtgcctgtgtacctgcggcccctggatgagaaggacacctccatgaagctgtggtgtgctgtgggcgtgaacctgagcggcggcaagaccagagatggcggctctgtggtgggcgccagcgtcttctacaaggatgtggccggcctggacacagagggcagcaagcagaggtctgccagccagagcagcctggacaagctggaccaggagctgaaggagcagcagaaggagctgaagaaccaggaggagctgagcagcctggtgtggatctgcaccagcacccacagcgccaccaaggtgctgatcattgatgctgtgcagcccggcaacatcctggacagcttcaccgtgtgcaacagccacgtgctgtgcatcgcctctgtgcctggggcccgggagacagactacccagctggggaggacctgtctgagagcggccaggtggacaaggccagcctgtgtggctccatgaccagcaacagcagcgctgagacagacagcctgctgggcggcatcaccgtggtgggctgcagcgctgagggcgtgactggagctgccaccagccccagcaccaacggggccagccctgtgatggacaagcccccagagatggaggctgaaaattctgaggtggatgaaaatgtgcccacagctgaggaggccacagaggccacagagggcaatgccggcagcgcagaagatactgtggacatcagccagacaggagtgtacacagaacatgtgttcacagaccccctgggcgtgcagatccctgaggacctgagccctgtgtaccagagcagcaatgacagtgatgcctacaaggaccagatctctgtgctgcccaatgagcaggacctggtgcgggaggaggcccagaagatgagcagcctgctgcccaccatgtggctgggcgcccagaatggctgcctgtatgtgcacagctctgtggcccagtggaggaagtgcctgcacagcatcaagctgaaggacagcatcctgagcatcgtgcacgtgaagggcatcgtgctggtggccctggctgatggcaccctggccatcttccaccggggcgtggatggccagtgggacctgagcaactaccacctgctggacctgggccggccccaccacagcatccgctgcatgacagtggtgcatgacaaggtgtggtgtggctacagaaacaagatctacgtggtgcagcccaaggccatgaagattgagaagagctttgatgcccaccccaggaaggagagccaggtgcggcagctggcctgggtgggagatggagtgtgggtgtccatccggctggacagcaccctgcggctgtaccacgcccacacctaccagcacctgcaggatgtggacatcgagccctacgtgtccaagatgctgggcaccgggaagctgggcttctcctttgtgcgcatcacagccctgatggtgtcctgcaaccggctgtgggtgggcactggaaatggagtcatcatcagcatccccctgacagagaccaacaagaccagcggcgtgcccggcaaccggcccggcagcgtcatccgggtgtatggagatgagaacagcgacaaggtgaccccaggcaccttcatcccctactgcagcatggcccacgcccagctgtgcttccacggccacagagatgctgtgaagttctttgtggccgtgcccggccaggtgatcagcccccagagcagcagcagcggcacagacctgactggagacaaggccggccccagcgcccaggagcccggcagccagacccccctgaagtccatgctggtgatctctggaggagagggctacatcgacttcaggatgggagatgaaggaggagagagcgagctgctgggggaggacctgcccctggagcccagcgtgaccaaggccgagaggagccacctgattgtgtggcaggtgatgtatggaaatgaatag

SEQ ID NO: 171366 - DNA, 1908 bp, synthetic construct
  misc_feature 1..1908: note = Description of Artificial Sequence: Synthetic coding sequence
  source 1..1908: mol_type = other DNA
agcctgaaggatgagctgagtgatgtgtcccagggcggcagcaaggccaccaccccagccagcacagccaacagtgatgtggccaccatccccacagacacccccctgaaggaggagaatgaaggatttgtgaaggtgacagatgcccccaacaagtctgagatcagcaagcacatcgaggtgcaggtggcccaggagaccagaaatgtgtccacaggcagcgcagaaaatgaggagaagtctgaggtgcaggccatcatcgagagcaccccagagctggacatggacaaggacctgagcggctacaagggcagcagcacccccaccaagggcatcgagaacaaggcctttgacaggaacacagagagcctgtttgagaagaggagcagcaccctgagccagctgcccggggacaagagcaaggcctttgacttcctgtctgaggagacagaggccagcctggccagcagaagagagcagaagcgggagcagtaccggcaggtgaaggcccacgtgcagaaggaggatggccgggtgcaggccttcggctggagcctgccccagaagtacaagcaggtgaccaacggccagggcgagaacaagatgaagaacctgcctgtgcctgtgtacctgcggcccctggatgagaaggacacctccatgaagaagctgtggtgtgctgtgggcgtgaacctgagcggcggcaagaccagagatggcggctctgtggtgggcgcctctgtgttctacaaggatgtggccggcctggacacagagggcagcaagcagaggtctgccagccagagcagcctggacaagctggaccaggagctgaaggagcagcagaaggagctgaagaaccaggaggagctgagcagcctggtgtggatctgcaccagcacccacagcgccaccaaggtgctgatcattgatgctgtgcagcccggcaacatcctggacagcttcaccgtgtgcaacagccacgtgctgtgcatcgcctctgtgcctggggcccgggagacagactacccagctggggaggacctgtctgagagcggccaggtggacaaggccagcctgtgtggctccatgaccagcaacagcagcgctgagacagacagcctgctgggcggcatcaccgtggtgggctgcagcgctgagggcgtgactggagctgccaccagccccagcaccaatggagccagccctgtgatggacaagcccccagagatggaggccgagaacagcgaggtggatgaaaatgtgcccacagctgaggaggccacagaggccacagagggcaatgccggcagcgctgaggacacagtggacatcagccagacaggagtgtacacagagcacgtgttcacagaccccctgggcgtgcagatccctgaggacctgagccctgtgtaccagagcagcaatgacagtgatgcctacaaggaccagatctctgtgctgcccaatgagcaggacctggtgcgggaggaggcccagaagatgagcagcctgctgcccaccatgtggctgggcgcccagaatggctgcctgtatgtgcacagctctgtggcccagtggaggaagtgcctgcacagcatcaagctgaaggacagcatcctgagcatcgtgcacgtgaagggcatcgtgctggtggccctggctgatggcaccctggccatcttccacagaggagtggatggccagtgggacctgagcaactaccacctgctggacctgggccggccccaccacagcatccgctgcatgacagtggtgcatgacaaggtgtggtgtggctacagaaacaagatctacgtgctgcacagcagcctgggagatggagcccggccctgcctgaagacagacaagcaggccaagaaccggctgaagagcggcttccactag

SEQ ID NO: 171367 - DNA, 3207 bp, synthetic construct
  misc_feature 1..3207: note = Description of Artificial Sequence: Synthetic coding sequence
  source 1..3207: mol_type = other DNA
agcctgaaggatgagctgagtgatgtgtcccagggcggcagcaaggccaccaccccagccagcacagccaacagtgatgtggccaccatccccacagacacccccctgaaggaggagaatgaaggatttgtgaaggtgacagatgcccccaacaagtctgagatcagcaagcacatcgaggtgcaggtggcccaggagaccagaaatgtgtccacaggcagcgcagaaaatgaggagaagtctgaggtgcaggccatcatcgagagcaccccagagctggacatggacaaggacctgagcggctacaagggcagcagcacccccaccaagggcatcgagaacaaggcctttgacaggaacacagagagcctgtttgaggagctgagcagcgctggcagcggcctgattggagatgtggatgagggcgctgacctgctgggcatgggccgggaggtggagaacctgatcctggagaacacccagctgctggagaccaagaatgccctgaacatcgtgaagaatgacctgattgccaaggtggatgagctgacctgtgagaaggatgtgctgcagggcgagctggaggccgtgaagcaggccaagctgaagctggaggagaagaaccgggagctggaggaggagctgaggaaggcccgggcagaggctgaagatgcccggcagaaggccaaggatgatgatgacagcgacatccccacagcccagaggaagcgcttcaccagggtggagatggcccgggtgctgatggagaggaaccagtacaaggagcggctgatggagctgcaggaggccgtgcgctggacagagatgatccgggccagccgggagaacccagccatgcaggagaagaagaggagcagcatctggcagtttgtgcccacccgcttcagccgcctcttcagcagcagcagcaacaccaccaagaagccagagccccctgtgaacctgaagtacaatgcccccaccagccacgtgacccccagcgtgaagaagaggagcagcaccctgagccagctgcccggggacaagagcaaggcctttgacttcctgtctgaggagacagaggccagcctggccagcagaagagagcagaagcgggagcagtaccggcaggtgaaggcccacgtgcagaaggaggatggccgggtgcaggccttcggctggagcctgccccagaagtacaagcaggtgaccaacggccagggcgagaacaagatgaagaacctgcctgtgcctgtgtacctgcggcccctggatgagaaggacacctccatgaagaagctgtggtgtgctgtgggcgtgaacctgagcggcggcaagaccagagatggcggctctgtggtgggcgcctctgtgttctacaaggatgtggccggcctggacacagagggcagcaagcagaggtctgccagccagagcagcctggacaagctggaccaggagctgaaggagcagcagaaggagctgaagaaccaggaggagctgagcagcctggtgtggatctgcaccagcacccacagcgccaccaaggtgctgatcattgatgctgtgcagcccggcaacatcctggacagcttcaccgtgtgcaacagccacgtgctgtgcatcgcctctgtgcctggggcccgggagacagactacccagctggggaggacctgtctgagagcggccaggtggacaaggccagcctgtgtggctccatgaccagcaacagcagcgctgagacagacagcctgctgggcggcatcaccgtggtgggctgcagcgctgagggcgtgactggagctgccaccagccccagcaccaatggagccagccctgtgatggacaagcccccagagatggaggccgagaacagcgaggtggatgaaaatgtgcccacagctgaggaggccacagaggccacagagggcaatgccggcagcgctgaggacacagtggacatcagccagacaggagtgtacacagagcacgtgttcacagaccccctgggcgtgcagatccctgaggacctgagccctgtgtaccagagcagcaatgacagtgatgcctacaaggaccagatctctgtgctgcccaatgagcaggacctggtgcgggaggaggcccagaagatgagcagcctgctgcccaccatgtggctgggcgcccagaatggctgcctgtatgtgcacagctctgtggcccagtggaggaagtgcctgcacagcatcaagctgaaggacagcatcctgagcatcgtgcacgtgaagggcatcgtgctggtggccctggctgatggcaccctggccatcttccacagaggagtggatggccagtgggacctgagcaactaccacctgctggacctgggccggccccaccacagcatccgctgcatgacagtggtgcatgacaaggtgtggtgtggctacagaaacaagatctacgtggtgcagcccaaggccatgaagattgagaagagctttgatgcccaccccaggaaggagagccaggtgcggcagctggcctgggtgggagatggagtgtgggtgtccatccggctggacagcaccctgcggctgtaccacgcccacacctaccagcacctgcaggatgtggacatcgagccctacgtgtccaagatgctgggcaccgggaagctgggcttctcctttgtgcgcatcacagccctgatggtgtcctgcaaccggctgtgggtgggcactggaaatggagtcatcatcagcatccccctgacagagaccaacaagaccagcggcgtgcccggcaacagacctggcagcgtcatccgggtgtatggagatgaaaattctgacaaggtgaccccaggcaccttcatcccctactgcagcatggcccacgcccagctgtgcttccacggccacagagatgctgtgaagttctttgtggccgtgcccggccaggtgatcagcccccagagcagcagcagcggcacagacctgaccggggacaaggccggccccagcgcccaggagcccggcagccagacccccctgaagtccatgctggtgatcagcggcggggagggctacatcgacttcaggatgggagatgagggcggggagagcgagctgctgggggaggacctgcccctggagcccagcgtgaccaaggccgagaggagccacctgattgtgtggcaggtgatgtatggaaatgaatag

SEQ ID NO: 171368 - DNA, 3237 bp, synthetic construct
  misc_feature 1..3237: note = Description of Artificial Sequence: Synthetic coding sequence
  source 1..3237: mol_type = other DNA
tctgtgaaggtgagcaacagccctgagccccagaaggctgtggagcaggaggatgagctgagtgatgtgtcccagggcggcagcaaggccaccaccccagccagcacagccaacagtgatgtggccaccatccccacagacacccccctgaaggaggagaatgaaggatttgtgaaggtgacagatgcccccaacaagtctgagatcagcaagcacatcgaggtgcaggtggcccaggagaccagaaatgtgtccacaggcagcgcagaaaatgaggagaagtctgaggtgcaggccatcatcgagagcaccccagagctggacatggacaaggacctgagcggctacaagggcagcagcacccccaccaagggcatcgagaacaaggcctttgacaggaacacagagagcctgtttgaggagctgagcagcgctggcagcggcctgattggagatgtggatgagggcgctgacctgctgggcatgggccgggaggtggagaacctgatcctggagaacacccagctgctggagaccaagaatgccctgaacatcgtgaagaatgacctgattgccaaggtggatgagctgacctgtgagaaggatgtgctgcagggcgagctggaggccgtgaagcaggccaagctgaagctggaggagaagaaccgggagctggaggaggagctgaggaaggcccgggcagaggctgaagatgcccggcagaaggccaaggatgatgatgacagcgacatccccacagcccagaggaagcgcttcaccagggtggagatggcccgggtgctgatggagaggaaccagtacaaggagcggctgatggagctgcaggaggccgtgcgctggacagagatgatccgggccagccgggagaacccagccatgcaggagaagaagaggagcagcatctggcagttcttcagccgcctcttcagcagcagcagcaacaccaccaagaagccagagccccctgtgaacctgaagtacaatgcccccaccagccacgtgacccccagcgtgaagaagaggagcagcaccctgagccagctgcccggggacaagagcaaggcctttgacttcctgtctgaggagacagaggccagcctggccagcagaagagagcagaagcgggagcagtaccggcaggtgaaggcccacgtgcagaaggaggatggccgggtgcaggccttcggctggagcctgccccagaagtacaagcaggtgaccaacggccagggcgagaacaagatgaagaacctgcctgtgcctgtgtacctgcggcccctggatgagaaggacacctccatgaagaagctgtggtgtgctgtgggcgtgaacctgagcggcggcaagaccagagatggcggctctgtggtgggcgcctctgtgttctacaaggatgtggccggcctggacacagagggcagcaagcagaggtctgccagccagagcagcctggacaagctggaccaggagctgaaggagcagcagaaggagctgaagaaccaggaggagctgagcagcctggtgtggatctgcaccagcacccacagcgccaccaaggtgctgatcattgatgctgtgcagcccggcaacatcctggacagcttcaccgtgtgcaacagccacgtgctgtgcatcgcctctgtgcctggggcccgggagacagactacccagctggggaggacctgtctgagagcggccaggtggacaaggccagcctgtgtggctccatgaccagcaacagcagcgctgagacagacagcctgctgggcggcatcaccgtggtgggctgcagcgctgagggcgtgactggagctgccaccagccccagcaccaatggagccagccctgtgatggacaagcccccagagatggaggccgagaacagcgaggtggatgaaaatgtgcccacagctgaggaggccacagaggccacagagggcaatgccggcagcgctgaggacacagtggacatcagccagacaggagtgtacacagagcacgtgttcacagaccccctgggcgtgcagatccctgaggacctgagccctgtgtaccagagcagcaatgacagtgatgcctacaaggaccagatctctgtgctgcccaatgagcaggacctggtgcgggaggaggcccagaagatgagcagcctgctgcccaccatgtggctgggcgcccagaatggctgcctgtatgtgcacagctctgtggcccagtggaggaagtgcctgcacagcatcaagctgaaggacagcatcctgagcatcgtgcacgtgaagggcatcgtgctggtggccctggctgatggcaccctggccatcttccacagaggagtggatggccagtgggacctgagcaactaccacctgctggacctgggccggccccaccacagcatccgctgcatgacagtggtgcatgacaaggtgtggtgtggctacagaaacaagatctacgtggtgcagcccaaggccatgaagattgagaagagctttgatgcccaccccaggaaggagagccaggtgcggcagctggcctgggtgggagatggagtgtgggtgtccatccggctggacagcaccctgcggctgtaccacgcccacacctaccagcacctgcaggatgtggacatcgagccctacgtgtccaagatgctgggcaccgggaagctgggcttctcctttgtgcgcatcacagccctgatggtgtcctgcaaccggctgtgggtgggcactggaaatggagtcatcatcagcatccccctgacagagaccaacaagaccagcggcgtgcccggcaacagacctggcagcgtcatccgggtgtatggagatgaaaattctgacaaggtgaccccaggcaccttcatcccctactgcagcatggcccacgcccagctgtgcttccacggccacagagatgctgtgaagttctttgtggccgtgcccggccaggtgatcagcccccagagcagcagcagcggcacagacctgaccggggacaaggccggccccagcgcccaggagcccggcagccagacccccctgaagtccatgctggtgatcagcggcggggagggctacatcgacttcaggatgggagatgagggcggggagagcgagctgctgggggaggacctgcccctggagcccagcgtgaccaaggccgagaggagccacctgattgtgtggcaggtgatgtatggaaatgaatag

SEQ ID NO: 171369 - DNA, 3936 bp, synthetic construct
  misc_feature 1..3936: note = Description of Artificial Sequence: Synthetic coding sequence
  source 1..3936: mol_type = other DNA
atggagctggaggatggagtggtgtaccaggaggagcccggcggcagcggggctgtgatgtctgagcgggtgtctggcctggccggcagcatctaccgggagtttgagcggctgattggccgctatgatgaggaggtggtgaaggagctgatgcccctggtggtggccgtgctggagaacctggacagcgtgtttgcccaggaccaggagcaccaggtggagctggagctgctgagagatgacaatgagcagctgatcacccagtatgagcgggagaaggccctgaggaagcatgctgaggagaagttcatcgagtttgaggacagccaggagcaggagaagaaggacctgcagaccagggtggagagcctggagagccagacccggcagctggagctgaaggccaagaactatgctgaccagatcagccggctggaggagcgggaggccgagctgaagaaggagtacaatgccctgcaccagaggcacacagagatgatccacaactacatggagcacctggagaggaccaagctgcaccagctgagcggcagtgaccagctggagagcacagcccacagccgcatcaggaaggagcggcccatcagcctgggcatcttccccctgcctgctggagatggcctgctgaccccagatgcccagaagggcggggagaccccaggcagcgagcagtggaagttccaggagctgagccagcccaggagccacaccagcctgaaggatgagctgagtgatgtgtcccagggcggcagcaaggccaccaccccagccagcacagccaacagtgatgtggccaccatccccacagacacccccctgaaggaggagaatgaaggatttgtgaaggtgacagatgcccccaacaagtctgagatcagcaagcacatcgaggtgcaggtggcccaggagaccagaaatgtgtccacaggcagcgcagaaaatgaggagaagtctgaggtgcaggccatcatcgagagcaccccagagctggacatggacaaggacctgagcggctacaagggcagcagcacccccaccaagggcatcgagaacaaggcctttgacaggaacacagagagcctgtttgaggagctgagcagcgctggcagcggcctgattggagatgtggatgagggcgctgacctgctgggcatgggccgggaggtggagaacctgatcctggagaacacccagctgctggagaccaagaatgccctgaacatcgtgaagaatgacctgattgccaaggtggatgagctgacctgtgagaaggatgtgctgcagggcgagctggaggccgtgaagcaggccaagctgaagctggaggagaagaaccgggagctggaggaggagctgaggaaggcccgggcagaggctgaagatgcccggcagaaggccaaggatgatgatgacagcgacatccccacagcccagaggaagcgcttcaccagggtggagatggcccgggtgctgatggagaggaaccagtacaaggagcggctgatggagctgcaggaggccgtgcgctggacagagatgatccgggccagccgggagaacccagccatgcaggagaagaagaggagcagcatctggcagtttgtgcccacccgcttcagccgcctcttcagcagcagcagcaacaccaccaagaagccagagccccctgtgaacctgaagtacaatgcccccaccagccacgtgacccccagcgtgaagaagaggagcagcaccctgagccagctgcccggggacaagagcaaggcctttgacttcctgtctgaggagacagaggccagcctggccagcagaagagagcagaagcgggagcagtaccggcaggtgaaggcccacgtgcagaaggaggatggccgggtgcaggccttcggctggagcctgccccagaagtacaagcaggtgaccaacggccagggcgagaacaagatgaagaacctgcctgtgcctgtgtacctgcggcccctggatgagaaggacacctccatgaagctgtggtgtgctgtgggcgtgaacctgagcggcggcaagaccagagatggcggctctgtggtgggcgccagcgtcttctacaaggatgtggccggcctggacacagagggcagcaagcagaggtctgccagccagagcagcctggacaagctggaccaggagctgaaggagcagcagaaggagctgaagaaccaggaggagctgagcagcctggtgtggatctgcaccagcacccacagcgccaccaaggtgctgatcattgatgctgtgcagcccggcaacatcctggacagcttcaccgtgtgcaacagccacgtgctgtgcatcgcctctgtgcctggggcccgggagacagactacccagctggggaggacctgtctgagagcggccaggtggacaaggccagcctgtgtggctccatgaccagcaacagcagcgctgagacagacagcctgctgggcggcatcaccgtggtgggctgcagcgctgagggcgtgactggagctgccaccagccccagcaccaacggggccagccctgtgatggacaagcccccagagatggaggctgaaaattctgaggtggatgaaaatgtgcccacagctgaggaggccacagaggccacagagggcaatgccggcagcgcagaagatactgtggacatcagccagacaggagtgtacacagaacatgtgttcacagaccccctgggcgtgcagatccctgaggacctgagccctgtgtaccagagcagcaatgacagtgatgcctacaaggaccagatctctgtgctgcccaatgagcaggacctggtgcgggaggaggcccagaagatgagcagcctgctgcccaccatgtggctgggcgcccagaatggctgcctgtatgtgcacagctctgtggcccagtggaggaagtgcctgcacagcatcaagctgaaggacagcatcctgagcatcgtgcacgtgaagggcatcgtgctggtggccctggctgatggcaccctggccatcttccaccggggcgtggatggccagtgggacctgagcaactaccacctgctggacctgggccggccccaccacagcatccgctgcatgacagtggtgcatgacaaggtgtggtgtggctacagaaacaagatctacgtggtgcagcccaaggccatgaagattgagaagagctttgatgcccaccccaggaaggagagccaggtgcggcagctggcctgggtgggagatggagtgtgggtgtccatccggctggacagcaccctgcggctgtaccacgcccacacctaccagcacctgcaggatgtggacatcgagccctacgtgtccaagatgctgggcaccgggaagctgggcttctcctttgtgcgcatcacagccctgatggtgtcctgcaaccggctgtgggtgggcactggaaatggagtcatcatcagcatccccctgacagagaccaacaagaccagcggcgtgcccggcaaccggcccggcagcgtcatccgggtgtatggagatgagaacagcgacaaggtgaccccaggcaccttcatcccctactgcagcatggcccacgcccagctgtgcttccacggccacagagatgctgtgaagttctttgtggccgtgcccggccaggtgatcagcccccagagcagcagcagcggcacagacctgactggagacaaggccggccccagcgcccaggagcccggcagccagacccccctgaagtccatgctggtgatctctggaggagagggctacatcgacttcaggatgggagatgaaggaggagagagcgagctgctgggggaggacctgcccctggagcccagcgtgaccaaggccgagaggagccacctgattgtgtggcaggtgatgtatggaaatgaatag

SEQ ID NO: 171370 - DNA, 3534 bp, synthetic construct
  misc_feature 1..3534: note = Description of Artificial Sequence: Synthetic coding sequence
  source 1..3534: mol_type = other DNA
atgagccctggctgcatgctgctgtttgtgtttggatttgtgggcggcgctgtggtgatcaacagcgccatcctggtgtccctgtctgtgctgctgctggtgcacttcagcatcagcactggagtgcctgccctgacccagaacctgccccgcatcctgaggaaggagcggcccatcagcctgggcatcttccccctgcctgctggagatggcctgctgaccccagatgcccagaagggcggggagaccccaggcagcgagcagtggaagttccaggagctgagccagcccaggagccacaccagcctgaaggatgagctgagtgatgtgtcccagggcggcagcaaggccaccaccccagccagcacagccaacagtgatgtggccaccatccccacagacacccccctgaaggaggagaatgaaggatttgtgaaggtgacagatgcccccaacaagtctgagatcagcaagcacatcgaggtgcaggtggcccaggagaccagaaatgtgtccactggatctgcagaaaatgaggagaagtctgaggtgcaggccatcatcgagagcaccccagagctggacatggacaaggacctgagcggctacaagggcagcagcacccccaccaagggcatcgagaacaaggcctttgacaggaacacagagagcctgtttgaggagctgagcagcgctggcagcggcctgattggagatgtggatgaaggagctgacctgctgggcatgggccgggaggtggagaacctgatcctggagaacacccagctgctggagaccaagaatgccctgaacatcgtgaagaatgacctgattgccaaggtggatgagctgacctgtgagaaggatgtgctgcagggcgagctggaggccgtgaagcaggccaagctgaagctggaggagaagaaccgggagctggaggaggagctgaggaaggcccgggcagaggccgaggatgcccggcagaaggccaaggatgatgatgacagcgacatccccacagcccagaggaagcgcttcaccagggtggagatggcccgggtgctgatggagaggaaccagtacaaggagcggctgatggagctgcaggaggccgtgcgctggacagagatgatccgggccagcagagaaaatcctgccatgcaggagaagaagaggagcagcatctggcagttcttcagccgcctcttcagcagcagcagcaacaccaccaagaagccagagccccctgtgaacctgaagtacaatgcccccaccagccacgtgaccccatctgtgaagaagaggagcagcaccctgagccagctgcccggggacaagagcaaggcctttgacttcctgtctgaggagacagaggccagcctggccagccggcgggagcagaagcgggagcagtaccggcaggtgaaggcccacgtgcagaaggaggatggccgggtgcaggccttcggctggagcctgccccagaagtacaagcaggtgaccaacggccagggcgagaacaagatgaagaacctgcctgtgcctgtgtacctgcggcccctggatgagaaggacacctccatgaagctgtggtgtgctgtgggcgtgaacctgagcggcggcaagaccagagatggcggctctgtggtgggcgcctctgtgttctacaaggatgtggccggcctggacacagagggcagcaagcagaggtctgccagccagagcagcctggacaagctggaccaggagctgaaggagcagcagaaggagctgaagaaccaggaggagctgagcagcctggtgtggatctgcaccagcacccacagcgccaccaaggtgctgatcattgatgctgtgcagcccggcaacatcctggacagcttcaccgtgtgcaacagccacgtgctgtgcatcgcctctgtgcctggggcccgggagacagactacccagctggggaggacctgtctgagagcggccaggtggacaaggccagcctgtgtggctccatgaccagcaacagcagcgctgagacagacagcctgctgggcggcatcaccgtggtgggctgcagcgctgagggcgtgactggagctgccaccagccccagcaccaatggagccagccctgtgatggacaagcccccagagatggaggccgagaacagcgaggtggatgaaaatgtgcccacagctgaggaggccacagaggccacagagggcaatgccggcagcgctgaggacacagtggacatcagccagacaggagtgtacacagagcacgtgttcacagaccccctgggcgtgcagatccctgaggacctgagccctgtgtaccagagcagcaatgacagtgatgcctacaaggaccagatctctgtgctgcccaatgagcaggacctggtgcgggaggaggcccagaagatgagcagcctgctgcccaccatgtggctgggcgcccagaatggctgcctgtatgtgcacagctctgtggcccagtggaggaagtgcctgcacagcatcaagctgaaggacagcatcctgagcatcgtgcacgtgaagggcatcgtgctggtggccctggctgatggcaccctggccatcttccacagaggagtggatggccagtgggacctgagcaactaccacctgctggacctgggccggccccaccacagcatccgctgcatgacagtggtgcatgacaaggtgtggtgtggctacagaaacaagatctacgtggtgcagcccaaggccatgaagattgagaagagctttgatgcccaccccaggaaggagagccaggtgcggcagctggcctgggtgggagatggagtgtgggtgtccatccggctggacagcaccctgcggctgtaccacgcccacacctaccagcacctgcaggatgtggacatcgagccctacgtgtccaagatgctgggcaccgggaagctgggcttctcctttgtgcgcatcacagccctgatggtgtcctgcaaccggctgtgggtgggcactggaaatggagtcatcatcagcatccccctgacagagaccgtcatcctgcaccagggccgcctgctgggcctgcgggccaacaagaccagcggcgtgcccggcaaccggcccggcagcgtcatccgggtgtatggagatgagaacagcgacaaggtgaccccaggcaccttcatcccctactgcagcatggcccacgcccagctgtgcttccacggccacagagatgctgtgaagttctttgtggccgtgcccggccaggtgatcagcccccagagcagcagcagcggcacagacctgactggagacaaggccggccccagcgcccaggagcccggcagccagacccccctgaagtccatgctggtgatctctggaggagagggctacatcgacttcaggatgggagatgaaggaggagagagcgagctgctgggggaggacctgcccctggagcccagcgtgaccaaggccgagaggagccacctgattgtgtggcaggtgatgtatggaaatgaatag

SEQ ID NO: 171371 - DNA, 2760 bp, synthetic construct
  misc_feature 1..2760: note = Description of Artificial Sequence: Synthetic coding sequence
  source 1..2760: mol_type = other DNA
atggtgatgcgctggggcgagagaaatgatgtgattgcctgggagctgctgcaggatggagtggagaatgccctgaacatcgtgaagaatgacctgattgccaaggtggatgagctgacctgtgagaaggatgtgctgcagggcgagctggaggccgtgaagcaggccaagctgaagctggaggagaagaaccgggagctggaggaggagctgaggaaggcccgggcagaggctgaagatgcccggcagaaggccaaggatgatgatgacagcgacatccccacagcccagaggaagcgcttcaccagggtggagatggcccgggtgctgatggagaggaaccagtacaaggagcggctgatggagctgcaggaggccgtgcgctggacagagatgatccgggccagccgggagaacccagccatgcaggagaagaagaggagcagcatctggcagttcttcagccgcctcttcagcagcagcagcaacaccaccaagaagccagagccccctgtgaacctgaagtacaatgcccccaccagccacgtgacccccagcgtgaagaagaggagcagcaccctgagccagctgcccggggacaagagcaaggcctttgacttcctgtctgaggagacagaggccagcctggccagcagaagagagcagaagcgggagcagtaccggcaggtgaaggcccacgtgcagaaggaggatggccgggtgcaggccttcggctggagcctgccccagaagtacaagcaggtgaccaacggccagggcgagaacaagatgaagaacctgcctgtgcctgtgtacctgcggcccctggatgagaaggacacctccatgaagctgtggtgtgctgtgggcgtgaacctgagcggcggcaagaccagagatggcggctctgtggtgggcgccagcgtcttctacaaggatgtggccggcctggacacagagggcagcaagcagaggtctgccagccagagcagcctggacaagctggaccaggagctgaaggagcagcagaaggagctgaagaaccaggaggagctgagcagcctggtgtggatctgcaccagcacccacagcgccaccaaggtgctgatcattgatgctgtgcagcccggcaacatcctggacagcttcaccgtgtgcaacagccacgtgctgtgcatcgcctctgtgcctggggcccgggagacagactacccagctggggaggacctgtctgagagcggccaggtggacaaggccagcctgtgtggctccatgaccagcaacagcagcgctgagacagacagcctgctgggcggcatcaccgtggtgggctgcagcgctgagggcgtgactggagctgccaccagccccagcaccaacggggccagccctgtgatggacaagcccccagagatggaggctgaaaattctgaggtggatgaaaatgtgcccacagctgaggaggccacagaggccacagagggcaatgccggcagcgcagaagatactgtggacatcagccagacaggagtgtacacagaacatgtgttcacagaccccctgggcgtgcagatccctgaggacctgagccctgtgtaccagagcagcaatgacagtgatgcctacaaggaccagatctctgtgctgcccaatgagcaggacctggtgcgggaggaggcccagaagatgagcagcctgctgcccaccatgtggctgggcgcccagaatggctgcctgtatgtgcacagctctgtggcccagtggaggaagtgcctgcacagcatcaagctgaaggacagcatcctgagcatcgtgcacgtgaagggcatcgtgctggtggccctggctgatggcaccctggccatcttccaccggggcgtggatggccagtgggacctgagcaactaccacctgctggacctgggccggccccaccacagcatccgctgcatgacagtggtgcatgacaaggtgtggtgtggctacagaaacaagatctacgtggtgcagcccaaggccatgaagattgagaagagctttgatgcccaccccaggaaggagagccaggtgcggcagctggcctgggtgggagatggagtgtgggtgtccatccggctggacagcaccctgcggctgtaccacgcccacacctaccagcacctgcaggatgtggacatcgagccctacgtgtccaagatgctgggcaccgggaagctgggcttctcctttgtgcgcatcacagccctgatggtgtcctgcaaccggctgtgggtgggcactggaaatggagtcatcatcagcatccccctgacagagaccaacaagaccagcggcgtgcccggcaaccggcccggcagcgtcatccgggtgtatggagatgagaacagcgacaaggtgaccccaggcaccttcatcccctactgcagcatggcccacgcccagctgtgcttccacggccacagagatgctgtgaagttctttgtggccgtgcccggccaggtgatcagcccccagagcagcagcagcggcacagacctgactggagacaaggccggccccagcgcccaggagcccggcagccagacccccctgaagtccatgctggtgatctctggaggagagggctacatcgacttcaggatgggagatgaaggaggagagagcgagctgctgggggaggacctgcccctggagcccagcgtgaccaaggccgagaggagccacctgattgtgtggcaggtgatgtatggaaatgaatag

SEQ ID NO: 171372 - DNA, 825 bp, synthetic construct
  misc_feature 1..825: note = Description of Artificial Sequence: Synthetic coding sequence
  source 1..825: mol_type = other DNA
atggagctggaggatggagtggtgtaccaggaggagcccggcggcagcggggctgtgatgtctgagcgggtgtctggcctggccggcagcatctaccgggagtttgagcggctgattggccgctatgatgaggaggtggtgaaggagctgatgcccctggtggtggccgtgctggagaacctggacagcgtgtttgcccaggaccaggagcaccaggtggagctggagctgctgagagatgacaatgagcagctgatcacccagtatgagcgggagaaggccctgaggaagcatgctgaggagaagttcatcgagtttgaggacagccaggagcaggagaagaaggacctgcagaccagggtggagagcctggagagccagacccggcagctggagctgaaggccaagaactatgctgaccagagcgccatgagccctggctgcatgctgctgtttgtgtttggatttgtgggcggcgctgtggtgatcaacagcgccatcctggtgtccctgtctgtgctgctgctggtgcacttcagcatcagcactggagtgcctgccctgacccagaacctgccccgcatcctgaggaaggagcggcccatcagcctgggcatcttccccctgcctgctggagatggcctgctgaccccagatgcccagaagggcggggagaccccaggcagcgagcagtggaagttccaggagctgagccagcccaggagccacaccagcctgaaggtgagcaacagccctgagccccagaaggctgtggagcaggaggtgaggatggtgctgctgaacatcctgcagaaggtgtactag

SEQ ID NO: 171373 - DNA, 1053 bp, synthetic construct
  misc_feature 1..1053: note = Description of Artificial Sequence: Synthetic coding sequence
  source 1..1053: mol_type = other DNA
atgaagcccctggtgctgctggtggccctgctgctgtggcccagctctgtgcctgcctaccccagcatcaccgtgaccccagatgaggagcagaacctgaaccactacatccaggtgctggagaacctggtgcgctctgtgcccagcggggagcccggccgggagaagaagagcaacagccccaagcacgtgtacagcatcgccagcaagggcagcaagttcaaggagctggtgacccatggagatgccagcacagaaaatgatgtgctgaccaaccccatcagcgaggagaccaccaccttccccactggaggcttcaccccagagatcggcaagaagaagcacacagagagcacccccttctggagcatcaagcccaacaacgtgtccatcgtgctgcatgctgaggagccctacattgaaaatgaggagcctgagcctgagcctgagcctgctgccaagcagacagaggcccccaggatgctgcctgtggtgacagagagcagcaccagcccctacgtgaccagctacaagagccctgtgaccaccctggacaagagcacaggcatcggcatcagcacagaaagtgaagatgtgccccagctgtctggagaaacagccatcgagaagccagaggagtttgggaagcaccctgagagctggaacaatgatgacatcctgaagaagatcctggacatcaacagccaggtgcagcaggccctgctgagtgacaccagcaacccagcctaccgggaggacatcgaggccagcaaggaccacctgaagaggagcctggccctggccgctgctgctgagcacaagctgaagaccatgtacaagagccagctgctgcctgtgggccgcaccagcaacaagattgatgacatcgagaccgtcatcaacatgctgtgcaacagccgcagcaagctgtatgagtacctggacatcaagtgtgtgcccccagagatgagggagaaggccgccaccgtcttcaacaccctgaagaacatgtgccgcagcagaagagtgacagccctgctgaaggtgtactag

SEQ ID NO: 171374 - DNA, 711 bp, synthetic construct
  misc_feature 1..711: note = Description of Artificial Sequence: Synthetic coding sequence
  source 1..711: mol_type = other DNA
atggccagctctgtggatgaggaggccctgcaccagctgtacctgtgggtggacaacatccccctgagccggcccaagaggaacctgagccgggacttcagtgatggagtgctggtggccgaggtgatcaagttctacttccccaagatggtggagatgcacaactacgtgcctgccaacagcctgcagcagaagctgagcaactggggccacctgaacaggaaggtgctgaagaggctgaacttctctgtgcctgatgatgtgatgaggaagatcgcccagtgtgcccctggggtggtggagctggtgctgatccccctgcggcagaggctggaggagcggcagaggaggaggaagcagggcgccggcagcctgcaggagctggccccccaggacggcagcggctacatggatgtgggcgtgtcccagaaggcccggggggagggcgtgcctgacccccagggcggcggccagctgtcctgggaccggcccccagccccccggcccccagcctacaacagagccctgcagggcgaccccagctttgtgctgcagattgctgagaaggagcaggagctgctggccagccaggagaccgtgcaggtgctgcagatgaaggtgcggcggctggagcacctgctgcagctgaagaatgtgagaattgaggacctgagccggcggctgcagcaggccgagaggaagcagaggtag

SEQ ID NO: 171375 - DNA, 351 bp, synthetic construct
  misc_feature 1..351: note = Description of Artificial Sequence: Synthetic coding sequence
  source 1..351: mol_type = other DNA
atgtgtgaccagaccaagcacagcaagtgctgcccagccaagggcaaccagtgctgccccccccagcagaaccagtgctgccagagcaagggcaaccagtgctgcccccccaagcagaaccagtgctgccagcccaagggcagccagtgctgcccccccaagcacaaccactgctgccagcccaagccaccctgctgcatccaggcccgctgctgcggcctggagaccaagccagaggtgagccccctgaacatggagagcgagcccaacagcccccagacccaggacaagggctgccagacccagcagcagccccacagcccccagaatgaaagccggcccagcaagtag

SEQ ID NO: 171376 - DNA, 294 bp, synthetic construct; identical to SEQ ID NO: 171218
  misc_feature 1..294: note = Description of Artificial Sequence: Synthetic coding sequence
  source 1..294: mol_type = other DNA

SEQ ID NO: 171377 - DNA, 2019 bp, synthetic construct
  misc_feature 1..2019: note = Description of Artificial Sequence: Synthetic coding sequence
  source 1..2019: mol_type = other DNA
atgaggagcatccgcagctttgccaatgatgacagacatgtgatggtgaagcacagcaccatctaccccagccctgaggagctggaggccgtgcagaacatggtgtccacagtggagtgtgccctgaagcacgtgtctgactggctggatgagaccaacaagggcaccaagacagaaggagaaacagaggtgaagaaggatgaagctggggagaactacagcaaggaccagggcggccgcaccctgtgtggggtgatgagaattggcctggtggccaagggcctgctgatcaaggatgacatggacctggagctggtgctgatgtgcaaggacaagcccacagagaccctgctgaacacagtgaaggacaacctgcccatccagatccagaagctgacagaggagaagtaccaggtggagcagtgtgtgaatgaggccagcatcatcatccggaacaccaaggagcccaccctgaccctgaaggtgatcctgaccagccccctcatcagagatgagctggagaagaaggatggagaaaatgtgtccatgaaggaccccccagacctgctggaccggcagaagtgcctgaatgccctggccagcctgcggcatgccaagtggttccaggcccgggccaacggcctgaagagctgtgtgattgtgctgcgcatcctgcgggacctgtgcaacagagtgcccacctgggcccccctgaagggctggcccctggagctgatctgtgagaagagcatcggcacctgcaaccggcccctgggcgctggggaggccctgcggcgggtgatggagtgcctggccagcggcatcctgctgcccggcggccctggcctgcatgacccctgtgagcgggaccccacagatgccctgagctacatgaccatccagcagaaggaggacatcacccacagcgcccagcacgccctgcggctgagcgccttcggccagatctacaaggtgctggagatggaccccctgcccagcagcaagcccttccagaagtacagctggagcgtgacagacaaggagggcgccggcagcagcgccctgaagaggccctttgaagatggcctgggagatgacaaggaccccaacaagaagatgaagaggaacctgaggaagatcctggacagcaaggccatcgacctgatgaatgccctgatgaggctgaaccagatccggcccggcctgcagtacaagctgctgagccagagcggccctgtgcacgcccctgtgttcaccatgtctgtggatgtggatggcaccacctatgaggccagcggccccagcaagaagacagccaagctgcacgtggccgtgaaggtgctgcaggccatgggctaccccactggatttgatgctgacatcgagtgcatgagcagtgatgagaagagtgacaatgaaagcaagaatgagaccgtgagcagcaacagcagcaacaacacaggcaacagcaccacagagaccagcagcaccctggaggtgaggacccagggccccatcctgacagccagcggcaagaaccctgtgatggagctgaatgagaagaggcggggcctgaagtatgagctgatcagcgagactggaggcagccatgacaagagatttgtgatggaggtggaggtggatggccagaagttcagaggagctggccccaacaagaaggtggccaaggccagcgctgccctggccgccctggagaagctgttcagcggccccaatgctgccaacaacaagaagaagaagatcatcccccaggccaagggcgtggtgaacacagctgtgtctgctgctgtgcaggccgtgcggggccggggccggggcaccctgaccaggggggcctttgtgggcgccacagctgcccctggctacatcgcccctggctacggcaccccctacggctacagcacagctgccccagcctacggcctgcccaagaggatggtgctgctgcctgtgatgaagttccccacctaccctgtgccccactacagcttcttctag

SEQ ID NO: 171378 - DNA, 1977 bp, synthetic construct
  misc_feature 1..1977: note = Description of Artificial Sequence: Synthetic coding sequence
  source 1..1977: mol_type = other DNA
atggtgaagcacagcaccatctaccccagccctgaggagctggaggccgtgcagaacatggtgtccacagtggagtgtgccctgaagcacgtgtctgactggctggatgagaccaacaagggcaccaagacagaaggagaaacagaggtgaagaaggatgaagctggggagaactacagcaaggaccagggcggccgcaccctgtgtggggtgatgagaattggcctggtggccaagggcctgctgatcaaggatgacatggacctggagctggtgctgatgtgcaaggacaagcccacagagaccctgctgaacacagtgaaggacaacctgcccatccagatccagaagctgacagaggagaagtaccaggtggagcagtgtgtgaatgaggccagcatcatcatccggaacaccaaggagcccaccctgaccctgaaggtgatcctgaccagccccctcatcagagatgagctggagaagaaggatggagaaaatgtgtccatgaaggaccccccagacctgctggaccggcagaagtgcctgaatgccctggccagcctgcggcatgccaagtggttccaggcccgggccaacggcctgaagagctgtgtgattgtgctgcgcatcctgcgggacctgtgcaacagagtgcccacctgggcccccctgaagggctggcccctggagctgatctgtgagaagagcatcggcacctgcaaccggcccctgggcgctggggaggccctgcggcgggtgatggagtgcctggccagcggcatcctgctgcccggcggccctggcctgcatgacccctgtgagcgggaccccacagatgccctgagctacatgaccatccagcagaaggaggacatcacccacagcgcccagcacgccctgcggctgagcgccttcggccagatctacaaggtgctggagatggaccccctgcccagcagcaagcccttccagaagtacagctggagcgtgacagacaaggagggcgccggcagcagcgccctgaagaggccctttgaagatggcctgggagatgacaaggaccccaacaagaagatgaagaggaacctgaggaagatcctggacagcaaggccatcgacctgatgaatgccctgatgaggctgaaccagatccggcccggcctgcagtacaagctgctgagccagagcggccctgtgcacgcccctgtgttcaccatgtctgtggatgtggatggcaccacctatgaggccagcggccccagcaagaagacagccaagctgcacgtggccgtgaaggtgctgcaggccatgggctaccccactggatttgatgctgacatcgagtgcatgagcagtgatgagaagagtgacaatgaaagcaagaatgagaccgtgagcagcaacagcagcaacaacacaggcaacagcaccacagagaccagcagcaccctggaggtgaggacccagggccccatcctgacagccagcggcaagaaccctgtgatggagctgaatgagaagaggcggggcctgaagtatgagctgatcagcgagactggaggcagccatgacaagagatttgtgatggaggtggaggtggatggccagaagttcagaggagctggccccaacaagaaggtggccaaggccagcgctgccctggccgccctggagaagctgttcagcggccccaatgctgccaacaacaagaagaagaagatcatcccccaggccaagggcgtggtgaacacagctgtgtctgctgctgtgcaggccgtgcggggccggggccggggcaccctgaccaggggggcctttgtgggcgccacagctgcccctggctacatcgcccctggctacggcaccccctacggctacagcacagctgccccagcctacggcctgcccaagaggatggtgctgctgcctgtgatgaagttccccacctaccctgtgccccactacagcttcttctag

SEQ ID NO: 171379 - DNA, 285 bp, synthetic construct
  misc_feature 1..285: note = Description of Artificial Sequence: Synthetic coding sequence
  source 1..285: mol_type = other DNA
atgaggagcatccgcagctttgccaatgatgacagacatgtgatggtgaagcacagcaccatctaccccagccctgaggagctggaggccgtgcagaacatggtgtccacagtggagtgtgccctgaagcacgtgtctgactggctggatgagaccaacaagggcaccaagacagaaggagaaacagaggtgaagaaggatgaagctggggagaactacagcaagtggagcgacatcgtgtggtgcaatgaagactggccaggctgcaagaggctggccgactag

SEQ ID NO: 171380 - DNA, 2019 bp, synthetic construct; identical to SEQ ID NO: 171377
  misc_feature 1..2019: note = Description of Artificial Sequence: Synthetic coding sequence
  source 1..2019: mol_type = other DNA

SEQ ID NO: 171381 - DNA, 225 bp, synthetic construct
  misc_feature 1..225: note = Description of Artificial Sequence: Synthetic coding sequence
  source 1..225: mol_type = other DNA
atgaggagcatccgcagctttgccaatgatgacagacatgtgatggtgaagcacagcaccatctaccccagccctgaggagctggaggccgtgcagaacatggtgtccacagtggagtgtgccctgaagcacgtgtctgactggctggatgagaccaacaagggcaccaagacagaaggagaaacagaggtgaagaaggatgaagctggggagaactacagctag

SEQ ID NO: 171382 - DNA, 1776 bp, synthetic construct
  misc_feature 1..1776: note = Description of Artificial Sequence: Synthetic coding sequence
  source 1..1776: mol_type = other DNA
atgagcctgctgaccaactatgagggcctgcggcaccagatcgagcggctggtgcgggagaatgaggagctgaagaagctggtgcggctcatcagagaaaatcatgagctgaagagcgccatcaagacccaggccggcggcctgggcatcagcggcttcaccagcggcctgggggaggccacagctggcctgagcagccggcagaacaacggggtcttcctgccccccagccctgctgtggccaatgaaagagtgctggaggaggtgggcatcatggccctggcccccctggccgagatgctgaccagcctgcagcccagcgccaccccaggcagcctgatgagccccctgaccggcaccctgagcaccctgctgagcggccctgcccccaccagccagagcagccccctgaccagcttcctgaccagccccatcgccggccccctgaccggcaccctggccagcagcctgggcctgcccagcacaggcaccctgacccccagcagcctggtggccggccctgtggccatgagccagagcagccccctcatcgcccctgtgatgggcaccgtggccgtgtccctgagcagccccctgctgagcagcacagccaccccacctggggtgtcccagaacctgctggccaaccccatgagcaacctggtgctgcctgaggccccccggctgcggctggccgagcccctgcggggcggccccaccggcccccagagccctgcctgtgtggtgcccacagccaccaccaaggtgcccctgagcacagagcccccccagagcacccaggaccctgagcccctgtccatggcctttgctggggcccccctgcagaccagcacccccatcggggccatgggcaccccagcccccaagacagccttctccttcaacaccagtgacacccaggcccagcccagcgctgcccaggagcaggtggtgcctgcctctgtgcccaccagccccaccaccagccccaccgtgacagtgctggccagcgccccagccctggccccccaggtggccaccagctacacccccagcagcaccacccacatcgcccagggcgccccccacccccccagcaggatgcacaacagccccacccagaacctgcctgtgccccactgccccccccacaatgcccacagcccccccaggaccagcagcagccctgcctctgtgaatgacagccggggccccaggaccacagagcccagcaccaagtccatgatggaggtggagaggaagctggcccacaggaagaccagcaagtttcctgagaacccccgggagagcaagcagctggcctgggagcggctggtgggggagatcgccttccagctggaccggcgcatcctgagcagcatcttccctgagcgggtgcggctgtatggcttcaccgtgagcaacatccctgagaagatcatccaggccagcctgaaccccagcgaccacaagctggatgagaagctgtgccagaggctgacccagcgctacgtgtctgtgatgaaccggctgcagagcctgggctacaacggccgggtgcacccagccctgacagagcagctggtgaatgcctacggcatcctgcgggagaggcctgagctggccgccagcgagggcggcccctacacagtggacttcctgcagagggtggtggtggagaccgtgcaccctggcatgctggctgatgccctgctgctgctgagctgcctgagccagctggcccatgatgatggcaagcccatgttcatctggtag

SEQ ID NO: 171383 - DNA, 1326 bp, synthetic construct
  misc_feature 1..1326: note = Description of Artificial Sequence: Synthetic coding sequence
  source 1..1326: mol_type = other DNA
atgagcctgctgaccaactatgagggcctgcggcaccagatcgagcggctggtgcgggagaatgaggagctgaagaagctggtgcggctcatcagagaaaatcatgagctgaagagcgccatcaagacccaggccggcggcctgggcatcagcggcttcaccagcggcctgggggaggccacagctggcctgagcagccggcagaacaacggggtcttcctgccccccagccctgctgtggccaatgaaagagtgctggaggaggtgggcatcatggccctggcccccctggccgagatgctgaccagcctgcagcccagcgccaccccaggcagcctgatgagccccctgaccggcaccctgagcaccctgctgagcggccctgcccccaccagccagagcagccccctgaccagcttcctgaccagccccatcgccggccccctgaccggcaccctggccagcagcctgggcctgcccagcacaggcaccctgacccccagcagcctggtggccggccctgtggccatgagccagagcagccccctcatcgcccctgtgatgggcaccgtggccgtgtccctgagcagccccctgctgagcagcacagccaccccacctggggtgtcccagaacctgctggccaaccccatgagcaacctggtgctgcctgaggccccccggctgcggctggccgagcccctgcggggcggccccaccggcccccagagccctgcctgtgtggtgcccacagccaccaccaaggtgcccctgagcacagagcccccccagagcacccaggaccctgagcccctgtccatggcctttgctggggcccccctgcagaccagcacccccatcggggccatgggcaccccagcccccaagacagccttctccttcaacaccagtgacacccaggcccagcccagcgctgcccaggagcaggtggtgcctgcctctgtgcccaccagccccaccaccagccccaccgtgacagtgctggccagcgccccagccctggccccccaggtggccaccagctacacccccagcagcaccacccacatcgcccagggcgccccccacccccccagcaggatgcacaacagccccacccagaacctgcctgtgccccactgccccccccacaatgcccacagcccccccaggaccagcagcagccctgcctctgtgaatgacagccggggccccaggaccacagagcccagcaccaagtccatgatggaggtggagaggaagctggcccacaggaagaccagcaagtttcctgagaacccccggggcttccctgagccccagtag

SEQ ID NO: 171384 - DNA, 573 bp, synthetic construct
  misc_feature 1..573: note = Description of Artificial Sequence: Synthetic coding sequence
  source 1..573: mol_type = other DNA
atgagcagcagcgccctgacctgtggcagcaccctggagaagagcggggacacctgggagatgaaggccctggacagcagccggctggtgccctggccaccccggggcctgggcagcagcacccagcaccccaacaagccccactgtgccctggccagctgccagggccctggggtgctgcctggagctgccagcgccctgcctgagctgaccttccagggagatgtgtgccagagcgagacctgccagcgctacctgcaggccgccatcagcctggacattgctgtgtcccagatcaacctgctgggccggcccagcagccccccagccctgctgatccagcagggcagctgtgagcaggtgatccacaacagcaccccccagttcctgggcatggaggatggagacaatgaaagaaccaccggctggctgtggaggctgtgtgaagatattgatgctgagcccagcagcacaggctgcagccgcagcaaccagctgaccttcacagagggctgctttgtgcgcagcctgagcacagtgtacagcaacacccacatccacacccacctgtag

SEQ ID NO: 171385 - DNA, 1791 bp, synthetic construct
  misc_feature 1..1791: note = Description of Artificial Sequence: Synthetic coding sequence
  source 1..1791: mol_type = other DNA
atgggcttcatcatccacatccagcaggtgaagaagcagaggaagaagctggaccagggcctcatcctgaagaaggagaagtacaggaaggagaagaagtgtgccagcctgagctttgaggtgtccagtgatggcggcacagagcccagcgccctggtggatgacaatggcagcgaggaggacttctcctatgaggacctgtgccaggccagcccccgctacctgcagcctggaggagagcagctggccatcaatgaactcatcagtgatggaaatgtggtgtgtgccgaggccctgtgggaccacgtgaccatggatgaccaggagctgggcttcaaggctggagatgtgatccaggtgctggaggccagcaacaaggactggtggtggggccgctctgaggacaaggaggcctggttccctgccagctttgtgcggctgcgggtgaaccaggaggagctgtctgagaacagcagcagcaccccatctgaggagcaggatgaggaggccagccagagccgccaccgccactgtgagaacaagcagcagatgaggaccaacgtcatccgggagatcatggacacagagcgggtgtacatcaagcacctgcgggacatctgtgagggctacatccggcagtgcaggaagcacacaggcatgttcaccgtggcccagctggccaccatcttcggcaacatcgaggacatctacaagttccagaggaagttcctgaaggacctggagaagcagtacaacaaggaggagccccacctgtctgaaattggcagctgcttcctgcagaaccaggagggctttgccatctacagcgagtactgcaacaaccaccctggggcctgcctggagctggccaacctgatgaagcagggcaagtaccgccacttctttgaggcctgccgcctgctgcagcagatgattgacatcgccattgatggcttcctgctgacccctgtgcagaagatctgcaagtaccccctgcagctggccgagctgctgaagtacaccacccaggagcacggggactacagcaacatcaaggccgcctatgaggccatgaagaatgtggcctgcctgatcaatgaaaggaagaggaagctggagagcattgacaagatcgcccgctggcaggtgtccatcgtgggctgggagggcctggacatcctggacaggagcagcgagctgatccacagcggggagctgaccaagatcaccaagcagggcaagagccagcagaggaccttcttcctgtttgaccaccagctggtgtcctgcaagaaggacctgctgcggcgggacatgctgtactacaagggccgcctggacatggatgagatggagctggtggacctgggagatggccgggacaaggactgcaacctgtctgtgaagaatgccttcaagctggtgtccaggaccacagatgaggtgtacctgttctgtgccaagaagcaggaggacaaggcccgctggctgcaggcctgtgctgatgagaggagaagagtgcaggaggacaaggagatgggcatggagatcagcgagaaccagaagaagctggccatgctgaatgcccagaaggccggccacggcaagagcaagggctacaaccgctgccctgtggccccaccccaccagggcctgcaccccatccaccagaggcacatcaccatgcccacctctgtgccccagcagcaggtgtttggcctggccgagcccaagaggaagagcagcctcttctggcacaccttcaaccggctgacccccttcaggaagtag

SEQ ID NO: 171386 - DNA, 1959 bp, synthetic construct
  misc_feature 1..1959: note = Description of Artificial Sequence: Synthetic coding sequence
  source 1..1959: mol_type = other DNA
atgaccagcgccagccctgaggaccagaatgcccctgtgggctgccccaagggggccaggagaagaagacccatcagcgtcatcggcggcgtgtccctgtatggcaccaaccagacagaggagctggacaacctgctgacccagcctgccagcaggcctcccatgcctgcccaccaggtgcccccctacaaggctgtgtctgcccgcttccggcccttcaccttcagccagagcacccccatcggcctggacagagtgggcagaagacggcagatgagggccagcaatgtgtccagtgatggcggcacagagcccagcgccctggtggatgacaatggcagcgaggaggacttctcctatgaggacctgtgccaggccagcccccgctacctgcagcctggaggagagcagctggccatcaatgaactcatcagtgatggaaatgtggtgtgtgccgaggccctgtgggaccacgtgaccatggatgaccaggagctgggcttcaaggctggagatgtgatccaggtgctggaggccagcaacaaggactggtggtggggccgctctgaggacaaggaggcctggttccctgccagctttgtgcggctgcgggtgaaccaggaggagctgtctgagaacagcagcagcaccccatctgaggagcaggatgaggaggccagccagagccgccaccgccactgtgagaacaagcagcagatgaggaccaacgtcatccgggagatcatggacacagagcgggtgtacatcaagcacctgcgggacatctgtgagggctacatccggcagtgcaggaagcacacaggcatgttcaccgtggcccagctggccaccatcttcggcaacatcgaggacatctacaagttccagaggaagttcctgaaggacctggagaagcagtacaacaaggaggagccccacctgtctgaaattggcagctgcttcctgcagaaccaggagggctttgccatctacagcgagtactgcaacaaccaccctggggcctgcctggagctggccaacctgatgaagcagggcaagtaccgccacttctttgaggcctgccgcctgctgcagcagatgattgacatcgccattgatggcttcctgctgacccctgtgcagaagatctgcaagtaccccctgcagctggccgagctgctgaagtacaccacccaggagcacggggactacagcaacatcaaggccgcctatgaggccatgaagaatgtggcctgcctgatcaatgaaaggaagaggaagctggagagcattgacaagatcgcccgctggcaggtgtccatcgtgggctgggagggcctggacatcctggacaggagcagcgagctgatccacagcggggagctgaccaagatcaccaagcagggcaagagccagcagaggaccttcttcctgtttgaccaccagctggtgtcctgcaagaaggacctgctgcggcgggacatgctgtactacaagggccgcctggacatggatgagatggagctggtggacctgggagatggccgggacaaggactgcaacctgtctgtgaagaatgccttcaagctggtgtccaggaccacagatgaggtgtacctgttctgtgccaagaagcaggaggacaaggcccgctggctgcaggcctgtgctgatgagaggagaagagtgcaggaggacaaggagatgggcatggagatcagcgagaaccagaagaagctggccatgctgaatgcccagaaggccggccacggcaagagcaagggctacaaccgctgccctgtggccccaccccaccagggcctgcaccccatccaccagaggcacatcaccatgcccacctctgtgccccagcagcaggtgtttggcctggccgagcccaagaggaagagcagcctcttctggcacaccttcaaccggctgacccccttcaggaagtag

SEQ ID NO: 171387 - DNA, 3834 bp, synthetic construct
  misc_feature 1..3834: note = Description of Artificial Sequence: Synthetic coding sequence
  source 1..3834: mol_type = other DNA
atgacccaggccgctgtgcggccctgggccccctgcctggagaacatgaccacagccccaaatggcctgggccctggccctgctgccccctgtgccggcagtgacctgaaggatgccaagatggtgaccagcctggcctgtggaaatggagtgtgtggctgcagccctggaggagacacagacacccaggaggccaagctgagccctgccaagctggtgcggctcttcagcaccagcaggaagaggactggagcccaccctgagcggccccacagcatggtgctggtgggcaacagcagcacctggaacaccctggccagcttcaggaagatgggcagcttcaagaagctgaagagctctgtgctgaagggcatccagagccgggagggcagcaatgcctgcagcaagggggaggccagcgagcacggcctgggcaagagcatccccaacggggctgtgcctggggcccaggccagccggggcagccccctggcccctggccctgcctgtggggccctgcggcctgctgagtggggcaccctggatggcagtgacctggaggacacagatgatgccttccagaggagcacccacaggagccgcagcctgcggcgggcctacggcctgggccgcatctgcctgctggatgccccccagaaccacgccacccccaccatcgccaccggccaggtgcctgctgtgtgtgagatcctggtgcgggaccctgagaacaacagcatgggctaccgccgcagcaagagcacagacaacctggccttcctgaagaagagcagcttcaagaggaagagcaccagcaacctggccgacctgaggacagcccatgatgcccgggtgccccagaggaccctgagcagcagcagcacagacagccagaagctgggcagcggccgcaccaagcgctggaggagccccatccgggccaaggactttgacagagtcttcaagctggtgtccaatgtgacagaggccgcctggaggcgggagagccccaggtctggggcccccagccctggagaggccagcctgcggctgcaggcccacagccggctgcatgatgactacagcagaagagtgagccgcagcacagagcaggacagccggcggggcggcgctgtgatgcacggcaccacagccacctgcaccgtggcccctggctttggaagtgccaccagcaagggcccccacctggatgctgacacagctgtgttccccctggagaccaagagctcctgggccgtggagagtgacagcagctgcacctgcagcagcctgcccagccccatcgtgcaggatgtgctgagcaaggacagctgtgaccccaatgccggcagccagctgacctttgatcctgagcagccccccacccccctgcggcccaccacccccaagccccagagcccccagagcccccagagccctggggccggcagcgccagctgccacagcaaccacagcgccctgagcgccaacagcgaggagagcgagggccgggcagaggagcccgcccagcgggagcccggccctgtgtccctgcaggaccccctggaggccacccatggagatgagggcagcaaggacctgctggtgaacatcggcgtggccgccggccctgaggagaaggagaaggaggaggtggtgcctgatggcccctggaggaggagcagcagccaggatgaggagaggacagaggcccagaggacccccaagaggcgctggggcagcggcagaagaccccggccccggcccttcagtgactatggccagctggccagccgcagcctgagcatcccagaagattctgtggccgctgacccccagaaggaggacagagtggatgaggacccccaggcctccatgaccagcgccagccctgaggaccagaatgcccctgtgggctgccccaagggggccaggagaagaagacccatctctgtgattggaggagtgtccctgtatggcaccaaccagacagaggagctggacaacctgctgacccagcctgccagccggccccccatgcctgcccaccaggtgcccccctacaaggctgtgtctgcccgcttccggcccttcaccttcagccagagcacccccatcggcctggacagagtgggcagaagacggcagatgagggccagcaatgtgtccagtgatggcggcacagagcccagcgccctggtggatgacaatggaagtgaggaggacttctcctatgaggacctgtgccaggccagcccccgctacctgcagcccggcggggagcagctggccatcaatgagctgatcagtgatggaaatgtggtgtgtgccgaggccctgtgggaccacgtgaccatggatgaccaggagctgggcttcaaggctggagatgtgatccaggtgctggaggccagcaacaaggactggtggtggggccgctctgaggacaaggaggcctggttccctgccagctttgtgcggctgcgggtgaaccaggaggagctgtctgagaacagcagcagcacccccagcgaggagcaggatgaggaggccagccagagccgccaccgccactgtgagaacaagcagcagatgaggaccaacgtcatccgggagatcatggacacagagcgggtgtacatcaagcacctgcgggacatctgtgagggctacatccggcagtgcaggaagcacacaggcatgttcaccgtggcccagctggccaccatctttggaaatattgaggacatctacaagttccagaggaagttcctgaaggacctggagaagcagtacaacaaggaggagccccacctgtctgagatcggcagctgcttcctgcagaaccaggagggctttgccatctacagcgagtactgcaacaaccaccctggggcctgcctggagctggccaacctgatgaagcagggcaagtaccgccacttctttgaggcctgccgcctgctgcagcagatgattgatattgccattgatggcttcctgctgacccctgtgcagaagatctgcaagtaccccctgcagctggccgagctgctgaagtacaccacccaggagcacggggactacagcaacatcaaggccgcctatgaggccatgaagaatgtggcctgcctgatcaatgaaaggaagaggaagctggagagcattgacaagatcgcccgctggcaggtgtccatcgtgggctgggagggcctggacatcctggacaggagcagcgagctgatccacagcggggagctgaccaagatcaccaagcagggcaagagccagcagaggaccttcttcctgtttgaccaccagctggtgtcctgcaagaaggacctgctgcggcgggacatgctgtactacaagggccgcctggacatggatgagatggagctggtggacctgggagatggccgggacaaggactgcaacctgtctgtgaagaatgccttcaagctggtgtccaggaccacagatgaggtgtacctgttctgtgccaagaagcaggaggacaaggcccgctggctgcaggcctgtgctgatgaaagaagaagagtgcaggaggacaaggagatgggcatggagatcagcgagaaccagaagaagctggccatgctgaatgcccagaaggccggccacggcaagagcaagggctacaaccgctgccctgtggccccaccccaccagggcctgcaccccatccaccagaggcacatcaccatgcccacctctgtgccccagcagcaggtgtttggcctggccgagcccaagaggaagagcagcctcttctggcacaccttcaaccggctgacccccttcaggaagtag

SEQ ID NO: 171388 - DNA, 3948 bp, synthetic construct
  misc_feature 1..3948: note = Description of Artificial Sequence: Synthetic coding sequence
  source 1..3948: mol_type = other DNA
tgacctgtggccacccaggagccagatgtgcagggccgctgtgagtgccaggacggcatccctggagatgagggcctggagctgcggtctgctgacagcgctgtgcctgtggccatgacccaggccgctgtgcggccctgggccccctgcctggagaacatgaccacagccccaaatggcctgggccctggccctgctgccccctgtgccggcagtgacctgaaggatgccaagatggtgaccagcctggcctgtggaaatggagtgtgtggctgcagccctggaggagacacagacacccaggaggccaagctgagccctgccaagctggtgcggctcttcagcaccagcaggaagaggactggagcccaccctgagcggccccacagcatggtgctggtgggcaacagcagcacctggaacaccctggccagcttcaggaagatgggcagcttcaagaagctgaagagctctgtgctgaagggcatccagagccgggagggcagcaatgcctgcagcaagggggaggccagcgagcacggcctgggcaagagcatccccaacggggctgtgcctggggcccaggccagccggggcagccccctggcccctggccctgcctgtggggccctgcggcctgctgagtggggcaccctggatggcagtgacctggaggacacagatgatgccttccagaggagcacccacaggagccgcagcctgcggcgggcctacggcctgggccgcatctgcctgctggatgccccccagaaccacgccacccccaccatcgccaccggccaggtgcctgctgtgtgtgagatcctggtgcgggaccctgagaacaacagcatgggctaccgccgcagcaagagcacagacaacctggccttcctgaagaagagcagcttcaagaggaagagcaccagcaacctggccgacctgaggacagcccatgatgcccgggtgccccagaggaccctgagcagcagcagcacagacagccagaagctgggcagcggccgcaccaagcgctggaggagccccatccgggccaaggactttgacagagtcttcaagctggtgtccaatgtgacagaggccgcctggaggcgggagagccccaggtctggggcccccagccctggagaggccagcctgcggctgcaggcccacagccggctgcatgatgactacagcagaagagtgagccgcagcacagagcaggacagccggcggggcggcgctgtgatgcacggcaccacagccacctgcaccgtggcccctggctttggaagtgccaccagcaagggcccccacctggatgctgacacagctgtgttccccctggagaccaagagctcctgggccgtggagagtgacagcagctgcacctgcagcagcctgcccagccccatcgtgcaggatgtgctgagcaaggacagctgtgaccccaatgccggcagccagctgacctttgatcctgagcagccccccacccccctgcggcccaccacccccaagccccagagcccccagagcccccagagccctggggccggcagcgccagctgccacagcaaccacagcgccctgagcgccaacagcgaggagagcgagggccgggcagaggagcccgcccagcgggagcccggccctgtgtccctgcaggaccccctggaggccacccatggagatgagggcagcaaggacctgctggtgaacatcggcgtggccgccggccctgaggagaaggagaaggaggaggtggtgcctgatggcccctggaggaggagcagcagccaggatgaggagaggacagaggcccagaggacccccaagaggcgctggggcagcggcagaagaccccggccccggcccttcagtgactatggccagctggccagccgcagcctgagcatcccagaagattctgtggccgctgacccccagaaggaggacagagtggatgaggacccccaggcctccatgaccagcgccagccctgaggaccagaatgcccctgtgggctgccccaagggggccaggagaagaagacccatctctgtgattggaggagtgtccctgtatggcaccaaccagacagaggagctggacaacctgctgacccagcctgccagccggccccccatgcctgcccaccaggtgcccccctacaaggctgtgtctgcccgcttccggcccttcaccttcagccagagcacccccatcggcctggacagagtgggcagaagacggcagatgagggccagcaatgtgtccagtgatggcggcacagagcccagcgccctggtggatgacaatggaagtgaggaggacttctcctatgaggacctgtgccaggccagcccccgctacctgcagcccggcggggagcagctggccatcaatgagctgatcagtgatggaaatgtggtgtgtgccgaggccctgtgggaccacgtgaccatggatgaccaggagctgggcttcaaggctggagatgtgatccaggtgctggaggccagcaacaaggactggtggtggggccgctctgaggacaaggaggcctggttccctgccagctttgtgcggctgcgggtgaaccaggaggagctgtctgagaacagcagcagcacccccagcgaggagcaggatgaggaggccagccagagccgccaccgccactgtgagaacaagcagcagatgaggaccaacgtcatccgggagatcatggacacagagcgggtgtacatcaagcacctgcgggacatctgtgagggctacatccggcagtgcaggaagcacacaggcatgttcaccgtggcccagctggccaccatctttggaaatattgaggacatctacaagttccagaggaagttcctgaaggacctggagaagcagtacaacaaggaggagccccacctgtctgagatcggcagctgcttcctgcagaaccaggagggctttgccatctacagcgagtactgcaacaaccaccctggggcctgcctggagctggccaacctgatgaagcagggcaagtaccgccacttctttgaggcctgccgcctgctgcagcagatgattgatattgccattgatggcttcctgctgacccctgtgcagaagatctgcaagtaccccctgcagctggccgagctgctgaagtacaccacccaggagcacggggactacagcaacatcaaggccgcctatgaggccatgaagaatgtggcctgcctgatcaatgaaaggaagaggaagctggagagcattgacaagatcgcccgctggcaggtgtccatcgtgggctgggagggcctggacatcctggacaggagcagcgagctgatccacagcggggagctgaccaagatcaccaagcagggcaagagccagcagaggaccttcttcctgtttgaccaccagctggtgtcctgcaagaaggacctgctgcggcgggacatgctgtactacaagggccgcctggacatggatgagatggagctggtggacctgggagatggccgggacaaggactgcaacctgtctgtgaagaatgccttcaagctggtgtccaggaccacagatgaggtgtacctgttctgtgccaagaagcaggaggacaaggcccgctggctgcaggcctgtgctgatgaaagaagaagagtgcaggaggacaaggagatgggcatggagatcagcgagaaccagaagaagctggccatgctgaatgcccagaaggccggccacggcaagagcaagggctacaaccgctgccctgtggccccaccccaccagggcctgcaccccatccaccagaggcacatcaccatgcccacctctgtgccccagcagcaggtgtttggcctggccgagcccaagaggaagagcagcctcttctggcacaccttcaaccggctgacccccttcaggaagtag

SEQ ID NO: 171389 - DNA, 1851 bp, synthetic construct
  misc_feature 1..1851: note = Description of Artificial Sequence: Synthetic coding sequence
  source 1..1851: mol_type = other DNA
atgcctgcccaccaggtgcccccctacaaggctgtgtctgcccgcttccggcccttcaccttcagccagagcacccccatcggcctggacagagtgggcagaagacggcagatgagggccagcaatgtgtccagtgatggcggcacagagcccagcgccctggtggatgacaatggcagcgaggaggacttctcctatgaggacctgtgccaggccagcccccgctacctgcagcctggaggagagcagctggccatcaatgaactcatcagtgatggaaatgtggtgtgtgccgaggccctgtgggaccacgtgaccatggatgaccaggagctgggcttcaaggctggagatgtgatccaggtgctggaggccagcaacaaggactggtggtggggccgctctgaggacaaggaggcctggttccctgccagctttgtgcggctgcgggtgaaccaggaggagctgtctgagaacagcagcagcaccccatctgaggagcaggatgaggaggccagccagagccgccaccgccactgtgagaacaagcagcagatgaggaccaacgtcatccgggagatcatggacacagagcgggtgtacatcaagcacctgcgggacatctgtgagggctacatccggcagtgcaggaagcacacaggcatgttcaccgtggcccagctggccaccatcttcggcaacatcgaggacatctacaagttccagaggaagttcctgaaggacctggagaagcagtacaacaaggaggagccccacctgtctgaaattggcagctgcttcctgcagaaccaggagggctttgccatctacagcgagtactgcaacaaccaccctggggcctgcctggagctggccaacctgatgaagcagggcaagtaccgccacttctttgaggcctgccgcctgctgcagcagatgattgacatcgccattgatggcttcctgctgacccctgtgcagaagatctgcaagtaccccctgcagctggccgagctgctgaagtacaccacccaggagcacggggactacagcaacatcaaggccgcctatgaggccatgaagaatgtggcctgcctgatcaatgaaaggaagaggaagctggagagcattgacaagatcgcccgctggcaggtgtccatcgtgggctgggagggcctggacatcctggacaggagcagcgagctgatccacagcggggagctgaccaagatcaccaagcagggcaagagccagcagaggaccttcttcctgtttgaccaccagctggtgtcctgcaagaaggacctgctgcggcgggacatgctgtactacaagggccgcctggacatggatgagatggagctggtggacctgggagatggccgggacaaggactgcaacctgtctgtgaagaatgccttcaagctggtgtccaggaccacagatgaggtgtacctgttctgtgccaagaagcaggaggacaaggcccgctggctgcaggcctgtgctgatgagaggagaagagtgcaggaggacaaggagatgggcatggagatcagcgagaaccagaagaagctggccatgctgaatgcccagaaggccggccacggcaagagcaaggtgcggctgcagcaggtgccctgtggccccacagcccctggccctgccccccaccccccagccccccaccactacgcccacaagaggcccccagctgctggcctgtggccaggcggcacccaggaggaggtgctggccctgctggcccacctgcagcaggcccaccccctgcctgagatgaagacaggaggctgtgcctccatggagctgggcgtgaagagaagaaattag

SEQ ID NO: 171390 - DNA, 1710 bp, synthetic construct
  misc_feature 1..1710: note = Description of Artificial Sequence: Synthetic coding sequence
  source 1..1710: mol_type = other DNA
atggatgctggcagcagccgcagcctggagaatgctgtgaaccgcatctaccatgaccagctggtgcccaagatcaacaccagcaagaagatgagcaccctggcccacccccccaacatcctggagatgagccaggagatcaagaagaactgtggcggcaagcaggtggagatcaccctggagaggaccaagatgaccaagggcatcaaggagaagcagagcaatgacctggagaaggccgccttcaagaggaaggccgagggggaggagaagcccaccaggaagaagcaggccaagatcacagagctggacaaccagctgatcaccatgcccctgccccacatccccctgaagaacatcatggatgtggagatgaagctggtgtacattgatgagatgggcgtgcgctatgaatttgtggagagcttcatgagcacaggcagccagcccacctgccaggccgctgagatcgtggaccccctgtctgtgcacaacttctccttcctgccccagattgacaagtggctgcaggtggccctgaaggatgccagcagctgctaccggcagaagaagtatgccctggccgccggccagttcagaacagccctggagctgtgcagcaaaggagctgtgctgggggagccctttgatgccccagcagaagatattgcctctgtggccagcttcatcgagaccaagctggtgacctgctacctgaggatgaggaagccagacctggccctgaaccacgcccacaggagcatcgtgctgaacccagcctacttcaggaaccacctgcggcaggccaccgtcttccgctgcctggagcgctacagcgaggccgcccggagcgccatgattgctgactacatgttctggctgggcggcggccgggaggagagcatcagcaagctgatcaagctgtactggcaggccatgattgaggaggccatcaccagggctgagagcttctctgtgatgtacaccccatttgccaccaagatccgggctgacaagattgagaaggtgaaggatgccttcaccaagacccacccagcctatgcagagtacatgtacacagacctgcaggccctgcacatgctgccccagacagtggactggagcagcttccccccccagcagtacctgctgaccctgggcttcaagaacaaggatgatggcaagttcctggagaagatcagcagcaggaagctgcccatcttcacagagcacaagaccccatttggcctgacccgggaggacacagtgcggcagatggagaccatgggcaagaggatcctgcccatcctggacttcatccgcagcacccagctgaatggcagcttccctgccagcagtggagtgatggagaagctgcagtatgccagcctgctgagccagctgcagagggtgaaggagcagagccaggtgatcaaccaggccatggccgagctggccaccatcccctacctgcaggacatcagccagcaggaggccgagctgctgcagagcctgatggctgatgccatggacaccctggagggcagaagaaacaacaatgaaagagtgtggaacatgatccagaaggtgggccagatcgaggacttcctgtaccagctggaggacagcttcctgaagaccaagaagctgaggacagcccggcggcagaagaccaagatgaagaggctgcagacagtgcagcagaggtag

SEQ ID NO: 171391 - DNA, 1086 bp, synthetic construct
  misc_feature 1..1086: note = Description of Artificial Sequence: Synthetic coding sequence
  source 1..1086: mol_type = other DNA
atggccaccctggcccggctgcaggcccggagcagcacagtgggcaaccagtactacttcagaaattctgtggtggaccccttcaggaagaaggaaaatgatgctgctgtgaagatccagagctggttccggggctgccaggtgcgggcctacatccgccacctgaaccgcatcgtgaccatcatccagaagtggtggaggagcttcctgggcaggaagcagtaccagctgactgtgcaggtggcctactacaccatgatgatgaacctgtacaatgccatggctgtgcgcatccagaggcgctggaggggctacagagtgaggaagtacctgttcaactactactacctgaaggagtacctgaaggtggtgtctgagaccaatgatgccatcaggaaggccctggaggagtttgctgagatgaaggagcgggaggagaagaaggccaacctggagcgggaggagaagaagagggactaccaggccaggaagatgcactacctgctgagcaccaagcagatccctggcatctacaacagccccttcaggaaggagccagacccctgggagctgcagctgcagaaggccaagcccctgacccaccggcggcccaaggtgaagcagaaggacagcaccagcctgacagactggctggcctgcaccagcgcccgctccttccccaggtctgagatcctgccccccatcaacaggaagcagtgccagggccccttccgggacatcacagaggtgctggagcagcgctaccggcccctggagcccaccctgcgggtggccgagcccattgatgagctgaagctggcccgggaggagctgcggcgggaggagtggctgcagaatgtgaatgacaacatgttcctgcccttcagcagctaccacaagaatgagaagtacatccccagcatgcacctgagcagcaaatatggccccatctcctacaaggagcagttccgctctgagaaccccaagaagtggatctgtgacaaggacttccagacagtgctgcccagctttgagctgttcagcaaatatggcaagctgtacagcaaggccggccagatcgtgtag

SEQ ID NO: 171392 - DNA, 1617 bp, synthetic construct
  misc_feature 1..1617: note = Description of Artificial Sequence: Synthetic coding sequence
  source 1..1617: mol_type = other DNA
atggccgagaacctgaagaggctggtgtccaatgagaccctgcggaccctgcaggagaagctggacttctggctgaaggagtacaacaccaacacctgtgaccagaacctgaaccactgcctggagctgattgagcaggtggccaaggtgcagggccagctgtttggcatcctgacagctgctgcccaggagggcggcagaaatgatggagtggagaccatcaagagccggctgctgccctggctggaggccagcttcaccgctgccagcctgggcaagtctgtggacagcaaggtgcccagcctgcaggacacctttgaccgggagcggcacaaggaccccagcccccgggaccgggacatgcagcagctggacagcaacctgaacagcaccaggagccagtgcaaccaggtgcaggatgacctggtggagacagagaagaacctggaggagagcaagaacagaagtgccatcagcctgctggccgctgaggaggagatcaaccagctgaagaagcagctgaagagcctgcaggcccaggaggatgcccggcacaggaacacagaccagaggagcagcgagaacagaagaagtgagccctggagcctggaggagaggaagcgggagcagtggaacagcctgaagcagaatgctgaccagcaggacacagaggccatgtctgactacaagaagcagctgaggaacctgaaggaggagattgctgtgctgtctgctgagaagagcgccctgcagggccgcagcagccgcagccgcagccccagccctgcccccaggagccgcagctgcagccgcagccgcagcgccagccccagcacagctgtgaaggtgcggcggcccagccccaacagaagcaagctgagcaatgtggccaggaaggccgccctgctgagccgcttcagtgacagctacagccaggcccggctggatgcccagtgcctgctgcggcgctgcatcgacaaggccgagaccgtgcagaggatcatctacatcgccaccgtggaggccttccacgtggccaagatggccttccgccacttcaagatccacgtgaggaagagcctgacccccagctatgtgggcagcaatgactttgaaaatgctgtgctggactatgtgatctgccacctggacctgtatgacagccagagctctgtgaatgatgtgatccgggccatgaatgtgaaccccaagatctccttcccccctgtggtggacttctgcctgctgagtgacttcatccaggagatctgctgcatcgcctttgccatgcaggccctggagccccccctggacatcgcctatggagcagatggagaggtgttcaatgactgcaagtaccgccgctcctatgacagcgacttcaccgcccccctggtgctgtaccacgtgtggccagccctgatggagaatgactgtgtgatcatgaagggggaggccgtgaccaggagaggagccttctggaacagcgtgcgctctgtgagccgctgccgcagccgcagcctgagccccatctgccccaggagccagatcggcctgaacaccatgagccgcagccgcagccccagccccatccgctgtggcctgccccgcttctag

SEQ ID NO: 171393 - DNA, 504 bp, synthetic construct
  misc_feature 1..504: note = Description of Artificial Sequence: Synthetic coding sequence
  source 1..504: mol_type = other DNA
atgatcatcaccacctggatcgtgtacatcctggccaggaagggcgtgggcctgcccttcctgcccatcaccagcagtgacattgatgtggtggagagcgaggccgtgtctgtgctgcaccactggctgaagaagacagaggaggaggccagccggggcatcaaggagaagctgagcatcaaccaccccagccagggcgtgcgggagaagatgagcacagacagcccccccacccacggccaggacatccacgtgaccagagatgtggtgaagcaccacctgagcaagagtgacctgctggccaaccagagccaggaggtgctggaggagaggacccgcatccagttcatccgctggagccacacccgcatcttccaggtgcccagcgagatgacagaggacatcatgagggaccgcatcgagcaggtgcggcgcagcatcagccggctgacagatgtgtctgcccaggacttctccatgaggcccagcagcagtgactgctag

SEQ ID NO: 171394 - DNA, 504 bp, synthetic construct; identical to SEQ ID NO: 171393
  misc_feature 1..504: note = Description of Artificial Sequence: Synthetic coding sequence
  source 1..504: mol_type = other DNA

SEQ ID NO: 171395 - DNA, 1563 bp, synthetic construct
  misc_feature 1..1563: note = Description of Artificial Sequence: Synthetic coding sequence
  source 1..1563: mol_type = other DNA
atgggcaagcccagctccatggacaccaagttcaaggatgacctcttcagaaaatatgtgcagttccacgagagcaaggtggacaccaccaccagccggcagaggcctggcagtgatgagtgcctgcgggtggccgccagcaccctgctgagcctgcacaaggtggaccccttctaccgcttccgcctcatccagttctatgaggtggtggagagcagcctgcggagcctgagcagcagcagcctgcgggccctgcacggggccttctccatgctggagaccgtgggcatcaacctcttcctgtacccctggaagaaggagttccgcagcatcaagacctacacaggcccctttgtgtactacgtgaagagcaccctgctggaggaggacatccgggccatcctgagctgcatgggctacaccccagagctgggcacagcctacaagctgcgggagctggtggagaccctgcaggtgaagatggtgtcctttgagctgttcctggccaaggtggagtgtgagcagatgctggagatccacagccaggtgaaggacaagggctacagcgagctggacatcgtgtctgagaggaagagcagcgcagaagatgtgcggggctgcagtgatgccctgcggaggagagctgagggccgggagcacctgacagcctccatgagccgggtggccctgcagaagagcgccagcgagcgggccgccaaggactactacaagccccgggtgaccaagcccagccgctctgtggatgcctatgacagctactgggagagcaggaagccacccctgaaggccagcctgagcctgaggaaggagcctgtggccacagatgtgggagatgacctgaaggatgagatcatccggcccagccccagcctgctgaccatggccagcagcccccacggcagcccagatgtgctgcccccagccagccccagcaatggacctgccctgctgcggggcacctacttcagcacccaggatgatgtggacctgtacacagattctgagccccgggccacctaccgccggcaggatgccctgcggccagatgtgtggctgctgagaaatgatgcccacagcctgtaccacaagaggagccccccagccaaggagagcgccctgagcaagtgccagagctgtggcctgagctgcagcagcagcctgtgccagagatgtgacagcctgctgacctgccccccagccagcaagcccagcgccttccccagcaaggccagcacccatgacagcctggcccatggagccagcctgcgggagaagtacccaggccagacccagggcctggaccggctgccccacctgcacagcaagagcaagcccagcaccacccccaccagccgctgtggcttctgcaacagacctggggccaccaacacctgcacccagtgcagcaaggtgtcctgtgatgcctgcctgagcgcctaccactatgacccctgctacaagaagtctgagctgcacaagttcatgcccaacaaccagctgaactacaagagcacccagctgagccacctggtgtacagatag

SEQ ID NO: 171396 - DNA, 1563 bp, synthetic construct; identical to SEQ ID NO: 171395
  misc_feature 1..1563: note = Description of Artificial Sequence: Synthetic coding sequence
  source 1..1563: mol_type = other DNA

SEQ ID NO: 171397 - DNA, 1152 bp, synthetic construct
  misc_feature 1..1152: note = Description of Artificial Sequence: Synthetic coding sequence
  source 1..1152: mol_type = other DNA
atgggctacaccccagagctgggcacagcctacaagctgcgggagctggtggagaccctgcaggtgaagatggtgtcctttgagctgttcctggccaaggtggagtgtgagcagatgctggagatccacagccaggtgaaggacaagggctacagcgagctggacatcgtgtctgagaggaagagcagcgcagaagatgtgcggggctgcagtgatgccctgcggcggcgggcagagggccgggagcacctgacagcctccatgagccgggtggccctgcagaagagcgccagcgagagagctgccaaggactactacaagccccgggtgaccaagcccagccgctctgtggatgcctatgacagctactgggagagcaggaagccacccctgaaggccagcctgagcctgaggaaggagcctgtggccacagatgtgggagatgacctgaaggatgagatcatccggcccagccccagcctgctgaccatggccagcagcccccacggcagcccagatgtgctgcccccagccagccccagcaatggacctgccctgctgcggggcacctacttcagcacccaggatgatgtggacctgtacacagacagcgagccccgggccacctaccgccggcaggatgccctgcggccagatgtgtggctgctgagaaatgatgcccacagcctgtaccacaagaggagccccccagccaaggagagcgccctgagcaagtgccagagctgtggcctgagctgcagcagcagcctgtgccagagatgtgacagcctgctgacctgccccccagccagcaagcccagcgccttccccagcaaggccagcacccatgacagcctggcccacggggccagcctgcgggagaagtacccaggccagacccagggcctggaccggctgccccacctgcacagcaagagcaagcccagcaccacccccaccagccgctgtggcttctgcaacagacctggggccaccaacacctgcacccagtgcagcaaggtgtcctgtgatgcctgcctgagcgcctaccactatgacccctgctacaagaagtctgagctgcacaagttcatgcccaacaaccagctgaactacaagagcacccagctgagccacctggtgtacagatag

SEQ ID NO: 171398 - DNA, 2409 bp, synthetic construct
  misc_feature 1..2409: note = Description of Artificial Sequence: Synthetic coding sequence
  source 1..2409: mol_type = other DNA
atgctgggcgcccgggcctggctgggccgggtgctgctgctgcccagggctggagctggcctggccgccagccgccgctgccctggggtgtggcccaggacctggccccacaggagccccagccggggcagcagcagccgggacaaggacagaagtgccaccgtgagcagctctgtgcccatgcctgctgggggcaagggcagccaccccagcagcaccccccagagggtgcccaacagactcatccacgagaagagcccctacctgctgcagcacgcctacaaccctgtggactggtacccctggggccaggaggcctttgacaaggccaggaaagaaaacaagcccatcttcctgtctgtgggctacagcacctgccactggtgccacatgatggaggaggagagcttccagaatgaggagatcggccgcctgctgtctgaggactttgtgtctgtgaaggtggaccgggaggagaggccagatgtggacaaggtgtacatgacctttgtgcaggccaccagcagcggcggcggctggcccatgaatgtgtggctgacccccaacctgcagccctttgtgggcggcacctacttccccccagaagatggcctgaccagggtgggcttcagaacagtgctgctgcgcatccgggagcagtggaagcagaacaagaacaccctgctggagaacagccagagggtgaccacagccctgctggcccggtctgagatctctgtgggggaccggcagctgcccccatctgctgccaccgtgaacaaccgctgcttccagcagctggatgagggctatgatgaggagtatggaggctttgctgaggcccccaagttccccacccctgtgatcctgtccttcctgttctcctactggctgagccaccggctgacccaggacggcagccgggcccagcagatggccctgcacaccctgaagatgatggccaacggcggcatccgggaccacgtgggccagggcttccaccgctacagcacagaccggcagtggcacgtgccccactttgagaagatgctgtatgaccaggcccagctggccgtggcctacagccaggccttccagctgtctggagatgagttctacagtgatgtggccaagggcatcctgcagtatgtggcccggagcctgagccacaggtctgggggcttctacagcgcagaagatgctgacagccccccagagcggggccagaggcccaaggagggcgcctactacgtgtggacagtgaaggaggtgcagcagctgctgcctgagcctgtgctgggcgccacagagcccctgaccagcggccagctgctgatgaagcactacggcctgacagaggccggcaacatcagccccagccaggaccccaagggggagctgcagggccagaatgtgctgactgtgcgctacagcctggagctgacagctgcccgcttcggcctggatgtggaggccgtgaggaccctgctgaacagcggcctggagaagctgttccaggccaggaagcaccggcccaagccccacctggacagcaagatgctggccgcctggaatggcctgatggtgtctggctatgctgtgactggagctgtgctgggccaggacaggctcatcaactatgccaccaacggggccaagttcctgaagaggcacatgtttgatgtggccagcggccgcctgatgaggacctgctacacaggccctgggggcaccgtggagcacagcaaccccccctgctggggcttcctggaggactatgcctttgtggtgcggggcctgctggacctgtatgaggccagccaggagagcgcctggctggagtgggccctgcggctgcaggacacccaggacaagctgttctgggacagccagggcggcggctacttctgcagcgaggccgagctgggcgccggcctgcccctgcggctgaaggatgaccaggatggagctgagcccagcgccaacagcgtgtctgcccacaacctgctgcggctgcacggcttcaccggccacaaggactggatggacaagtgtgtgtgcctgctgacagccttcagcgagaggatgagaagagtgcctgtggccctgcctgagatggtgcgggccctgagcgcccagcagcagaccctgaagcagatcgtcatctgtggggaccggcaggccaaggacaccaaggccctggtgcagtgtgtgcacagcgtgtacatccccaacaaggtgctgatcctggctgatggagaccccagcagcttcctgagccggcagctgcccttcctgagcaccctgcggcggctggaggaccaggccacagcctacgtgtgtgagaaccaggcctgcagcgtgcccatcacagacccctgtgagctgaggaagctgctgcacccctag

SEQ ID NO: 171399 - DNA, 2361 bp, synthetic construct
  misc_feature 1..2361: note = Description of Artificial Sequence: Synthetic coding sequence
  source 1..2361: mol_type = other DNA
atgctgggcgcccgggcctggctgggccgggtgctgctgctgcccagggctggagctggcctggccgccagcagaagaggcagcagcagccgggacaaggacagaagtgccaccgtgagcagctctgtgcccatgcctgctgggggcaagggcagccaccccagcagcaccccccagagggtgcccaacagactcatccacgagaagagcccctacctgctgcagcacgcctacaaccctgtggactggtacccctggggccaggaggcctttgacaaggccaggaaagaaaacaagcccatcttcctgtctgtgggctacagcacctgccactggtgccacatgatggaggaggagagcttccagaatgaggagatcggccgcctgctgtctgaggactttgtgtctgtgaaggtggaccgggaggagaggccagatgtggacaaggtgtacatgacctttgtgcaggccaccagcagcggcggcggctggcccatgaatgtgtggctgacccccaacctgcagccctttgtgggcggcacctacttccccccagaagatggcctgaccagggtgggcttcagaacagtgctgctgcgcatccgggagcagtggaagcagaacaagaacaccctgctggagaacagccagagggtgaccacagccctgctggcccggtctgagatctctgtgggggaccggcagctgcccccatctgctgccaccgtgaacaaccgctgcttccagcagctggatgagggctatgatgaggagtatggaggctttgctgaggcccccaagttccccacccctgtgatcctgtccttcctgttctcctactggctgagccaccggctgacccaggacggcagccgggcccagcagatggccctgcacaccctgaagatgatggccaacggcggcatccgggaccacgtgggccagggcttccaccgctacagcacagaccggcagtggcacgtgccccactttgagaagatgctgtatgaccaggcccagctggccgtggcctacagccaggccttccagctgtctggagatgagttctacagtgatgtggccaagggcatcctgcagtatgtggcccggagcctgagccacaggtctgggggcttctacagcgcagaagatgctgacagccccccagagcggggccagaggcccaaggagggcgcctactacgtgtggacagtgaaggaggtgcagcagctgctgcctgagcctgtgctgggcgccacagagcccctgaccagcggccagctgctgatgaagcactacggcctgacagaggccggcaacatcagccccagccaggaccccaagggggagctgcagggccagaatgtgctgactgtgcgctacagcctggagctgacagctgcccgcttcggcctggatgtggaggccgtgaggaccctgctgaacagcggcctggagaagctgttccaggccaggaagcaccggcccaagccccacctggacagcaagatgctggccgcctggaatggcctgatggtgtctggctatgctgtgactggagctgtgctgggccaggacaggctcatcaactatgccaccaacggggccaagttcctgaagaggcacatgtttgatgtggccagcggccgcctgatgaggacctgctacacaggccctgggggcaccgtggagcacagcaaccccccctgctggggcttcctggaggactatgcctttgtggtgcggggcctgctggacctgtatgaggccagccaggagagcgcctggctggagtgggccctgcggctgcaggacacccaggacaagctgttctgggacagccagggcggcggctacttctgcagcgaggccgagctgggcgccggcctgcccctgcggctgaaggatgaccaggatggagctgagcccagcgccaacagcgtgtctgcccacaacctgctgcggctgcacggcttcaccggccacaaggactggatggacaagtgtgtgtgcctgctgacagccttcagcgagaggatgagaagagtgcctgtggccctgcctgagatggtgcgggccctgagcgcccagcagcagaccctgaagcagatcgtcatctgtggggaccggcaggccaaggacaccaaggccctggtgcagtgtgtgcacagcgtgtacatccccaacaaggtgctgatcctggctgatggagaccccagcagcttcctgagccggcagctgcccttcctgagcaccctgcggcggctggaggaccaggccacagcctacgtgtgtgagaaccaggcctgcagcgtgcccatcacagacccctgtgagctgaggaagctgctgcacccctag

SEQ ID NO: 171400 - DNA, 2229 bp, synthetic construct
  misc_feature 1..2229: note = Description of Artificial Sequence: Synthetic coding sequence
  source 1..2229: mol_type = other DNA
atgcctgctgggggcaagggcagccaccccagcagcaccccccagagggtgcccaacagactcatccacgagaagagcccctacctgctgcagcacgcctacaaccctgtggactggtacccctggggccaggaggcctttgacaaggccaggaaagaaaacaagcccatcttcctgtctgtgggctacagcacctgccactggtgccacatgatggaggaggagagcttccagaatgaggagatcggccgcctgctgtctgaggactttgtgtctgtgaaggtggaccgggaggagaggccagatgtggacaaggtgtacatgacctttgtgcaggccaccagcagcggcggcggctggcccatgaatgtgtggctgacccccaacctgcagccctttgtgggcggcacctacttccccccagaagatggcctgaccagggtgggcttcagaacagtgctgctgcgcatccgggagcagtggaagcagaacaagaacaccctgctggagaacagccagagggtgaccacagccctgctggcccggtctgagatctctgtgggggaccggcagctgcccccatctgctgccaccgtgaacaaccgctgcttccagcagctggatgagggctatgatgaggagtatggaggctttgctgaggcccccaagttccccacccctgtgatcctgtccttcctgttctcctactggctgagccaccggctgacccaggacggcagccgggcccagcagatggccctgcacaccctgaagatgatggccaacggcggcatccgggaccacgtgggccagggcttccaccgctacagcacagaccggcagtggcacgtgccccactttgagaagatgctgtatgaccaggcccagctggccgtggcctacagccaggccttccagctgtctggagatgagttctacagtgatgtggccaagggcatcctgcagtatgtggcccggagcctgagccacaggtctgggggcttctacagcgcagaagatgctgacagccccccagagcggggccagaggcccaaggagggcgcctactacgtgtggacagtgaaggaggtgcagcagctgctgcctgagcctgtgctgggcgccacagagcccctgaccagcggccagctgctgatgaagcactacggcctgacagaggccggcaacatcagccccagccaggaccccaagggggagctgcagggccagaatgtgctgactgtgcgctacagcctggagctgacagctgcccgcttcggcctggatgtggaggccgtgaggaccctgctgaacagcggcctggagaagctgttccaggccaggaagcaccggcccaagccccacctggacagcaagatgctggccgcctggaatggcctgatggtgtctggctatgctgtgactggagctgtgctgggccaggacaggctcatcaactatgccaccaacggggccaagttcctgaagaggcacatgtttgatgtggccagcggccgcctgatgaggacctgctacacaggccctgggggcaccgtggagcacagcaaccccccctgctggggcttcctggaggactatgcctttgtggtgcggggcctgctggacctgtatgaggccagccaggagagcgcctggctggagtgggccctgcggctgcaggacacccaggacaagctgttctgggacagccagggcggcggctacttctgcagcgaggccgagctgggcgccggcctgcccctgcggctgaaggatgaccaggatggagctgagcccagcgccaacagcgtgtctgcccacaacctgctgcggctgcacggcttcaccggccacaaggactggatggacaagtgtgtgtgcctgctgacagccttcagcgagaggatgagaagagtgcctgtggccctgcctgagatggtgcgggccctgagcgcccagcagcagaccctgaagcagatcgtcatctgtggggaccggcaggccaaggacaccaaggccctggtgcagtgtgtgcacagcgtgtacatccccaacaaggtgctgatcctggctgatggagaccccagcagcttcctgagccggcagctgcccttcctgagcaccctgcggcggctggaggaccaggccacagcctacgtgtgtgagaaccaggcctgcagcgtgcccatcacagacccctgtgagctgaggaagctgctgcacccctag

SEQ ID NO: 171401 - DNA, 228 bp, synthetic construct
  misc_feature 1..228: note = Description of Artificial Sequence: Synthetic coding sequence
  source 1..228: mol_type = other DNA
ggccagggccaccagggccctggccagtgtgtgcacagcgtgtacatccccaacaaggtgctgatcctggctgatggagaccccagcagcttcctgagccggcagctgcccttcctgagcaccctgcggcggctggaggaccaggccacagcctacgtgtgtgagaaccaggcctgcagcgtgcccatcacagacccctgtgagctgaggaagctgctgcacccctag

SEQ ID NO: 171402 - DNA, 132 bp, synthetic construct
  misc_feature 1..132: note = Description of Artificial Sequence: Synthetic coding sequence
  source 1..132: mol_type = other DNA
atgctgggcgcccgggcctggctgggccgggtgctgctgctgcccagggctggagctggcctggccgccagcagaagaagtgcctgcagccccaccagccggctgaacagcctgcggagcctcatcccctag

SEQ ID NO: 171403 - DNA, 918 bp, synthetic construct
  misc_feature 1..918: note = Description of Artificial Sequence: Synthetic coding sequence
  source 1..918: mol_type = other DNA
atggctgctgctggccaggagaagggctacctgacccagacagctgctgccctggacaagagccccagcctgagcccccagctggccgcccccatccggggccggcccaagaagtgcctggtgtacccccacgcccccaagagcagccggctgagccgctctgtgctgcgctggctgcagggcctggacctgtccttcttccccaggaacatcaacagagacttcagcaatggcttcctgattgctgagatcttctgcatctactacccctgggagctggagctgagcagctttgaaaatggcaccagcctgaaggtgaagctggacaactgggcccagctggagaagttcctggccaggaagaagttcaagctgcccaaggagctgattcatggcaccatccactgcaaggccggcgtgcctgagatcctgattgaggaggtgtacaccctgctgacccaccgggagatcaagagcatccaggatgactttgtgaacttcacagactacagctaccagatgaggctgcccctggtgagccgcagcacagtgtccaagagcatcaaggacaacatccggctgtctgagctgctgagcaaccccaacatgctgaccaatgagctgaaggccgagttcctgatcctgctgcacatgctgcagaggaagctgggcaggaagctgaaccctgagtggtttgatgtgaagcccaccgtgggggaggtgaccctgaaccacctgcctgcccaggccagcggccgccgctacaacctgaaggtgaagaggggccgggtggtgcctgtgctgcccaacatcggcagcggcggcagcagccaccgggagatccacgtgaagcaggccggccagcacagctactacagcgccatgaagcccatccggaacatggacaagaagccctag

SEQ ID NO: 171404 - DNA, 2682 bp, synthetic construct
  misc_feature 1..2682: note = Description of Artificial Sequence: Synthetic coding sequence
  source 1..2682: mol_type = other DNA
atgagcagcaagaagaacaggaagaggctgaaccagagcgcagaaaatggcagcagcctgcccagcgctgccagcagctgtgccgaggcccgggcccccagcgctggcagtgactttgctgccaccagcggcaccctgactgtgaccaacctgctggagaaggtggatgacaagatccccaagaccttccagaacagcctcatccacctgggcctgaacaccatgaagagcgccaacatctgcatcggccggcctgtgctgctgaccagcctgaatggcaagcaggaggtgtacacagcctggcccatggccggcttccctgggggcaaggtgggcctgtctgagatggcccagaagaatgtgggcgtgcggcctggagatgccatccaggtgcagcccctggtgggcgctgtgctgcaggccgaggagatggatgtggccctgagtgacaaggacatggagatcaatgaggaggagctgaccggctgcatcctgaggaagctggatggcaagatcgtgctgcccggcaacttcctgtactgcaccttctacggccggccctacaagctgcaggtgctgcgggtgaagggagcagatggcatgatcctgggcggcccccagagcgacagcgacacagatgcccagaggatggcctttgagcagagctccatggagaccagcagcctggagctgagcctgcagctgagccagctggacctggaggacacccagatccccaccagccgcagcaccccctacaagcccattgatgaccgcatcaccaacaaggccagtgatgtgctgctggatgtgacccagagccctggagatggcagcggcctgatgctggaggaggtgacaggcctgaagtgcaactttgaaagtgcccgggagggcaatgagcagctgacagaggaggagcggctgctgaagttcagcatcggggccaagtgcaacacagacaccttctacttcatcagcagcaccaccagggtgaacttcacagaaattgacaagaacagcaaggagcaggacaaccagttcaaggtgacctatgacatgattggaggcctgagcagccagctgaaggccatccgggagatcatcgagctgcccctgaagcagcctgagctgttcaagagctatggcatcccagccccccggggcgtgctgctgtatggccccccaggcaccgggaagaccatgattgcccgggctgtggccaatgaggtgggcgcctacgtgtctgtcatcaatggacctgagatcatcagcaagttctacggggagacagaggccaagctgcggcagatctttgctgaggccaccctgcggcaccccagcatcatcttcattgatgagctggatgccctgtgccccaagcgggagggcgcccagaatgaggtggagaagagggtggtggccagcctgctgaccctgatggatggcatcggcagcgaggtgtctgagggccaggtgctggtgctgggcgccaccaaccggccccacgccctggatgctgccctgcggcggcccggccgctttgacaaggagattgaaattggagtgcccaatgcccaggaccggctggacatcctgcagaagctgctgcggcgggtgccccacctgctgacagaagctgagctgctgcagctggccaacagcgcccacggctacgtgggcgctgacctgaaggtgctgtgcaatgaagctggcctgtgtgccctgcggcgcatcctgaagaagcagcccaacctgcctgatgtgaaggtggccggcctggtgaagatcaccctgaaggacttcctgcaggccatgaatgacatccggcccagcgccatgagagaaattgccattgatgtgcccaacgtgtcctggagcgacattggaggcctggagagcatcaagctgaagctggagcaggccgtggagtggcccctgaagcaccctgagagcttcatccgcatgggcatccagccccccaagggcgtgctgctgtatggccccccaggctgcagcaagaccatgattgccaaggccctggccaatgaaagtggcctgaacttcctggccatcaagggccctgagctgatgaacaagtatgtgggggagagcgagagagctgtgcgggagaccttcaggaaggcccgggctgtggcccccagcatcatcttctttgatgagctggatgccctggccgtggagcggggcagcagcctgggcgctggaaatgtggccgacagagtgctggcccagctgctgacagagatggatggcatcgagcagctgaaggatgtgaccatcctggccgccaccaacagaccagacagaattgacaaggccctgatgaggcctggaagaattgaccgcatcatctacgtgcccctgcctgatgctgccacccggcgggagatcttcaagctgcagttccacagcatgcctgtgtccaatgaggtggacctggatgagctgatcctgcagacagatgcctacagcggggctgagatcgtggccgtgtgccgggaggccgccctgctggccctggaggaggacatccaggccaacctgatcatgaagaggcacttcacccaggccctgagcacagtgaccccccgcatccctgagagcctgcggcgcttctatgaggactaccaggagaagagcggcctgcacaccctgtag

SEQ ID NO: 171405 - DNA, 750 bp, synthetic construct
  misc_feature 1..750: note = Description of Artificial Sequence: Synthetic coding sequence
  source 1..750: mol_type = other DNA
atgcagctggacaagttcatctaccacctggcccctgtggagaagagccacggccgcctgcagaacagaaccagccgcagccagaagaagaagagcaagagccctgagaggagcaagtactgcatcaatgccaagaactatgagcagcccaccatcagcagcaagagccacagccccagcccctacaccaagaggaggatgtgtgagctgtctgaggacacccggcggcggctggcccacctgaacctgggcccctatgagttcaagaaggagacagacaagcccccatttgtgatcagacatgtggacccccccagccccagggctgacaccctgctgggcagcagcggccgggactgtgaaagagatggctggagccgggtgcacaatgaccacagccacctgggctgctgccggcccaaggactacaaggtgatccgcaccccccacggccgggactttgatgacagcctggagaagtgtgaggagtacctgagccccaggagctgcagcaagcccaggcacagcgcccggaccctgctggtgcacagcgcccccagcaccatgcccaagcacagccccagccctgtgctgaacagagccagcctgcgggagcgcttccacagcgactggtgcagccccagcaactgtgatgagatccatgacagagatgagcgggacctggagaaggatgatgagctggagctgaagaggagcctgctgtgccgggacagcgcctatgacagctag

SEQ ID NO: 171406 - DNA, 1419 bp, synthetic construct
  misc_feature 1..1419: note = Description of Artificial Sequence: Synthetic coding sequence
  source 1..1419: mol_type = other DNA
atgcccaaggtgaaggccctgcagtgtgccctggccctggagatcagctctgtgacctgccctggggtggtgctgaaggacaaggaggacatctacctgagcatctgtgtgtttggccagtacaagaagacccagtgtgtgcctgccaccttccccctggtgttcaatgccaggatggtgtttgagaaggtgtttcctgatgctgtggaccctggagatgtggtgacccagctggagtatgacacagctgtgtttgagctgatccagctggtgccccctgtgggggagaccctgagcacctatgatgagaacacccgggacttcatgtttcctggccccaaccagatgagcggccaccacgacagcaaccggcaggtgaccatgaggcgcatcagcggcctgcggggaaatgccccccggctggagttcagcaccaccagcgtcatcacagaatgtctcatcagcagcaggaagtgccacacccaggacaagttcatctaccacctggcccctgtggagaagagccacggccgcctgcagaacagaaccagccgcagccagaagaagaagagcaagagccctgagaggagcaagtactgcatcaatgccaagaactatgagcagcccaccatcagcagcaagagccacagccccagcccctacaccaagaggaggatgtgtgagctgtctgaggacacccggcggcggctggcccacctgaacctgggcccctatgagttcaagaaggagacagacaagccacccttcgtcatccgccacgtggacccccccagccccagggctgacaccctgctgggcagcagcggccgggactgtgaaagagatggctggagccgggtgcacaatgaccacagccacctgggctgctgccggcccaaggactacaaggtgatccgcacccctcatggccgggactttgatgacagcctggagaagtgtgaggagtacctgagccccaggagctgcagcaagcccaggcacagcgcccggaccctgctggtgcacagcgcccccagcaccatgcccaagcacagccccagccctgtgctgaacagagccagcctgcgggagcgcttccacagcgactggtgcagccccagcaactgtgatgagatccatgacagagatgagcgggacctggagaaggatgatgagctggagctgaagaggagcctgctgtgccgggacagcgcctatgacagcgaccctgagtacagcagctgccagcagccccggggcaccttccacctggatgatggagagtactggagcaacagagctgccagctacaagggcaagagccaccggcccatctttgaaaattccatggacaagatgtacagaaacctgtacaagaaggcctgcagcagcgccagccacacccaggagagcttctag

SEQ ID NO: 171407 - DNA, 1467 bp, synthetic construct
  misc_feature 1..1467: note = Description of Artificial Sequence: Synthetic coding sequence
  source 1..1467: mol_type = other DNA
atgcccaaggtgaaggccctgcagtgtgccctggccctggagatcagctctgtgacctgccctggggtggtgctgaaggacaaggaggacatctacctgagcatctgtgtgtttggccagtacaagaagacccagtgtgtgcctgccaccttccccctggtgttcaatgccaggatggtgtttgagaaggtgtttcctgatgctgtggaccctggagatgtggtgacccagctggagtatgacacagctgtgtttgagctgatccagctggtgccccctgtgggggagaccctgagcacctatgatgagaacacccgggacttcatgtttcctggccccaaccagatgagcggccaccacgacagcaaccggcaggtgaccatgaggcgcatcagcggcctgcggggaaatgccccccggctggagttcagcaccaccagcgtcatcacagaatgtctcatcagcagcaggaagtgccacacccaggacaagttcatctaccacctggcccctgtggagaagagccacggccgcctgcagaacagaaccagccgcagccagaagaagaagagcaagagccctgagaggagcaagtactgcatcaatgccaagaactatgagcagcccaccatcagcagcaagagccacagccccagcccctacaccaagaggaggatgtgtgagctgtctgaggacacccggcggcggctggcccacctgaacctgggcccctatgagttcaagaaggagacagacaagccacccttcgtcatccgccacgtggacccccccagccccagggctgacaccctgctgggcagcagcggccgggactgtgaaagagatggctggagccgggtgcacaatgaccacagccacctgggctgctgccggcccaaggactacaaggtgatccgcacccctcatggccgggactttgatgacagcctggagaagtgtgaggagtacctgagccccaggagctgcagcaagcccaggcacagcgcccggaccctgctggtgcacagcgcccccagcaccatgcccaagcacagccccagccctgtgctgaacagagccagcctgcgggagcgcttccacagcgactggtgcagccccagcaactgtgatgagatccatgacagagtgaagaatgtgctgaagagccaccaggcccaccagaggcacctgtatgatgagcgggacctggagaaggatgatgagctggagctgaagaggagcctgctgtgccgggacagcgcctatgacagcgaccctgagtacagcagctgccagcagccccggggcaccttccacctggatgatggagagtactggagcaacagagctgccagctacaagggcaagagccaccggcccatctttgaaaattccatggacaagatgtacagaaacctgtacaagaaggcctgcagcagcgccagccacacccaggagagcttctag

SEQ ID NO: 171408 - DNA, 1251 bp, synthetic construct
  misc_feature 1..1251: note = Description of Artificial Sequence: Synthetic coding sequence
  source 1..1251: mol_type = other DNA
atggtgtttgagaaggtgtttcctgatgctgtggaccctggagatgtggtgacccagctggagctgggggagaccctgagcacctatgatgagaacacccgggacttcatgtttcctggccccaaccagatgagcggccaccacgacagcaaccggcaggtgaccatgaggcgcatcagcggcctgcggggaaatgccccccggctggagttcagcaccaccagcgtcatcacagaatgtctcatcagcagcaggaagtgccacacccaggacaagttcatctaccacctggcccctgtggagaagagccacggccgcctgcagaacagaaccagccgcagccagaagaagaagagcaagagccctgagaggagcaagtactgcatcaatgccaagaactatgagcagcccaccatcagcagcaagagccacagccccagcccctacaccaagaggaggatgtgtgagctgtctgaggacacccggcggcggctggcccacctgaacctgggcccctatgagttcaagaaggagacagacaagccacccttcgtcatccgccacgtggacccccccagccccagggctgacaccctgctgggcagcagcggccgggactgtgaaagagatggctggagccgggtgcacaatgaccacagccacctgggctgctgccggcccaaggactacaaggtgatccgcacccctcatggccgggactttgatgacagcctggagaagtgtgaggagtacctgagccccaggagctgcagcaagcccaggcacagcgcccggaccctgctggtgcacagcgcccccagcaccatgcccaagcacagccccagccctgtgctgaacagagccagcctgcgggagcgcttccacagcgactggtgcagccccagcaactgtgatgagatccatgacagagtgaagaatgtgctgaagagccaccaggcccaccagaggcacctgtatgatgagcgggacctggagaaggatgatgagctggagctgaagaggagcctgctgtgccgggacagcgcctatgacagcgaccctgagtacagcagctgccagcagccccggggcaccttccacctggatgatggagagtactggagcaacagagctgccagctacaagggcaagagccaccggcccatctttgaaaattccatggacaagatgtacagaaacctgtacaagaaggcctgcagcagcgccagccacacccaggagagcttctag

SEQ ID NO: 171409 - DNA, 1377 bp, synthetic construct
  misc_feature 1..1377: note = Description of Artificial Sequence: Synthetic coding sequence
  source 1..1377: mol_type = other DNA
atggatggcagcagaagagtgcgggccacctctgtgctgcccaggtatggccccccctgcctcttcaagggccacctgagcaccaagagcaatgccttctgcacagacagcagcagcctgcggctgagcaccctgcagctggtgaagaaccacatggctgtgcactacaacaagatcctgagcgccaaggctgctgtggactgcagcgtgcctgtgtctgtgtccaccagcatcaagtatgctgaccagcagaggcgggagaagctgaagaaggagctggcccagtgtgagaaggagttcaagctgaccaagacagccatgagggccaactacaagaacaacagcaagagcctcttcaacaccctgcagaagcccagcggggagccccagattgaagatgacatgctgaaggaggagatgaatggcttcagcagctttgcccggagcctggtgcccagcagcgagcggctgcacctgagcctgcacaagagcagcaaggtgatcaccaacggccctgagaagaacagcagcagcagccccagctctgtggactatgctgccagcggccccaggaagctgagcagcggggccctgtatggaagaagacccaggagcaccttccccaacagccaccgcttccagctggtgatcagcaaggcccccagcggggacctgctggacaagcacagcgagctgttcagcaacaagcagctgcccttcacccccaggaccctgaagacagaggccaagagcttcctgagccagtaccgctactacaccccagccaagaggaagaaggacttcacagaccagagaattgaagctgagacccagacagagctgtccttcaagtctgagctgggcacagctgagaccaagaacatgacagacagcgagatgaacatcaagcaggccagcaactgtgtgacctatgatgccaaggagaagatcgcccccctgcccctggagggccatgacagcacctgggatgagatcaaggatgatgccctgcagcacagcagcccccgggccatgtgccagtacagcctgaagccacccagcaccaggaagatctacagtgatgaggaggagctgctgtacctgtccttcattgaagatgtgacagatgagatcctgaagctgggcctcttcagcaaccgcttcctggagcggctgtttgagcggcacatcaagcagaacaagcacctggaggaggagaagatgaggcacctgctgcacgtgctgaaggtggacctgggctgcaccagtgaagaaaattccttcagctctgtgaagggggacaacaaccacgacatggagctgagcaccctgaagatcatggagatgagcattgaggactgccccctggatgtgtag

SEQ ID NO: 171410 - DNA, 1704 bp, synthetic construct
  misc_feature 1..1704: note = Description of Artificial Sequence: Synthetic coding sequence
  source 1..1704: mol_type = other DNA
atggatggcagcagaagagtgcgggccacctctgtgctgcccaggtatggccccccctgcctcttcaagggccacctgagcaccaagagcaatgctgctgtggactgcagcgtgcctgtgtctgtgtccaccagcatcaagtatgctgaccagcagaggcgggagaagctgaagaaggagctggcccagtgtgagaaggagttcaagctgaccaagacagccatgagggccaactacaagaacaacagcaagagcctcttcaacaccctgcagaagcccagcggggagccccagattgaagatgacatgctgaaggaggagatgaatggcttcagcagctttgcccggagcctggtgcccagcagcgagcggctgcacctgagcctgcacaagagcagcaaggtgatcaccaacggccctgagaagaacagcagcagcagccccagctctgtggactatgctgccagcggccccaggaagctgagcagcggggccctgtatggaagaagacccaggagcaccttccccaacagccaccgcttccagctggtgatcagcaaggcccccagcggggacctgctggacaagcacagcgagctgttcagcaacaagcagctgcccttcacccccaggaccctgaagacagaggccaagagcttcctgagccagtaccgctactacaccccagccaagaggaagaaggacttcacagaccagagaattgaagctgagacccagacagagctgtccttcaagtctgagctgggcacagctgagaccaagaacatgacagacagcgagatgaacatcaagcaggccagcaactgtgtgacctatgatgccaaggagaagatcgcccccctgcccctggagggccatgacagcacctgggatgagatcaaggatgatgccctgcagcacagcagcccccgggccatgtgccagtacagcctgaagccacccagcaccaggaagatctacagtgatgaggaggagctgctgtacctgtccttcattgaagatgtgacagatgagatcctgaagctgggcctcttcagcaaccgcttcctggagcggctgtttgagcggcacatcaagcagaacaagcacctggaggaggagaagatgaggcacctgctgcacgtgctgaaggtggacctgggctgcaccagtgaagaaaattctgtgaagcagaatgatgtggacatgctgaatgtgtttgattttgagaaggccggcaacagcgagcccaatgagctgaagaatgaaagtgaggtgaccatccagcaggagcggcagcagtaccagaaggccctggacatgctgctgagcgcccccaaggatgaaaatgagatcttccccagccccacagagttcttcatgcccatctacaagagcaagcacagcgagggcgtcatcatccagcaggtgaatgatgagaccaacctggagaccagcaccctggatgagaaccaccccagcatcagtgacagcctgacagaccgggagacctctgtgaatgtgattgaaggagacagcgaccctgagaaggtggagatcagcaatggcctgtgtggcctgaacaccagccccagccagagcgtgcagttcagctctgtgaagggggacaacaaccacgacatggagctgagcaccctgaagatcatggagatgagcattgaggactgccccctggatgtgtag

SEQ ID NO: 171411 - DNA, 1800 bp, synthetic construct
  misc_feature 1..1800: note = Description of Artificial Sequence: Synthetic coding sequence
  source 1..1800: mol_type = other DNA
atggatggcagcagaagagtgcgggccacctctgtgctgcccaggtatggccccccctgcctcttcaagggccacctgagcaccaagagcaatgccttctgcacagacagcagcagcctgcggctgagcaccctgcagctggtgaagaaccacatggctgtgcactacaacaagatcctgagcgccaaggctgctgtggactgcagcgtgcctgtgtctgtgtccaccagcatcaagtatgctgaccagcagaggcgggagaagctgaagaaggagctggcccagtgtgagaaggagttcaagctgaccaagacagccatgagggccaactacaagaacaacagcaagagcctcttcaacaccctgcagaagcccagcggggagccccagattgaagatgacatgctgaaggaggagatgaatggcttcagcagctttgcccggagcctggtgcccagcagcgagcggctgcacctgagcctgcacaagagcagcaaggtgatcaccaacggccctgagaagaacagcagcagcagccccagctctgtggactatgctgccagcggccccaggaagctgagcagcggggccctgtatggaagaagacccaggagcaccttccccaacagccaccgcttccagctggtgatcagcaaggcccccagcggggacctgctggacaagcacagcgagctgttcagcaacaagcagctgcccttcacccccaggaccctgaagacagaggccaagagcttcctgagccagtaccgctactacaccccagccaagaggaagaaggacttcacagaccagagaattgaagctgagacccagacagagctgtccttcaagtctgagctgggcacagctgagaccaagaacatgacagacagcgagatgaacatcaagcaggccagcaactgtgtgacctatgatgccaaggagaagatcgcccccctgcccctggagggccatgacagcacctgggatgagatcaaggatgatgccctgcagcacagcagcccccgggccatgtgccagtacagcctgaagccacccagcaccaggaagatctacagtgatgaggaggagctgctgtacctgtccttcattgaagatgtgacagatgagatcctgaagctgggcctcttcagcaaccgcttcctggagcggctgtttgagcggcacatcaagcagaacaagcacctggaggaggagaagatgaggcacctgctgcacgtgctgaaggtggacctgggctgcaccagtgaagaaaattctgtgaagcagaatgatgtggacatgctgaatgtgtttgattttgagaaggccggcaacagcgagcccaatgagctgaagaatgaaagtgaggtgaccatccagcaggagcggcagcagtaccagaaggccctggacatgctgctgagcgcccccaaggatgaaaatgagatcttccccagccccacagagttcttcatgcccatctacaagagcaagcacagcgagggcgtcatcatccagcaggtgaatgatgagaccaacctggagaccagcaccctggatgagaaccaccccagcatcagtgacagcctgacagaccgggagacctctgtgaatgtgattgaaggagacagcgaccctgagaaggtggagatcagcaatggcctgtgtggcctgaacaccagccccagccagagcgtgcagttcagctctgtgaagggggacaacaaccacgacatggagctgagcaccctgaagatcatggagatgagcattgaggactgccccctggatgtgtag

SEQ ID NO: 171412 - DNA, 1704 bp, synthetic construct; identical to SEQ ID NO: 171410
  misc_feature 1..1704: note = Description of Artificial Sequence: Synthetic coding sequence
  source 1..1704: mol_type = other DNA

SEQ ID NO: 171413 - DNA, 318 bp, synthetic construct
  misc_feature 1..318: note = Description of Artificial Sequence: Synthetic coding sequence
  source 1..318: mol_type = other DNA
atggccccagctggcatgtctggggcccaggacaacagctgcctgtaccaggagatcgcccccagcttccagaggctgccctgccccaggaccagcagccgccacttcagcgaggccatgacctgcccctgtggctggaggcccttcaagggcggccctgggggcctgaagggccctgtgtggccagccaaggaggagaacagctgcagccacggccgcatccagagggtgcagaggcggcgggtgcccagcgccagccccctcatccagaagatcaacagaagatctgtgctcttccacccctactgctggagctag

SEQ ID NO: 171414 - DNA, 1638 bp, synthetic construct
  misc_feature 1..1638: note = Description of Artificial Sequence: Synthetic coding sequence
  source 1..1638: mol_type = other DNA
atgagcaggaagcagaaccagaaggacagcagcggcttcatctttgacctgcagagcaacacagtgctggcccagggcggggcctttgagaacatgaaggagaagatcaatgctgtgcgggccatcgtgcccaacaagagcaacaatgagatcatcctggtgctgcagcactttgacaactgtgtggacaagacagtgcaggccttcatggagggcagcgccagcgaggtgctgaaggagtggacagtgacaggcaagaagaagaacaagaagaagaagaacaagcccaagccagctgctgagcccagcaatggcatcccagacagcagcaagtctgtgtccatccaggaggagcagagcgcccccagcagcgagaagggcggcatgaatggctaccacgtgaatggagccatcaatgacacagaatctgtggacagcctgtctgagggcctggagaccctgagcattgatgcccgggagctggaggaccctgagagcgccatgctggacaccctggacagaacaggctccatgctgcagaatggagtgtctgactttgagaccaagagcctgaccatgcacagcatccacaacagccagcagcccagaaatgctgccaagagcctgagccggcccaccacagagacccagttcagcaacatgggcatggaggatgtgcccctggccaccagcaagaagctgagcagcaacatcgagaagtctgtgaaggacctgcagcgctgcaccgtgtccctggcccgctacagagtggtggtgaaggaggagatggatgccagcatcaagaagatgaagcaggcctttgctgagctggagagctgcctgatggaccgggaggtggccctgctggccgagatggacaaggtgaaggccgaggccatggagatcctgctgagccggcagaagaaggccgagctgctgaagaagatgacccacgtggccgtgcagatgtctgagcagcagctggtggagctgcgggctgacatcaagcactttgtgtctgagaggaaatatgatgaggacctgggccgggtggcccgcttcacctgtgatgtggagaccctgaagaagagcattgacagctttggccaggtgagccaccccaagaacagctacagcaccaggagccgctgcagctctgtgacctctgtgtccctgagcagccccagtgatgccagcgctgccagcagcagcacctgtgccagcccccccagcctgaccagcgccaacaagaagaactttgcccctggagagaccccagctgccatcgccaacagcagcggccagccctaccagcccctgcgggaggtgctgcccggcaacagaagaggaggccagggctaccggccccagggccagaagagcaatgaccccatgaaccagggcagacatgacagcatgggccgctacagaaacagctcctggtacagcagcggcagccgctaccagagcgcccccagccaggcccctggcaacaccatcgagcggggccagacccacagcgctggcaccaatggaactggagtgtccatggagcccagcccccccacccccagcttcaagaagggcctgccccagaggaagcccaggaccagccagacagaggccgtgaacagctag

SEQ ID NO: 171415 - DNA, 1638 bp, synthetic construct
  misc_feature 1..1638: note = Description of Artificial Sequence: Synthetic coding sequence
  source 1..1638: mol_type = other DNA
gtgtccaagaagaagaagaagaaggacagcagcggcttcatctttgacctgcagagcaacacagtgctggcccagggcggggcctttgagaacatgaaggagaagatcaatgctgtgcgggccatcgtgcccaacaagagcaacaatgagatcatcctggtgctgcagcactttgacaactgtgtggacaagacagtgcaggccttcatggagggcagcgccagcgaggtgctgaaggagtggacagtgacaggcaagaagaagaacaagaagaagaagaacaagcccaagccagctgctgagcccagcaatggcatcccagacagcagcaagtctgtgtccatccaggaggagcagagcgcccccagcagcgagaagggcggcatgaatggctaccacgtgaatggagccatcaatgacacagaatctgtggacagcctgtctgagggcctggagaccctgagcattgatgcccgggagctggaggaccctgagagcgccatgctggacaccctggacagaacaggctccatgctgcagaatggagtgtctgactttgagaccaagagcctgaccatgcacagcatccacaacagccagcagcccagaaatgctgccaagagcctgagccggcccaccacagagacccagttcagcaacatgggcatggaggatgtgcccctggccaccagcaagaagctgagcagcaacatcgagaagtctgtgaaggacctgcagcgctgcaccgtgtccctggcccgctacagagtggtggtgaaggaggagatggatgccagcatcaagaagatgaagcaggcctttgctgagctggagagctgcctgatggaccgggaggtggccctgctggccgagatggacaaggtgaaggccgaggccatggagatcctgctgagccggcagaagaaggccgagctgctgaagaagatgacccacgtggccgtgcagatgtctgagcagcagctggtggagctgcgggctgacatcaagcactttgtgtctgagaggaaatatgatgaggacctgggccgggtggcccgcttcacctgtgatgtggagaccctgaagaagagcattgacagctttggccaggtgagccaccccaagaacagctacagcaccaggagccgctgcagctctgtgacctctgtgtccctgagcagccccagtgatgccagcgctgccagcagcagcacctgtgccagcccccccagcctgaccagcgccaacaagaagaactttgcccctggagagaccccagctgccatcgccaacagcagcggccagccctaccagcccctgcgggaggtgctgcccggcaacagaagaggaggccagggctaccggccccagggccagaagagcaatgaccccatgaaccagggcagacatgacagcatgggccgctacagaaacagctcctggtacagcagcggcagccgctaccagagcgcccccagccaggcccctggcaacaccatcgagcggggccagacccacagcgctggcaccaatggaactggagtgtccatggagcccagcccccccacccccagcttcaagaagggcctgccccagaggaagcccaggaccagccagacagaggccgtgaacagctag

SEQ ID NO: 171416 - DNA, 27 bp, synthetic construct
  misc_feature 1..27: note = Description of Artificial Sequence: Synthetic coding sequence
  source 1..27: mol_type = other DNA
atgagcaggaagcagaaccagaagtag

SEQ ID NO: 171417 - DNA, 27 bp, synthetic construct
  misc_feature 1..27: note = Description of Artificial Sequence: Synthetic coding sequence
  source 1..27: mol_type = other DNA
atgagcaggaagcagaaccagaagtag

SEQ ID NO: 171418 - DNA, 204 bp, synthetic construct
  misc_feature 1..204: note = Description of Artificial Sequence: Synthetic coding sequence
  source 1..204: mol_type = other DNA
atgagcaggaagcagaaccagaaggacagcagcggcttcatctttgacctgcagagcaacacagtgctggcccagggcggggcctttgagaacatgaaggagaagatcaatgctgtgcgggccatcgtgcccaacaagagcaacaatgagatcatcctggtgctgcagcactttgacaactgtgtggacaagacagtgcagtag

SEQ ID NO: 171419 - DNA, 102 bp, synthetic construct
  misc_feature 1..102: note = Description of Artificial Sequence: Synthetic coding sequence
  source 1..102: mol_type = other DNA
atgagcaggaagcagaaccagaaggacagcagcggcttcatctttgacctgcagagcaacacagtgctggcccagggcggggcctttgagaacatgaagtag

SEQ ID NO: 171420 - DNA, 18 bp, synthetic construct
  misc_feature 1..18: note = Description of Artificial Sequence: Synthetic coding sequence
  source 1..18: mol_type = other DNA
atgagcaggaagcagtag

SEQ ID NO: 171421 - DNA, 111 bp, synthetic construct
  misc_feature 1..111: note = Description of Artificial Sequence: Synthetic coding sequence
  source 1..111: mol_type = other DNA
atgagcaggaagcagaaccagaaggacagcagcggcttcatctttgacctgcagagcaacacagtgctggcccagggcggggcctttgagaacatgaaggagaaggtgtag

SEQ ID NO: 171422 - DNA, 201 bp, synthetic construct
  misc_feature 1..201: note = Description of Artificial Sequence: Synthetic coding sequence
  source 1..201: mol_type = other DNA
atgagcaggaagcagaaccagaaggacagcagcggcttcatctttgacctgcagagcaacacagtgctggcccagggcggggcctttgagaacatgaaggagaagatcaatgctgtgcgggccatcgtgcccaacaagagcaacaatgagatcatcctggtgctgcagcactttgacaactgtgtggacaagacagtgtag

SEQ ID NO: 171423 - DNA, 105 bp, synthetic construct
  misc_feature 1..105: note = Description of Artificial Sequence: Synthetic coding sequence
  source 1..105: mol_type = other DNA
atgagcaggaagcagaaccagaaggacagcagcggcttcatctttgacctgcagagcaacacagtgctggcccagggcggggcctttgagaacatgaaggagtag

SEQ ID NO: 171424 - DNA, 297 bp, synthetic construct
  misc_feature 1..297: note = Description of Artificial Sequence: Synthetic coding sequence
  source 1..297: mol_type = other DNA
atgagcaggaagcagaaccagaaggacagcagcggcttcatctttgacctgcagagcaacacagtgctggcccagggcggggcctttgagaacatgaaggagaagatcaatgctgtgcgggccatcgtgcccaacaagagcaacaatgagatcatcctggtgctgcagcactttgacaactgtgtggacaagacagtgcaggccttcatggagggcagcgccagcgaggtgctgaaggagtggacagtgacaggcaagaagaagaacaagaagaagaagaacaagcccaagccctag

SEQ ID NO: 171425 - DNA, 225 bp, synthetic construct
  misc_feature 1..225: note = Description of Artificial Sequence: Synthetic coding sequence
  source 1..225: mol_type = other DNA
atgagcaggaagcagaaccagaaggacagcagcggcttcatctttgacctgcagagcaacacagtgctggcccagggcggggcctttgagaacatgaaggagaagatcaatgctgtgcgggccatcgtgcccaacaagagcaacaatgagatcatcctggtgctgcagcactttgacaactgtgtggacaagacagtgcaggccttcatggagggcagcgcctag

SEQ ID NO: 171426 - DNA, 33 bp, synthetic construct
  misc_feature 1..33: note = Description of Artificial Sequence: Synthetic coding sequence
  source 1..33: mol_type = other DNA
atgagcaggaagcagaaccagaaggacagctag

SEQ ID NO: 171427 - DNA, 1638 bp, synthetic construct; identical to SEQ ID NO: 171414
  misc_feature 1..1638: note = Description of Artificial Sequence: Synthetic coding sequence
  source 1..1638: mol_type = other DNA

SEQ ID NO: 171428 - DNA, 1638 bp, synthetic construct; identical to SEQ ID NO: 171414
  misc_feature 1..1638: note = Description of Artificial Sequence: Synthetic coding sequence
  source 1..1638: mol_type = other DNA

SEQ ID NO: 171429 - DNA, 1677 bp, synthetic construct
  misc_feature 1..1677: note = Description of Artificial Sequence: Synthetic coding sequence
  source 1..1677: mol_type = other DNA
atggccgagctgaacacccacgtgaatgtgaaggagaagatctatgctgtgcgctctgtggtgcccaacaagagcaacaatgaaattgtgctggtgctgcagcagtttgacttcaacgtggacaaggctgtgcaggcctttgtggatggcagcgccatccaggtgctgaaggagtggaacatgaccgggaagaagaagaacaacaagaggaagaggagcaagagcaagcagcaccagggcaacaaggatgccaaggacaaggtggagaggcctgaggccggccccctgcagccccagcccccccagatccagaatggccccatgaatggctgtgagaaggacagcagcagcacagacagcgccaatgagaagccagccctgatcccccgggagaagaagatcagcatcctggaggagcccagcaaggccctgcggggcgtgacagagggcaaccggctgctgcagcagaagctgagcctggatggcaaccccaagcccatccacggcaccacagagaggagtgatggcctgcagtggagcgctgagcagccctgcaaccccagcaagcccaaggccaagaccagccctgtgaagagcaacaccccagctgcccacctggagatcaagccagatgagctggccaagaagaggggccccaacatcgagaagtctgtgaaggacctgcagcgctgcaccgtgtccctgacccgctacagagtgatgatcaaggaggaggtggacagctctgtgaagaagatcaaggccgcctttgctgagctgcacaactgcatcatcgacaaggaggtgtccctgatggccgagatggacaaggtgaaggaggaggccatggagatcctgacagcccggcagaagaaggccgaggagctgaagaggctgacagacctggccagccagatggccgagatgcagctggccgagctgcgggcagagatcaagcactttgtgtctgagaggaaatatgatgaggagctgggcaaggccgcccgcttcagctgtgacatcgagcagctgaaggcccagatcatgctgtgtggggagatcacccaccccaagaacaactacagcagcaggaccccctgcagcagcctgctgcccctgctgaatgcccacgccgccaccagcggcaagcagagcaacttcagcaggaagagcagcacccacaacaagcccagcgagggcaaggccgccaaccccaagatggtgagcagcctgcccagcacagctgaccccagccaccagaccatgcctgccaacaagcagaatggcagcagcaaccagaggcggcgcttcaacccccagtaccacaacaaccggctgaatggacctgccaagagccagggcagcggaaatgaagctgagcccctgggcaagggcaacagcagacatgagcaccggcggcagccccacaacggcttccggcccaagaacaagggcggggccaagaaccaggaggccagcctgggcatgaagaccccagaggccccagcccacagcgagaagccccggcggcggcagcacgccgctgacaccagcgaggcccggcccttccggggctctgtgggccgggtgtcccagtgcaacctgtgccccacccgcatcgaggtgtccacagatgctgctgtgctgtctgtgcctgctgtgaccctggtggcctag

SEQ ID NO: 171430 - DNA, 1470 bp, synthetic construct
  misc_feature 1..1470: note = Description of Artificial Sequence: Synthetic coding sequence
  source 1..1470: mol_type = other DNA
atggccgagctgaacacccacgtgaatgtgaaggagaagatctatgctgtgcgctctgtggtgcccaacaagagcaacaatgaaattgtgctggtgctgcagcagtttgacttcaacgtggacaaggctgtgcaggcctttgtggatggcagcgccatccaggtgctgaaggagtggaacatgaccgggaagaagaagaacaacaagaggaagaggagcaagagcaagcagcaccagggcaacaaggatgccaaggacaaggtggagaggcctgaggccggccccctgcagccccagcccccccagatccagaatggccccatgaatggctgtgagaaggacagcagcagcacagacagcgccaatgagaagccagccctgatcccccgggagaagaagatcagcatcctggaggagcccagcaaggccctgcggggcgtgacaggccccaacatcgagaagtctgtgaaggacctgcagcgctgcaccgtgtccctgacccgctacagagtgatgatcaaggaggaggtggacagctctgtgaagaagatcaaggccgcctttgctgagctgcacaactgcatcatcgacaaggaggtgtccctgatggccgagatggacaaggtgaaggaggaggccatggagatcctgacagcccggcagaagaaggccgaggagctgaagaggctgacagacctggccagccagatggccgagatgcagctggccgagctgcgggcagagatcaagcactttgtgtctgagaggaaatatgatgaggagctgggcaaggccgcccgcttcagctgtgacatcgagcagctgaaggcccagatcatgctgtgtggggagatcacccaccccaagaacaactacagcagcaggaccccctgcagcagcctgctgcccctgctgaatgcccatgctgccaccagcggcaagcagagcaacttcagcaggaagagcagcacccacaacaagcccagcgagggcaaggccgccaaccccaagatggtgagcagcctgcccagcacagctgaccccagccaccagaccatgcctgccaacaagcagaatggcagcagcaaccagaggcggcgcttcaacccccagtaccacaacaaccggctgaatggacctgccaagagccagggcagcggaaatgaggccgagcccctgggcaaaggaaacagcagacatgagcaccggcggcagccccacaacggcttccggcccaagaacaagggcggggccaagaaccaggaggccagcctgggcatgaagaccccagaggccccagcccacagcgagaagccccggcggcggcagcacgccgctgacaccagcgaggcccggcccttccggggctctgtgggccgggtgtcccagtgcaacctgtgccccaccagaattgaggtgtccacagatgctgctgtgctgtctgtgcctgctgtgaccctggtggcctag

SEQ ID NO: 171431 - DNA, 1677 bp, synthetic construct; identical to SEQ ID NO: 171429
  misc_feature 1..1677: note = Description of Artificial Sequence: Synthetic coding sequence
  source 1..1677: mol_type = other DNA

SEQ ID NO: 171432 - DNA, 1701 bp, synthetic construct
  misc_feature 1..1701: note = Description of Artificial Sequence: Synthetic coding sequence
  source 1..1701: mol_type = other DNA
atggcctacagcaccaggagcaagatggccgagctgaacacccacgtgaatgtgaaggagaagatctatgctgtgcgctctgtggtgcccaacaagagcaacaatgaaattgtgctggtgctgcagcagtttgacttcaacgtggacaaggctgtgcaggcctttgtggatggcagcgccatccaggtgctgaaggagtggaacatgaccgggaagaagaagaacaacaagaggaagaggagcaagagcaagcagcaccagggcaacaaggatgccaaggacaaggtggagaggcctgaggccggccccctgcagccccagcccccccagatccagaatggccccatgaatggctgtgagaaggacagcagcagcacagacagcgccaatgagaagccagccctgatcccccgggagaagaagatcagcatcctggaggagcccagcaaggccctgcggggcgtgacagagggcaaccggctgctgcagcagaagctgagcctggatggcaaccccaagcccatccacggcaccacagagaggagtgatggcctgcagtggagcgctgagcagccctgcaaccccagcaagcccaaggccaagaccagccctgtgaagagcaacaccccagctgcccacctggagatcaagccagatgagctggccaagaagaggggccccaacatcgagaagtctgtgaaggacctgcagcgctgcaccgtgtccctgacccgctacagagtgatgatcaaggaggaggtggacagctctgtgaagaagatcaaggccgcctttgctgagctgcacaactgcatcatcgacaaggaggtgtccctgatggccgagatggacaaggtgaaggaggaggccatggagatcctgacagcccggcagaagaaggccgaggagctgaagaggctgacagacctggccagccagatggccgagatgcagctggccgagctgcgggcagagatcaagcactttgtgtctgagaggaaatatgatgaggagctgggcaaggccgcccgcttcagctgtgacatcgagcagctgaaggcccagatcatgctgtgtggggagatcacccaccccaagaacaactacagcagcaggaccccctgcagcagcctgctgcccctgctgaatgcccacgccgccaccagcggcaagcagagcaacttcagcaggaagagcagcacccacaacaagcccagcgagggcaaggccgccaaccccaagatggtgagcagcctgcccagcacagctgaccccagccaccagaccatgcctgccaacaagcagaatggcagcagcaaccagaggcggcgcttcaacccccagtaccacaacaaccggctgaatggacctgccaagagccagggcagcggaaatgaagctgagcccctgggcaagggcaacagcagacatgagcaccggcggcagccccacaacggcttccggcccaagaacaagggcggggccaagaaccaggaggccagcctgggcatgaagaccccagaggccccagcccacagcgagaagccccggcggcggcagcacgccgctgacaccagcgaggcccggcccttccggggctctgtgggccgggtgtcccagtgcaacctgtgccccacccgcatcgaggtgtccacagatgctgctgtgctgtctgtgcctgctgtgaccctggtggcctag

SEQ ID NO: 171433 - DNA, 801 bp, synthetic construct
  misc_feature 1..801: note = Description of Artificial Sequence: Synthetic coding sequence
  source 1..801: mol_type = other DNA
atggccgagctgaacacccacgtgaatgtgaaggagaagatctatgctgtgcgctctgtggtgcccaacaagagcaacaatgaaattgtgctggtgctgcagcagtttgacttcaacgtggacaaggctgtgcaggcctttgtggatggcagcgccatccaggtgctgaaggagtggaacatgaccgggaagaagaagaacaacaagaggaagaggagcaagagcaagcagcaccagggcaacaaggatgccaaggacaaggtggagaggcctgaggccggccccctgcagccccagcccccccagatccagaatggccccatgaatggctgtgagaaggacagcagcagcacagacagcgccaatgagaagccagccctgatcccccgggagaagaagatcagcatcctggaggagcccagcaaggccctgcggggcgtgacaggccccaacatcgagaagtctgtgaaggacctgcagcgctgcaccgtgtccctgacccgctacagagtgatgatcaaggaggaggtggacagctctgtgaagaagatcaaggccgcctttgctgagctgcacaactgcatcatcgacaaggaggtgtccctgatggccgagatggacaaggtgaaggaggaggccatggagatcctgacagcccggcagaagaaggccgaggagctgaagaggctgacagacctggccagccagatggccgagatgcagctggccgagctgcgggcagagatcaagcactttgtgtctgagaggaaatatgatgaggagctgggcaaggccgcctag

SEQ ID NO: 171434 - DNA, 1677 bp, synthetic construct; identical to SEQ ID NO: 171429
  misc_feature 1..1677: note = Description of Artificial Sequence: Synthetic coding sequence
  source 1..1677: mol_type = other DNA

SEQ ID NO: 171435 - DNA, 1767 bp, synthetic construct
  misc_feature 1..1767: note = Description of Artificial Sequence: Synthetic coding sequence
  source 1..1767: mol_type = other DNA
atggaccccttctgccacagcagcagcgagacccggctgctgagcggcaccctgctgtggatcccccgggcctacagcaccaggagcaagatggccgagctgaacacccacgtgaatgtgaaggagaagatctatgctgtgcgctctgtggtgcccaacaagagcaacaatgaaattgtgctggtgctgcagcagtttgacttcaacgtggacaaggctgtgcaggcctttgtggatggcagcgccatccaggtgctgaaggagtggaacatgaccgggaagaagaagaacaacaagaggaagaggagcaagagcaagcagcaccagggcaacaaggatgccaaggacaaggtggagaggcctgaggccggccccctgcagccccagcccccccagatccagaatggccccatgaatggctgtgagaaggacagcagcagcacagacagcgccaatgagaagccagccctgatcccccgggagaagaagatcagcatcctggaggagcccagcaaggccctgcggggcgtgacagagggcaaccggctgctgcagcagaagctgagcctggatggcaaccccaagcccatccacggcaccacagagaggagtgatggcctgcagtggagcgctgagcagccctgcaaccccagcaagcccaaggccaagaccagccctgtgaagagcaacaccccagctgcccacctggagatcaagccagatgagctggccaagaagaggggccccaacatcgagaagtctgtgaaggacctgcagcgctgcaccgtgtccctgacccgctacagagtgatgatcaaggaggaggtggacagctctgtgaagaagatcaaggccgcctttgctgagctgcacaactgcatcatcgacaaggaggtgtccctgatggccgagatggacaaggtgaaggaggaggccatggagatcctgacagcccggcagaagaaggccgaggagctgaagaggctgacagacctggccagccagatggccgagatgcagctggccgagctgcgggcagagatcaagcactttgtgtctgagaggaaatatgatgaggagctgggcaaggccgcccgcttcagctgtgacatcgagcagctgaaggcccagatcatgctgtgtggggagatcacccaccccaagaacaactacagcagcaggaccccctgcagcagcctgctgcccctgctgaatgcccacgccgccaccagcggcaagcagagcaacttcagcaggaagagcagcacccacaacaagcccagcgagggcaaggccgccaaccccaagatggtgagcagcctgcccagcacagctgaccccagccaccagaccatgcctgccaacaagcagaatggcagcagcaaccagaggcggcgcttcaacccccagtaccacaacaaccggctgaatggacctgccaagagccagggcagcggaaatgaagctgagcccctgggcaagggcaacagcagacatgagcaccggcggcagccccacaacggcttccggcccaagaacaagggcggggccaagaaccaggaggccagcctgggcatgaagaccccagaggccccagcccacagcgagaagccccggcggcggcagcacgccgctgacaccagcgaggcccggcccttccggggctctgtgggccgggtgtcccagtgcaacctgtgccccacccgcatcgaggtgtccacagatgctgctgtgctgtctgtgcctgctgtgaccctggtggcctag

SEQ ID NO: 171436 - DNA, 1677 bp, synthetic construct; identical to SEQ ID NO: 171429
  misc_feature 1..1677: note = Description of Artificial Sequence: Synthetic coding sequence
  source 1..1677: mol_type = other DNA

SEQ ID NO: 171437 - DNA, 465 bp, synthetic construct
  misc_feature 1..465: note = Description of Artificial Sequence: Synthetic coding sequence
  source 1..465: mol_type = other DNA
atggccgagctgaacacccacgtgaatgtgaaggagaagatctatgctgtgcgctctgtggtgcccaacaagagcaacaatgaaattgtgctggtgctgcagcagtttgacttcaacgtggacaaggctgtgcaggcctttgtggatggcagcgccatccaggtgctgaaggagtggaacatgaccgggaagaagaagaacaacaagaggaagaggagcaagagcaagcagcaccagggcaacaaggatgccaaggacaaggtggagaggcctgaggccggccccctgcagccccagcccccccagatccagaatggccccatgaatggctgtgagaaggacagcagcagcacagacagcgccaatgagaagccagccctgatcccccgggagaagaagatcagcatcctggaggagcccagcaaggccctgcggggcgtgacagagggcaaccggctgctgtag

SEQ ID NO: 171438 - DNA, 423 bp, synthetic construct
  misc_feature 1..423: note = Description of Artificial Sequence: Synthetic coding sequence
  source 1..423: mol_type = other DNA
atggccgagctgaacacccacgtgaatgtgaaggagaagatctatgctgtgcgctctgtggtgcccaacaagagcaacaatgaaattgtgctggtgctgcagcagtttgacttcaacgtggacaaggctgtgcaggcctttgtggatggcagcgccatccaggtgctgaaggagtggaacatgaccgggaagaagaagaacaacaagaggaagaggagcaagagcaagcagcaccagggcaacaaggatgccaaggacaaggtggagaggcctgaggccggccccctgcagccccagcccccccagatccagaatggccccatgaatggctgtgagaaggacagcagcagcacagacagcgccaatgagaagccagccctgatcccccgggagaagaagatcagcatcctggaggagccctag

SEQ ID NO: 171439 - DNA, 42 bp, synthetic construct
  misc_feature 1..42: note = Description of Artificial Sequence: Synthetic coding sequence
  source 1..42: mol_type = other DNA
atggccgagctgaacacccacgtgaatgtgaaggagaagtag

SEQ ID NO: 171440 - DNA, 285 bp, synthetic construct
  misc_feature 1..285: note = Description of Artificial Sequence: Synthetic coding sequence
  source 1..285: mol_type = other DNA
atggccgagctgaacacccacgtgaatgtgaaggagaagatctatgctgtgcgctctgtggtgcccaacaagagcaacaatgaaattgtgctggtgctgcagcagtttgacttcaacgtggacaaggctgtgcaggcctttgtggatggcagcgccatccaggtgctgaaggagtggaacatgaccgggaagaagaagaacaacaagaggaagaggagcaagagcaagcagcaccagggcaacaaggatgccaaggacaaggtggagaggcctgaggccggctag

SEQ ID NO: 171441 - DNA, 348 bp, synthetic construct
  misc_feature 1..348: note = Description of Artificial Sequence: Synthetic coding sequence
  source 1..348: mol_type = other DNA
atggccgagctgaacacccacgtgaatgtgaaggagaagatctatgctgtgcgctctgtggtgcccaacaagagcaacaatgaaattgtgctggtgctgcagcagtttgacttcaacgtggacaaggctgtgcaggcctttgtggatggcagcgccatccaggtgctgaaggagtggaacatgaccgggaagaagaagaacaacaagaggaagaggagcaagagcaagcagcaccagggcaacaaggatgccaaggacaaggtggagaggcctgaggccggccccctgcagccccagcccccccagatccagaatggccccatgaatggctgtgagaaggacagctag

SEQ ID NO: 171442 - DNA, 72 bp, synthetic construct
  misc_feature 1..72: note = Description of Artificial Sequence: Synthetic coding sequence
  source 1..72: mol_type = other DNA
atggccgagctgaacacccacgtgaatgtgaaggagaagatctatgctgtgcgctctgtggtgcccaactag

SEQ ID NO: 171443 - DNA, 522 bp, synthetic construct
  misc_feature 1..522: note = Description of Artificial Sequence: Synthetic coding sequence
  source 1..522: mol_type = other DNA
atggccgagctgaacacccacgtgaatgtgaaggagaagatctatgctgtgcgctctgtggtgcccaacaagagcaacaatgaaattgtgctggtgctgcagcagtttgacttcaacgtggacaaggctgtgcaggcctttgtggatggcagcgccatccaggtgctgaaggagtggaacatgaccgggaagaagaagaacaacaagaggaagaggagcaagagcaagcagcaccagggcaacaaggatgccaaggacaaggtggagaggcctgaggccggccccctgcagccccagcccccccagatccagaatggccccatgaatggctgtgagaaggacagcagcagcacagacagcgccaatgagaagccagccctgatcccccgggagaagaagatcagcatcctggaggagcccagcaaggccctgcggggcgtgacaggccccaacatcgagaagtctgtgaaggacctgcagcgctgcaccgtgtccctgacccgctacagagtgatgatctag

SEQ ID NO: 171444 - DNA, 1677 bp, synthetic construct; identical to SEQ ID NO: 171429
  misc_feature 1..1677: note = Description of Artificial Sequence: Synthetic coding sequence
  source 1..1677: mol_type = other DNA

SEQ ID NO: 171445 - DNA, 567 bp, synthetic construct
  misc_feature 1..567: note = Description of Artificial Sequence: Synthetic coding sequence
  source 1..567: mol_type = other DNA
atggccgagctgaacacccacgtgaatgtgaaggagaagatctatgctgtgcgctctgtggtgcccaacaagagcaacaatgaaattgtgctggtgctgcagcagtttgacttcaacgtggacaaggctgtgcaggcctttgtggatggcagcgccatccaggtgctgaaggagtggaacatgaccgggaagaagaagaacaacaagaggaagaggagcaagagcaagcagcaccagggcaacaaggatgccaaggacaaggtggagaggcctgaggccggccccctgcagccccagcccccccagatccagaatggccccatgaatggctgtgagaaggacagcagcagcacagacagcgccaatgagaagccagccctgatcccccgggagaagaagatcagcatcctggaggagcccagcaaggccctgcggggcgtgacagagggcaaccggctgctgcagcagaagctgagcctggatggcaaccccaagcccatccacggcaccacagagaggagtgatggcctgcagtggagcgctgagcagccctgcaaccccagctag

SEQ ID NO: 171446 - DNA, 909 bp, synthetic construct
  misc_feature 1..909: note = Description of Artificial Sequence: Synthetic coding sequence
  source 1..909: mol_type = other DNA
atggagcccggcccagatggccctgctgccagcggccctgctgccatccgggagggctggttccgggagacctgcagcctgtggccaggccaggccctgagcctgcaggtggagcagctgctgcaccaccggcgcagccgctaccaggacatcctggtgttccgcagcaagacctatggaaatgtgctggtgctggatggagtcatccagtgcacagaaagagatgagttctcctaccaggagatgattgccaacctgcccctgtgcagccaccccaaccccaggaaggtgctgatcatcggcggcggagatggcggcgtgctgcgggaggtggtgaagcaccccagcgtggagagcgtggtgcagtgtgaaattgatgaagatgtgatccaggtgtccaagaagttcctgcccggcatggccatcggctacagcagcagcaagctgaccctgcacgtgggagatggctttgagttcatgaagcagaaccaggatgcctttgatgtgatcatcacagacagcagtgaccccatgggccctgctgagagcctcttcaaggagagctactaccagctgatgaagacagccctgaaggaggatggagtgctgtgctgccagggcgagtgccagtggctgcacctggacctgatcaaggagatgaggcagttctgccagagcctcttccctgtggtggcctatgcctactgcaccatccccacctaccccagcggccagatcggcttcatgctgtgcagcaagaaccccagcaccaacttccaggagcctgtgcagcccctgacccagcagcaggtggcccagatgcagctgaagtactacaacagtgatgtgcaccgggccgcctttgtgctgcctgagtttgccaggaaggccctgaatgatgtgtcctag

SEQ ID NO: 171447 - DNA, 600 bp, synthetic construct
  misc_feature 1..600: note = Description of Artificial Sequence: Synthetic coding sequence
  source 1..600: mol_type = other DNA
gaggagcccccaccacccaccgtgcaggtgcagggccctggcccccagcgggaggagaagcagaagaccaagatggccaagtttgtgatccggcctgccacagctgctgactgcagcgacatcctgcggctcatcaaggagctggccaagtatgagtacatggaggagcaggtgatcctgacagagaaggacctgctggaggatggctttggagagcaccccttctaccactgcctggtggccgaggtgcccaaggagcactggaccccagagggcaaccccagccccttccctgaggcccgggagaccaagtgctactacttcacctatgacccctggattggcaagctgctgtacctggaggacttctttgtgatgtctgactaccggggcctgtggcaccgcatcagaaattctgaggagagcaagccaggctgcaatgaggtgtccctggccgcctgcacctcctgggccgagtggaatgagcccagcatcaacttctacaagagaagaggagccagtgacctgagcagcgaggagggctggaggctcttcaagattgacaaggagtacctgctgaagatggccacagaggagtag

SEQ ID NO: 171448 - DNA, 453 bp, synthetic construct
  misc_feature 1..453: note = Description of Artificial Sequence: Synthetic coding sequence
  source 1..453: mol_type = other DNA
atggccaagtttgtgatccggcctgccacagctgctgactgcagcgacatcctgcggctcatcaaggagctggccaagtatgagtacatggaggagcaggtgatcctgacagagaagggcaacagcacagtggccggccggggcacctctgtgcgctgcctgagccccagcccccggcccctgccccccctgctgcccctgctggccgacctgctggaggatggctttggagagcaccccttctaccactgcctggtggccgaggtgcccaaggagcactggaccccagagggcaaccccagccccttccctgaggcccgggagaccaagtgctacgtgcgcagctctgtgggctgtgtggagcccctgaccacccaggccgaggtgacagagaacctggacaggaagaacagccagcaggtgttcaagctgctgaggaagaagaagaactag

SEQ ID NO: 171449 - DNA, 363 bp, synthetic construct
  misc_feature 1..363: note = Description of Artificial Sequence: Synthetic coding sequence
  source 1..363: mol_type = other DNA
atggccaagtttgtgatccggcctgccacagctgctgactgcagcgacatcctgcggctcatcaaggagctggccaagtatgagtacatggaggagcaggtgatcctgacagagaaggacctgctggaggatggctttggagagcaccccttctaccactgcctggtggccgaggtgcccaaggagcactggaccccagagggcaaccccagccccttccctgaggcccgggagaccaagtgctacgtgcgcagctctgtgggctgtgtggagcccctgaccacccaggccgaggtgacagagaacctggacaggaagaacagccagcaggtgttcaagctgctgaggaagaagaagaactag

SEQ ID NO: 171450 - DNA, 432 bp, synthetic construct
  misc_feature 1..432: note = Description of Artificial Sequence: Synthetic coding sequence
  source 1..432: mol_type = other DNA
atggccaagtttgtgatccggcctgccacagctgctgactgcagcgacatcctgcggctcatcaaggagctggccaagtatgagtacatggaggagcaggtgatcctgacagagaagggccacagcatcgtgggctttgccatgtactacttcacctatgacccctggattggcaagctgctgtacctggaggacttctttgtgatgtctgactaccggggctttggaattggcagcgagatcctgaagaacctgagccaggtggccatgcgctgccgctgcagctccatgcacttcctggtggccgagtggaatgagcccagcatcaacttctacaagagaagaggagccagtgacctgagcagcgaggagggctggaggctcttcaagattgacaaggagtacctgctgaagatggccacagaggagtag

SEQ ID NO: 171451 - DNA, 516 bp, synthetic construct
  misc_feature 1..516: note = Description of Artificial Sequence: Synthetic coding sequence
  source 1..516: mol_type = other DNA
atggccaagtttgtgatccggcctgccacagctgctgactgcagcgacatcctgcggctcatcaaggagctggccaagtatgagtacatggaggagcaggtgatcctgacagagaaggacctgctggaggatggctttggagagcaccccttctaccactgcctggtggccgaggtgcccaaggagcactggaccccagagggccacagcatcgtgggctttgccatgtactacttcacctatgacccctggattggcaagctgctgtacctggaggacttctttgtgatgtctgactaccggggctttggaattggcagcgagatcctgaagaacctgagccaggtggccatgcgctgccgctgcagctccatgcacttcctggtggccgagtggaatgagcccagcatcaacttctacaagagaagaggagccagtgacctgagcagcgaggagggctggaggctcttcaagattgacaaggagtacctgctgaagatggccacagaggagtag

SEQ ID NO: 171452 - DNA, 513 bp, synthetic construct
  misc_feature 1..513: note = Description of Artificial Sequence: Synthetic coding sequence
  source 1..513: mol_type = other DNA
atggcctctgtgcgcatccgggaggccaaggagggggactgtggggacatcctgcggctcatccgggagctggccgagtttgagaagctgagtgaccaggtgaagatcagcgaggaggccctgcgggcagatggctttggagacaaccccttctaccactgcctggtggccgagatcctgcctgcccctgggaagctgctgggcccctgtgtggtgggctacggcatctactacttcatctacagcacctggaagggccgcaccatctacctggaggacatctacgtgatgcctgagtaccggggccagggcatcggcagcaagatcatcaagaaggtggccgaggtggccctggacaagggctgcagccagttccggctggccgtgctggactggaaccagagggccatggacctgtacaaggccctgggcgcccaggacctgacagaagctgagggctggcacttcttctgcttccagggcgaggccaccaggaagctggccggcaagtag

SEQ ID NO: 171453 - DNA, 750 bp, synthetic construct
  misc_feature 1..750: note = Description of Artificial Sequence: Synthetic coding sequence
  source 1..750: mol_type = other DNA
atgcctggccagagaattgccagcctggcctacagcctgctgccctacggggccggcatcccagcccccctgacccggccccggctgcccaggaggcctccccggctgcccccacccaggagcctgcggctcttccgcatccaggtgcggcggcccttcaagggcagcagctgccgcctgcggggccctggcaccctggtgcctgacagcggggaccctgatggcttccgggctgacccccggggccagggcggccgcctgtggagatacccagaggccgacagcggggaggactgcaggcctgagctggccgagtttgagaagctgagtgaccaggtgaagatcagcgaggaggccctgcgggcagatggctttggagacaaccccttctaccactgcctggtggccgagatcctgcctgcccctgggaagctgctgggcccctgtgtggtgggctacggcatctactacttcatctacagcacctggaagggccgcaccatctacctggaggacatctacgtgatgcctgagtaccggggccagggcatcggcagcaagatcatcaagaaggtggccgaggtggccctggacaagggctgcagccagttccggctggccgtgctggactggaaccagagggccatggacctgtacaaggccctgggcgcccaggacctgacagaggccgagggctggcacttcttctgcttccagggcgaggccaccaggaagctggccggcaagtag

SEQ ID NO: 171454 - DNA, 942 bp, synthetic construct
  misc_feature 1..942: note = Description of Artificial Sequence: Synthetic coding sequence
  source 1..942: mol_type = other DNA
atggctgctgcccggcacagcaccctggacttcatgctgggcgccaaggcagatggagagaccatcctgaagggcctgcagagcatcttccaggagcagggcatggccgagagcgtgcacacctggcaggaccacggctacctggccacctacaccaacaagaatggccgcctgccccccatcgtgcggggcggggccatcgaccgctactggcccacagcagatggccgcctggtggagtatgacattgatgaggtggtgtatgatgaggacagcccctaccagaacatcaagatcctgcacagcaagcagtttggaaacatcctgatcctgtctggagatgtgaacctggccgagagtgacctggcctacacccgggccatcatgggcagcggcaaggaggactacacaggcaaggatgtgctgatcctgggcggcggagatggcggcatcctgtgtgaaattgtgaagctgaagcccaagatggtgaccatggtggagattgaccagatggtgattgatggctgcaagaagtacatgaggaagacctgtggagatgtgctggacaacctgaagggggactgctaccaggtgctgattgaggactgcatccctgtgctgaagagatatgccaaggagggccgggagtttgattatgtgatcaatgacctgacagctgtgcccatcagcaccagccctgaggaggacagcacctgggagttcctgcggctcatcctggacctgtccatgaaggtgctgaagcaggacggcaagtacttcacccagggcaactgtgtgaacctgacagaggccctgagcctgtatgaggagcagctgggccgcctgtactgccctgtggagttcagcaaggagatcgtgtgtgtgcccagctacctggagctgtgggtgttctacacagtgtggaagaaggccaagccctag

SEQ ID NO: 171455 - DNA, 1101 bp, synthetic construct
  misc_feature 1..1101: note = Description of Artificial Sequence: Synthetic coding sequence
  source 1..1101: mol_type = other DNA
atggctgctgcccggcacagcaccctggacttcatgctgggcgccaaggcagatggagagaccatcctgaagggcctgcagagcatcttccaggagcagggcatggccgagagcgtgcacacctggcaggaccacggctacctggccacctacaccaacaagaatggcagctttgccaacctgcgcatctacccccacggcctggtgctgctggacctgcagagctatgatggagatgcccagggcaaggaggagattgacagcatcctgaacaaggtggaggagaggatgaaggagctgagccaggacagcacaggccgggtgaagaggctgccccccatcgtgcggggcggggccatcgaccgctactggcccacagcagatggccgcctggtggagtatgacattgatgaggtggtgtatgatgaggacagcccctaccagaacatcaagatcctgcacagcaagcagtttggaaacatcctgatcctgtctggagatgtgaacctggccgagagtgacctggcctacacccgggccatcatgggcagcggcaaggaggactacaccgggaaggatgtgctgatcctgggcggcggagatggcggcatcctgtgtgagatcgtgaagctgaagcccaagatggtgaccatggtggagattgaccagatggtgattgatggctgcaagaagtacatgaggaagacctgtggagatgtgctggacaacctgaagggggactgctaccaggtgctgattgaggactgcatccctgtgctgaagagatatgccaaggagggccgggagtttgattatgtgatcaatgacctgacagctgtgcccatcagcaccagccctgaggaggacagcacctgggagttcctgcggctcatcctggacctgtccatgaaggtgctgaagcaggacggcaagtacttcacccagggcaactgtgtgaacctgacagaggccctgagcctgtatgaggagcagctgggccgcctgtactgccctgtggagttcagcaaggagatcgtgtgtgtgcccagctacctggagctgtgggtgttctacacagtgtggaagaaggccaagccctag

SEQ ID NO: 171456 - DNA, 828 bp, synthetic construct
  misc_feature 1..828: note = Description of Artificial Sequence: Synthetic coding sequence
  source 1..828: mol_type = other DNA
atgaaggagctgagccaggacagcacaggccgggtgaagaggctgccccccatcgtgcggggcggggccatcgaccgctactggcccacagcagatggccgcctggtggagtatgacattgatgaggtggtgtatgatgaggacagcccctaccagaacatcaagatcctgcacagcaagcagtttggaaacatcctgatcctgtctggagatgtgaacctggccgagagtgacctggcctacacccgggccatcatgggcagcggcaaggaggactacaccgggaaggatgtgctgatcctgggcggcggagatggcggcatcctgtgtgagatcgtgaagctgaagcccaagatggtgaccatggtggagattgaccagatggtgattgatggctgcaagaagtacatgaggaagacctgtggagatgtgctggacaacctgaagggggactgctaccaggtgctgattgaggactgcatccctgtgctgaagagatatgccaaggagggccgggagtttgattatgtgatcaatgacctgacagctgtgcccatcagcaccagccctgaggaggacagcacctgggagttcctgcggctcatcctggacctgtccatgaaggtgctgaagcaggacggcaagtacttcacccagggcaactgtgtgaacctgacagaggccctgagcctgtatgaggagcagctgggccgcctgtactgccctgtggagttcagcaaggagatcgtgtgtgtgcccagctacctggagctgttcctgctgcagttctggagggtgcgcagcagcaaatgtgccctggagggctag

SEQ ID NO: 171457 - DNA, 936 bp, synthetic construct
  misc_feature 1..936: note = Description of Artificial Sequence: Synthetic coding sequence
  source 1..936: mol_type = other DNA
tgaggaggccgggcagaggccgccctgctgctggcccccaggtctgtgcctgctgctgcccggggcctgcagggccagagccgggtgcctgctggccgggccgccctgcccggccctggccggcccccagccctgccccggggcctggccgcctttgccctgcccctgggggagagccctggctgccgggcccgggctgaccccccctgggatgagggctgccgggactgtggcggggcccggcgggaccccagaggagagcccggcctgggcgcctgtgccgagcggggctgcccccgggacctcttcctgttcctgcaggccgcagatggagagaccatcctgaagggcctgcagagcatcttccaggagcagggcatggccgagagcgtgcacacctggcaggaccacggctacctggccacctacaccaacaagaatggcagctttgccaacctgcgcatctacccccacggcctggtgctgctggacctgcagagctatgatggagatgcccagggcaaggaggagattgacagcatcctgaacaaggtggaggagaggatgaaggagctgagccaggacagcacaggccgggtgaagaggctgccccccatcgtgcggggcggggccatcgaccgctactggcccacagcagatggccgcctggtggagtatgacattgatgaggtggtgtatgatgaggacagcccctaccagaacatcaagatcctgcacagcaagcagtttggaaacatcctgatcctgtctggagatgtgaacctggccgagagtgacctggcctacacccgggccatcatgggcagcggcaaggaggactacaccgggaaggatgtgctgatcctgggcggcggagatggcggcatcctgtgtgagatcgtgaagctgaagcccaagatggtgaccatggtgtag

SEQ ID NO: 171458 - DNA, 3801 bp, synthetic construct
  misc_feature 1..3801: note = Description of Artificial Sequence: Synthetic coding sequence
  source 1..3801: mol_type = other DNA
cgggaggccaccccacccctgcggggcctgcctgccccacccaggcatgcccccttccctgctggccgctttgagccccccaggaccaagcagggcggccggggcagccacaccccctgggtgtatgtgatcaatgacctgggcatcgaggagaacctgaagaatgatggcaagcccaagtgccagacaggaggcaagagcaagaggaccatccagggcacccacaagaccaccaagcagcagagcacagctgtggactgcaagatcaccagcagcaccaccggggacaagcactttgacaagagccccaccaagaccaggcaccccaggaagattgacctgcgggcccgctactgggccttcctgtttgacaacctgcggcgggctgtggatgagatctacgtgacctgtgagagtgaccagagcgtggtggagtgcaaggaggtgctgatgatgctggacaactacgtgcgggacttcaaggccctgattgactggatccagctgcaggagaagctggagaagacagatgcccagagccggcccaccagcctggcctgggaggtgaagaagatgagccctggaagacatgtgatccccagccccagcacagaccgcatcaacgtgaccagcaatgcccggcgcagcctgaactttggaggcagcactggaacagtgcctgccccccggctggcccccaccggggtgtcctgggccgacaaggtgaaggcccaccacacaggcagcacagccagcagcgagatcaccccagcccagagctgcccccccatgacagtgcagaaggccagcaggaagaatgaaaggaaggatgctgagggctgggagaccgtgcagaggggccggcccatccgcagccgcagcacagctgtgatgcccaaggtgtccctggccacagaggccaccaggagcaaggatgacagcgacaaggaaaatgtgtgcctgctgcctgatgagagcatccagaagggccagtttgtgggagatggcaccagcaacaccatcgagagccaccccaaggacagcctgcacagctgtgaccaccccctggccgagaagacccagttcaccgtgtccaccctggatgatgtgaagaacagcggcagcatccgggacaactacgtgaggaccagcgagatctctgctgtgcacatcgacacagaatgtgtgtctgtgatgctgcaggccggcaccccacccctgcaggtgaatgaggagaagtttcctgctgagaaggccagaattgaaaatgagatggaccccagcgacatcagcaatgtgtctgctgccaacctgtccatggccgaggtgctggccaagaaggaggagctggccgaccggctggagaaggccaatgaggaggccatcgccagcgccatcgccgaggaggagcagctgacccgggagattgaggccgaggagaacaatgacatcaacatcgagacagacaatgacagcgacttcagcgcctccatgggcagcggctctgtgtccttctgtggcatgtccatggactggaatgatgtgctggccgactatgaggcccgggagagctggaggcagaacacctcctggggagacatcgtggaggaggagcccgcccggcccccaggccacggcatccacatgcatgagaagctgagcagccccagcaggaagaggaccatcgccgagagcaagaagaagcatgaggagaagcagatgaaggcccagcagctgcgggagaagctgcgggaggagaagaccctgaagctgcagaagctgctggagcgggagaaggatgtgaggaagtggaaggaggagctgctggaccagaggaggaggatgatggaggagaagctgctgcatgctgagttcaagcgggaggtgcagctgcaggccatcgtgaagaaggcccaggaggaggaggccaaggtgaatgagatcgccttcatcaacaccctggaggcccagaacaagagacatgatgtgctgagcaagctgaaggagtatgagcagaggctgaatgagctgcaggaggagcggcagaggcggcaggaggagaagcaggccagagatgaggccgtgcaggagaggaagagggccctggaggccgagcggcaggcccgggtggaggagctgctgatgaagaggaaggagcaggaggcccgcatcgagcagcagaggcaggagaaggagaaggcccgggaggatgctgcccgggagcgggcccgggaccgggaggagcggctggccgccctgacagctgcccagcaggaggccatggaggagctgcagaagaagatccagctgaagcatgatgagagcatcagaagacacatggagcagatcgagcagaggaaggagaaggctgctgagctgagcagcggcagacatgccaacacagattatgcccccaagctgaccccctatgaaaggaagaagcagtgcagcctgtgcaatgtgctgatcagcagcgaggtgtacctgttcagccacgtgaagggcaggaagcaccagcaggccgtgcgggagaacaccagcatccagggccgggagctgagtgatgaggaggtggagcacctgagcctgaagaagtacatcatcgacatcgtggtggagagcacagccccagctgaggccctgaaggatggagaggagcggcagaagaacaagaagaaggccaagaagatcaaggccaggatgaacttccgggccaaggagtatgagagcctgatggagaccaagaacagcggcagtgacagcccctacaaggccaagctgcagaggctggccaaggacctgctgaagcaggtgcaggtgcaggacagcggctcctgggccaacaacaaggtgtctgccctggacaggaccctgggggagatcacccgcatcctggagaaggaaaatgtggccgaccagatcgccttccaggccgccggcggcctgacagccctggagcacatcctgcaggccgtggtgcctgccaccaacgtgaacacagtgctgcgcatcccccccaagagcctgtgcaatgccatcaacgtgtacaacctgacctgcaacaactgcagcgagaactgcagtgatgtgctcttcagcaacaagatcaccttcctgatggacctgctgatccaccagctgactgtgtatgtgcctgatgagaacaacaccatcctgggcaggaacaccaacaagcaggtgtttgagggcctgaccaccggcctgctgaaggtgtctgctgtggtgctgggctgcctgattgccaacagaccagatggcaactgccagcctgccacccccaagatccccacccaggagatgaagaacaagcccagccagggcgaccccttcaacaacagagtgcaggacctgatctcctatgtggtgaacatgggcctgattgacaagctgtgtgcctgcttcctgtctgtgcagggccctgtggatgagaaccccaagatggccatcttcctgcagcacgccgccggcctgctgcacgccatgtgcaccctgtgctttgctgtgacaggccgcagctacagcatctttgacaacaaccggcaggaccccaccggcctgacagctgccctgcaggccacagacctggccggcgtgctgcacatgctgtactgtgtgctcttccacggcaccatcctggaccccagcacagccagccccaaggagaactacacccagaacaccatccaggtggccatccagagcctgcgcttcttcaacagctttgctgccctgcacctgcctgccttccaggtgcccagcatcggcctgtaccgctgctag

SEQ ID NO: 171459 - DNA, 4203 bp, synthetic construct
  misc_feature 1..4203: note = Description of Artificial Sequence: Synthetic coding sequence
  source 1..4203: mol_type = other DNA
atgatggccagcttccagaggagcaacagccatgacaaggtgagaagaattgtggccgaggagggccgcacagccaggaacctgattgcctggagcgtgcccctggagagcaaggatgatgatggcaagcccaagtgccagacaggaggcaagagcaagaggaccatccagggcacccacaagaccaccaagcagagcacagctgtggactgcaagatcaccagcagcaccaccggggacaagcactttgacaagagccccaccaagaccaggcaccccaggaagattgacctgcgggcccgctactgggccttcctgtttgacaacctgcggcgggctgtggatgagatctacgtgacctgtgagagtgaccagagcgtggtggagtgcaaggaggtgctgatgatgctggacaactacgtgcgggacttcaaggccctgattgactggatccagctgcaggagaagctggagaagacagatgcccagagccggcccaccagcctggcctgggaggtgaagaagatgagccctggaagacatgtgatccccagccccagcacagaccgcatcaacgtgaccagcaatgcccggcgcagcctgaactttggaggcagcactggaacagtgcctgccccccggctggcccccaccggggtgtcctgggccgacaaggtgaaggcccaccacacaggcagcacagccagcagcgagatcaccccagcccagagctgcccccccatgacagtgcagaaggccagcaggaagaatgaaaggaaggatgctgagggctgggagaccgtgcagaggggccggcccatccgcagccgcagcacagctgtgatgcccaaggtgtccctggccacagaggccaccaggagcaaggatgacagcgacaaggaaaatgtgtgcctgctgcctgatgagagcatccagaagggccagtttgtgggagatggcaccagcaacaccatcgagagccaccccaaggacagcctgcacagctgtgaccaccccctggccgagaagacccagttcaccgtgtccaccctggatgatgtgaagaacagcggcagcatccgggacaactacgtgaggaccagcgagatctctgctgtgcacatcgacacagaatgtgtgtctgtgatgctgcaggccggcaccccacccctgcaggtgaatgaggagaagtttcctgctgagaaggccagaattgaaaatgagatggaccccagcgacatcagcaacagcatggccgaggtgctggccaagaaggaggagctggccgaccggctggagaaggccaatgaggaggccatcgccagcgccatcgccgaggaggagcagctgacccgggagattgaggccgaggagaacaatgacatcaacatcgagacagacaatgacagcgacttcagcgcctccatgggcagcggctctgtgtccttctgtggcatgtccatggactggaatgatgtgctggccgactatgaggcccgggagagctggaggcagaacacctcctggggagacatcgtggaggaggagcccgcccggcccccaggccacggcatccacatgcatgagaagctgagcagccccagcaggaagaggaccatcgccgagagcaagaagaagcatgaggagaagcagatgaaggcccagcagctgcgggagaagctgcgggaggagaagaccctgaagctgcagaagctgctggagcgggagaaggatgtgaggaagtggaaggaggagctgctggaccagaggaggaggatgatggaggagaagctgctgcatgctgagttcaagcgggaggtgcagctgcaggccatcgtgaagaaggcccaggaggaggaggccaaggtgaatgagatcgccttcatcaacaccctggaggcccagaacaagagacatgatgtgctgagcaagctgaaggagtatgagcagaggctgaatgagctgcaggaggagcggcagaggcggcaggaggagaagcaggccagagatgaggccgtgcaggagaggaagagggccctggaggccgagcggcaggcccgggtggaggagctgctgatgaagaggaaggagcaggaggcccgcatcgagcagcagaggcaggagaaggagaaggcccgggaggatgctgcccgggagcgggcccgggaccgggaggagcggctggccgccctgacagctgcccagcaggaggccatggaggagctgcagaagaagatccagctgaagcatgatgagagcatcagaagacacatggagcagatcgagcagaggaaggagaaggctgctgagctgagcagcggcagacatgccaacacagattatgcccccaagctgaccccctatgaaaggaagaagcagtgcagcctgtgcaatgtgctgatcagcagcgaggtgtacctgttcagccacgtgaagggcaggaagcaccagcaggccgtgcgggagaacaccagcatccagggccgggagctgagtgatgaggaggtggagcacctgagcctgaagaagtacatcatcgacatcgtggtggagagcacagccccagctgaggccctgaaggatggagaggagcggcagaagaacaagaagaaggccaagaagatcaaggccaggatgaacttccgggccaaggagtatgagagcctgatggagaccaagaacagcggcagtgacagcccctacaaggccaagctgcagaggctggccaaggacctgctgaagcaggtgcaggtgcaggacagcggctcctgggccaacaacaaggtgtctgccctggacaggaccctgggggagatcacccgcatcctggagaaggaaaatgtggccgaccagatcgccttccaggccgccggcggcctgacagccctggagcacatcctgcaggccgtggtgcctgccaccaacgtgaacacagtgctgcgcatcccccccaagagcctgtgcaatgccatcaacgtgtacaacctgacctgcaacaactgcagcgagaactgcagtgatgtgctcttcagcaacaagatcaccttcctgatggacctgctgatccaccagctgactgtgtatgtgcctgatgagaacaacaccatcctgggcaggaacaccaacaagcaggtgtttgagggcctgaccaccggcctgctgaaggtgtctgctgtggtgctgggctgcctgattgccaacagaccagatggcaactgccagcctgccacccccaagatccccacccaggagatgaagaacaagcccagccagggcgaccccttcaacaacagagtgcaggacctgatctcctatgtggtgaacatgggcctgattgacaagctgtgtgcctgcttcctgtctgtgcagggccctgtggatgagaaccccaagatggccatcttcctgcagcacgccgccggcctgctgcacgccatgtgcaccctgtgctttgctgtgacaggccgcagctacagcatctttgacaacaaccggcaggaccccaccggcctgacagctgccctgcaggccacagacctggccggcgtgctgcacatgctgtactgtgtgctcttccacggcaccatcctggaccccagcacagccagccccaaggagaactacacccagaacaccatccaggtggccatccagagcctgcgcttcttcaacagctttgctgccctgcacctgcctgccttccagagcatcgtgggcgctgagggcctgagcctggccttccgccacatggccagcagcctgctgggccactgcagccaggtgtcctgtgagagcctgctgcacgaggtgattgtgtgtgtgggctacttcaccgtgaaccacccagacaaccaggtgattgtgcagagcggccgccaccccaccgtgctgcagaagctgtgccagctgcccttccagtacttcagtgaccccaggctcatcaaggtgctcttccccagcctgattgctgcctgctacaacaaccaccagaacaagatcatcctggagcaggagatgagctgtgtgctgctggccaccttcatccaggacctggcccagaccccaggccaggccgagaaccagccctaccagcccaagggcaagtgcctgggcagccaggactacctggagctggccaaccgcttcccccagcaggcctgggaggaggcccggcagttcttcctgaagaaggagaagaagtag

SEQ ID NO: 171460 - DNA, 3465 bp, synthetic construct
  misc_feature 1..3465: note = Description of Artificial Sequence: Synthetic coding sequence
  source 1..3465: mol_type = other DNA
atgaagaccaagtacatcttctgcaacatcacagagaggaaggatgctgagggctgggagaccgtgcagaggggccggcccatccgcagccgcagcacagctgtgatgcccaaggtgtccctggccacagaggccaccaggagcaaggatgacagcgacaaggaaaatgtgtgcctgctgcctgatgagagcatccagaagggccagtttgtgggagatggcaccagcaacaccatcgagagccaccccaaggacagcctgcacagctgtgaccaccccctggccgagaagacccagttcaccgtgtccaccctggatgatgtgaagaacagcggcagcatccgggacaactacgtgaggaccagcgagatctctgctgtgcacatcgacacagaatgtgtgtctgtgatgctgcaggccggcaccccacccctgcaggtgaatgaggagaagtttcctgctgagaaggccagaattgaaaatgagatggaccccagcgacatcagcaacagcatggccgaggtgctggccaagaaggaggagctggccgaccggctggagaaggccaatgaggaggccatcgccagcgccatcgccgaggaggagcagctgacccgggagattgaggccgaggagaacaatgacatcaacatcgagacagacaatgacagcgacttcagcgcctccatgggcagcggctctgtgtccttctgtggcatgtccatggactggaatgatgtgctggccgactatgaggcccgggagagctggaggcagaacacctcctggggagacatcgtggaggaggagcccgcccggcccccaggccacggcatccacatgcatgagaagctgagcagccccagcaggaagaggaccatcgccgagagcaagaagaagcatgaggagaagcagatgaaggcccagcagctgcgggagaagctgcgggaggagaagaccctgaagctgcagaagctgctggagcgggagaaggatgtgaggaagtggaaggaggagctgctggaccagaggaggaggatgatggaggagaagctgctgcatgctgagttcaagcgggaggtgcagctgcaggccatcgtgaagaaggcccaggaggaggaggccaaggtgaatgagatcgccttcatcaacaccctggaggcccagaacaagagacatgatgtgctgagcaagctgaaggagtatgagcagaggctgaatgagctgcaggaggagcggcagaggcggcaggaggagaagcaggccagagatgaggccgtgcaggagaggaagagggccctggaggccgagcggcaggcccgggtggaggagctgctgatgaagaggaaggagcaggaggcccgcatcgagcagcagaggcaggagaaggagaaggcccgggaggatgctgcccgggagcgggcccgggaccgggaggagcggctggccgccctgacagctgcccagcaggaggccatggaggagctgcagaagaagatccagctgaagcatgatgagagcatcagaagacacatggagcagatcgagcagaggaaggagaaggctgctgagctgagcagcggcagacatgccaacacagattatgcccccaagctgaccccctatgaaaggaagaagcagtgcagcctgtgcaatgtgctgatcagcagcgaggtgtacctgttcagccacgtgaagggcaggaagcaccagcaggccgtgcgggagaacaccagcatccagggccgggagctgagtgatgaggaggtggagcacctgagcctgaagaagtacatcatcgacatcgtggtggagagcacagccccagctgaggccctgaaggatggagaggagcggcagaagaacaagaagaaggccaagaagatcaaggccaggatgaacttccgggccaaggagtatgagagcctgatggagaccaagaacagcggcagtgacagcccctacaaggccaagctgcagaggctggccaaggacctgctgaagcaggtgcaggtgcaggacagcggctcctgggccaacaacaaggtgtctgccctggacaggaccctgggggagatcacccgcatcctggagaaggaaaatgtggccgaccagatcgccttccaggccgccggcggcctgacagccctggagcacatcctgcaggccgtggtgcctgccaccaacgtgaacacagtgctgcgcatcccccccaagagcctgtgcaatgccatcaacgtgtacaacctgacctgcaacaactgcagcgagaactgcagtgatgtgctcttcagcaacaagatcaccttcctgatggacctgctgatccaccagctgactgtgtatgtgcctgatgagaacaacaccatcctgggcaggaacaccaacaagcaggtgtttgagggcctgaccaccggcctgctgaaggtgtctgctgtggtgctgggctgcctgattgccaacagaccagatggcaactgccagcctgccacccccaagatccccacccaggagatgaagaacaagcccagccagggcgaccccttcaacaacagagtgcaggacctgatctcctatgtggtgaacatgggcctgattgacaagctgtgtgcctgcttcctgtctgtgcagggccctgtggatgagaaccccaagatggccatcttcctgcagcacgccgccggcctgctgcacgccatgtgcaccctgtgctttgctgtgacaggccgcagctacagcatctttgacaacaaccggcaggaccccaccggcctgacagctgccctgcaggccacagacctggccggcgtgctgcacatgctgtactgtgtgctcttccacggcaccatcctggaccccagcacagccagccccaaggagaactacacccagaacaccatccaggtggccatccagagcctgcgcttcttcaacagctttgctgccctgcacctgcctgccttccagagcatcgtgggcgctgagggcctgagcctggccttccgccacatggccagcagcctgctgggccactgcagccaggtgtcctgtgagagcctgctgcacgaggtgattgtgtgtgtgggctacttcaccgtgaaccacccagacaaccaggtgattgtgcagagcggccgccaccccaccgtgctgcagaagctgtgccagctgcccttccagtacttcagtgaccccaggctcatcaaggtgctcttccccagcctgattgctgcctgctacaacaaccaccagaacaagatcatcctggagcaggagatgagctgtgtgctgctggccaccttcatccaggacctggcccagaccccaggccaggccgagaaccagccctaccagcccaagggcaagtgcctgggcagccaggactacctggagctggccaaccgcttcccccagcaggcctgggaggaggcccggcagttcttcctgaagaaggagaagaagtag

SEQ ID NO: 171461 - DNA, 4203 bp, synthetic construct; identical to SEQ ID NO: 171459
  misc_feature 1..4203: note = Description of Artificial Sequence: Synthetic coding sequence
  source 1..4203: mol_type = other DNA

SEQ ID NO: 171462 - DNA, 1233 bp, synthetic construct
  misc_feature 1..1233: note = Description of Artificial Sequence: Synthetic coding sequence
  source 1..1233: mol_type = other DNA
atgcacaggaagcacctgcaggagatcccagacctgagcagcaatgtggccaccagcttcacctggggctgggacagcagcaagaccagcgagctgctgagcggcatgggcgtgtctgccctggagaaggaggagccagacagcgagaacatcccccaggagctgctgagcaacctgggccaccctgagagcccccccaggaagaggctgaagagcaaaggaagtgacaaggactttgtgattgtgagaagacccaagctgaaccgggagaacttccctggggtgtcctgggacagcctgcctgatgagctgctgctgggcatcttcagctgcctgtgcctgcctgagctgctgaaggtgtctggagtgtgcaagcgctggtaccgcctggccagtgatgagagcctgtggcagaccctggacctgaccgggaagaacctgcacccagatgtgacaggccgcctgctgagccagggcgtgattgccttccgctgccccaggagcttcatggaccagcccctggccgagcacttcagccccttccgggtgcagcacatggacctgagcaacagcgtgattgaggtgtccaccctgcacggcatcctgagccagtgcagcaagctgcagaacctgagcctggagggcctgcggctgagtgaccccatcgtgaacaccctggccaagaacagcaacctggtgcggctgaacctgagcggctgcagcggcttcagcgagtttgccctgcagaccctgctgagcagctgcagccggctggatgagctgaacctgtcctggtgctttgacttcacagagaagcacgtgcaggtggccgtggcccacgtgtctgagaccatcacccagctgaacctgagcggctacaggaagaacctgcagaagagtgacctgagcaccctggtgcggcgctgccccaacctggtgcacctggacctgagtgacagcgtgatgctgaagaatgactgcttccaggagttcttccagctgaactacctgcagcacctgagcctgagccgctgctatgacatcatccctgagaccctgctgctggtgaccagggctggggtgcgcatccggctggacagcgacatcggctgcccccagacctaccgcaccagcaagctgaagagcagccacaagctgttctgccagcacgtgcgggtcatctgcatctttgtgtgtgacttctacttctaccgcctggtgctgaagcagtag

SEQ ID NO: 171463 - DNA, 1275 bp, synthetic construct
  misc_feature 1..1275: note = Description of Artificial Sequence: Synthetic coding sequence
  source 1..1275: mol_type = other DNA
atgcacaggaagcacctgcaggagatcccagacctgagcagcaatgtggccaccagcttcacctggggctgggacagcagcaagaccagcgagctgctgagcggcatgggcgtgtctgccctggagaaggaggagccagacagcgagaacatcccccaggagctgctgagcaacctgggccaccctgagagcccccccaggaagaggctgaagagcaaaggaagtgacaaggactttgtgattgtgagaagacccaagctgaaccgggagaacttccctggggtgtcctgggacagcctgcctgatgagctgctgctgggcatcttcagctgcctgtgcctgcctgagctgctgaaggtgtctggagtgtgcaagcgctggtaccgcctggccagtgatgagagcctgtggcagaccctggacctgaccgggaagaacctgcacccagatgtgacaggccgcctgctgagccagggcgtgattgccttccgctgccccaggagcttcatggaccagcccctggccgagcacttcagccccttccgggtgcagcacatggacctgagcaacagcgtgattgaggtgtccaccctgcacggcatcctgagccagtgcagcaagctgcagaacctgagcctggagggcctgcggctgagtgaccccatcgtgaacaccctggccaagaacagcaacctggtgcggctgaacctgagcggctgcagcggcttcagcgagtttgccctgcagaccctgctgagcagctgcagccggctggatgagctgaacctgtcctggtgctttgacttcacagagaagcacgtgcaggtggccgtggcccacgtgtctgagaccatcacccagctgaacctgagcggctacaggaagaacctgcagaagagtgacctgagcaccctggtgcggcgctgccccaacctggtgcacctggacctgagtgacagcgtgatgctgaagaatgactgcttccaggagttcttccagctgaactacctgcagcacctgagcctgagccgctgctatgacatcatccctgagaccctgctggagctgggggagatccccaccctgaagaccctgcaggtgtttggcatcgtgcctgatggcaccctgcagctgctgaaggaggccctgccccacctgcagatcaactgcagccacttcaccaccatcgcccggcccaccatcggcaacaagaagaaccaggagatctggggcatcaagtgccgcctgaccctgcagaagcccagctgcctgtag

SEQ ID NO: 171464 - DNA, 1173 bp, synthetic construct
  misc_feature 1..1173: note = Description of Artificial Sequence: Synthetic coding sequence
  source 1..1173: mol_type = other DNA
atgcacaggaagcacctgcaggagaaggaggagccagacagcgagaacatcccccaggagctgctgagcaacctgggccaccctgagagcccccccaggaagaggctgaagagcaaaggaagtgacaaggactttgtgattgtgagaagacccaagctgaaccgggagaacttccctggggtgtcctgggacagcctgcctgatgagctgctgctgggcatcttcagctgcctgtgcctgcctgagctgctgaaggtgtctggagtgtgcaagcgctggtaccgcctggccagtgatgagagcctgtggcagaccctggacctgaccgggaagaacctgcacccagatgtgacaggccgcctgctgagccagggcgtgattgccttccgctgccccaggagcttcatggaccagcccctggccgagcacttcagccccttccgggtgcagcacatggacctgagcaacagcgtgattgaggtgtccaccctgcacggcatcctgagccagtgcagcaagctgcagaacctgagcctggagggcctgcggctgagtgaccccatcgtgaacaccctggccaagaacagcaacctggtgcggctgaacctgagcggctgcagcggcttcagcgagtttgccctgcagaccctgctgagcagctgcagccggctggatgagctgaacctgtcctggtgctttgacttcacagagaagcacgtgcaggtggccgtggcccacgtgtctgagaccatcacccagctgaacctgagcggctacaggaagaacctgcagaagagtgacctgagcaccctggtgcggcgctgccccaacctggtgcacctggacctgagtgacagcgtgatgctgaagaatgactgcttccaggagttcttccagctgaactacctgcagcacctgagcctgagccgctgctatgacatcatccctgagaccctgctggagctgggggagatccccaccctgaagaccctgcaggtgtttggcatcgtgcctgatggcaccctgcagctgctgaaggaggccctgccccacctgcagatcaactgcagccacttcaccaccatcgcccggcccaccatcggcaacaagaagaaccaggagatctggggcatcaagtgccgcctgaccctgcagaagcccagctgcctgtag

SEQ ID NO: 171465 - DNA, 633 bp, synthetic construct
  misc_feature 1..633: note = Description of Artificial Sequence: Synthetic coding sequence
  source 1..633: mol_type = other DNA
atggaccagcccctggccgagcacttcagcaccctggccaagaacagcaacctggtgcggctgaacctgagcggctgcagcggcttcagcgagtttgccctgcagaccctgctgagcagctgcagccggctggatgagctgaacctgtcctggtgctttgacttcacagagaagcacgtgcaggtggccgtggcccacgtgtctgagaccatcacccagctgaacctgagcggctacaggaagaacctgcagaagagtgacctgagcaccctggtgcggcgctgccccaacctggtgcacctggacctgagtgacagcgtgatgctgaagaatgactgcttccaggagttcttccagctgaactacctgcagcacctgagcctgagccgctgctatgacatcatccctgagaccctgctggagctgggggagatccccaccctgaagaccctgcaggtgtttggcatcgtgcctgatggcaccctgcagctgctgaaggaggccctgccccacctgcagatcaactgcagccacttcaccaccatcgcccggcccaccatcggcaacaagaagaaccaggagatctggggcatcaagtgccgcctgaccctgcagaagcccagctgcctgtag

SEQ ID NO: 171466 - DNA, 1362 bp, synthetic construct
  misc_feature 1..1362: note = Description of Artificial Sequence: Synthetic coding sequence
  source 1..1362: mol_type = other DNA
atggccctggtgcgggccctggtgtgctgcctgctgacagcctggcactgccgcagcggcctgggcctgcctgtggccccagctgggggcagaaatcctcctccagccatcggccagttctggcacgtgacagacctgcacctggaccccacctaccacatcacagatgaccacaccaaggtgtgtgccagcagcaagggggccaatgccagcaaccctggcccctttggagatgtgctgtgtgacagcccctaccagctgatcctgagcgcctttgacttcatcaagaacagcggccaggaggccagcttcatgatctggacaggagacagccccccccacgtgcctgtgcctgagctgagcacagacaccgtcatcaacgtcatcaccaacatgaccaccaccatccagagcctcttccccaacctgcaggtgtttcctgccctgggcaaccacgactactggccccaggaccagctgcctgtggtgaccagcaaggtgtacaatgctgtggccaacctgtggaagccctggctggatgaggaggccatcagcaccctgaggaaaggaggcttctacagccagaaggtgaccaccaaccccaacctgcgcatcatcagcctgaacaccaacctgtactacggccccaacatcatgaccctgaacaagacagatcctgccaaccagtttgagtggctggagagcaccctgaacaacagccagcagaacaaggagaaggtgtacatcatcgcccacgtgcctgtgggctacctgcccagcagccagaacatcacagccatgagggagtactacaatgagaagctgattgacatcttccagaagtacagtgatgtgattgctggccagttctacggccacacccaccgggacagcatcatggtgctgagtgacaagaagggcagccctgtgaacagcctgtttgtggccccagctgtgacccctgtgaagtctgtgctggagaagcagaccaacaaccctggcatccgcctcttccagtatgacccccgggactacaagctgctggacatgctgcagtactacctgaacctgacagaggccaacctgaagggggagagcatctggaagctggagtacatcctgacccagacctatgacatcgaggacctgcagcctgagagcctgtatggcctggccaagcagttcaccatcctggacagcaagcagttcatcaagtactacaactacttctttgtgtcctatgacagctctgtgacctgtgacaagacctgcaaggccttccagatctgtgccatcatgaacctggacaacatctcctatgctgactgcctgaagcagctgtacatcaagcacaactactag

SEQ ID NO: 171467 - DNA, 969 bp, synthetic construct
  misc_feature 1..969: note = Description of Artificial Sequence: Synthetic coding sequence
  source 1..969: mol_type = other DNA
atgaccaccaccatccagagcctcttccccaacctgcaggtgtttcctgccctgggcaaccacgactactggccccaggaccagctgcctgtggtgaccagcaaggtgtacaatgctgtggccaacctgtggaagccctggctggatgaggaggccatcagcaccctgaggaagggcggcttctacagccagaaggtgaccaccaaccccaacctgcgcatcatcagcctgaacaccaacctgtactacggccccaacatcatgaccctgaacaagacagatcctgccaaccagtttgagtggctggagagcaccctgaacaacagccagcagaacaaggagaaggtgtacatcatcgcccacgtgcctgtgggctacctgcccagcagccagaacatcacagccatgagggagtactacaatgagaagctgattgacatcttccagaagtacagtgatgtgattgctggccagttctacggccacacccaccgggacagcatcatggtgctgagtgacaagaagggcagccctgtgaacagcctgtttgtggccccagctgtgacccctgtgaagtctgtgctggagaagcagaccaacaaccctggcatccgcctcttccagtatgacccccgggactacaagctgctggacatgctgcagtactacctgaacctgacagaggccaacctgaagggggagagcatctggaagctggagtacatcctgacccagacctatgacatcgaggacctgcagcctgagagcctgtatggcctggccaagcagttcaccatcctggacagcaagcagttcatcaagtactacaactacttctttgtgtcctatgacagctctgtgacctgtgacaagacctgcaaggccttccagatctgtgccatcatgaacctggacaacatctcctatgctgactgcctgaagcagctgtacatcaagcacaactactag

SEQ ID NO: 171468 - DNA, 726 bp, synthetic construct
  misc_feature 1..726: note = Description of Artificial Sequence: Synthetic coding sequence
  source 1..726: mol_type = other DNA
atgaaggaggtggtgtactggagccccaagaaggtggccgactggctgctggagaatgccatgcctgagtactgtgagcccctggagcacttcaccggccaggacctgatcaacctgacccaggaggacttcaagaagccacccctgtgccgggtgtccagtgacaatggccagaggctgctggacatgattgagaccctgaagatggagcaccacctggaggcccacaagaatggccacgccaacggccacctgaacattggagtggacatccccaccccagatggcagcttcagcatcaagatcaagcccaacggcatgcccaacggctacaggaaggagatgatcaagatccccatgcctgagctggagaggagccagtaccccatggagtggggcaagaccttcctggccttcctgtatgccctgagctgctttgtgctgaccaccgtgatgatctctgtggtgcatgagcgggtgccccccaaggaggtgcagccccccctgcctgacaccttctttgaccacttcaacagagtgcagtgggccttcagcatctgtgagatcaatggcatgatcctggtgggcctgtggctgatccagtggctgctgctgaagtacaaggatgtgggcaatgaaagccgggtggtgatgatcttcctgagcatcgtgcaccctgtgctgctgctgggcagcattgctggcttcctgagcctgagcctgtag

SEQ ID NO: 171469 - DNA, 1242 bp, synthetic construct
  misc_feature 1..1242: note = Description of Artificial Sequence: Synthetic coding sequence
  source 1..1242: mol_type = other DNA
atgaaggaggtggtgtactggagccccaagaaggtggccgactggctgctggagaatgccatgcctgagtactgtgagcccctggagcacttcaccggccaggacctgatcaacctgacccaggaggacttcaagaagccacccctgtgccgggtgtccagtgacaatggccagaggctgctggacatgattgagaccctgaagatggagcaccacctggaggcccacaagaatggccacgccaacggccacctgaacattggagtggacatccccaccccagatggcagcttcagcatcaagatcaagcccaacggcatgcccaacggctacaggaaggagatgatcaagatccccatgcctgagctggagaggagccagtaccccatggagtggggcaagaccttcctggccttcctgtatgccctgagctgctttgtgctgaccaccgtgatgatctctgtggtgcatgagcgggtgccccccaaggaggtgcagccccccctgcctgacaccttctttgaccacttcaacagagtgcagtgggccttcagcatctgtgagatcaatggcatgatcctggtgggcctgtggctgatccagtggctgctgctgaagtacaagagcatcatcagccgccgcttcttctgcatcgtgggcaccctgtacctgtaccgctgcatcaccatgtatgtgaccaccctgcctgtgcccggcatgcacttcaactgcagccccaagctgtttggagactgggaggcccagctgcggcgcatcatgaagctgattgctgggggcggcctgagcatcaccggcagccacaacatgtgtggggactacctgtacagcggccacacagtgatgctgaccctgacctacctgttcatcaaggagtacagcccccggcggctgtggtggtaccactggatctgctggctgctgtctgtggtgggcatcttctgcatcctgctggcccatgaccactacacagtggatgtggtggtggcctactacatcaccaccaggctcttctggtggtaccacaccatggccaaccagcaggtgctgaaggaggccagccagatgaacctgctggcccgggtgtggtggtaccggcccttccagtactttgagaagaatgtgcagggcatcgtgcccaggagctaccactggcccttcccctggcctgtggtgcacctgagccggcaggtgaagtacagccggctggtgaatgacacctag

SEQ ID NO: 171470 - DNA, 642 bp, synthetic construct
  misc_feature 1..642: note = Description of Artificial Sequence: Synthetic coding sequence
  source 1..642: mol_type = other DNA
acctacatgtacatcagcaacaagagcatcatcagccgccgcttcttctgcatcgtgggcaccctgtacctgtaccgctgcatcaccatgtatgtgaccaccctgcctgtgcccggcatgcacttcaactgcagccccaagctgtttggagactgggaggcccagctgcggcgcatcatgaagctgattgctgggggcggcctgagcatcaccggcagccacaacatgtgtggggactacctgtacagcggccacacagtgatgctgaccctgacctacctgttcatcaaggagtacagcccccggcggctgtggtggtaccactggatctgctggctgctgtctgtggtgggcatcttctgcatcctgctggcccatgaccactacacagtggatgtggtggtggcctactacatcaccaccaggctcttctggtggtaccacaccatggccaaccagcaggtgctgaaggaggccagccagatgaacctgctggcccgggtgtggtggtaccggcccttccagtactttgagaagaatgtgcagggcatcgtgcccaggagctaccactggcccttcccctggcctgtggtgcacctgagccggcaggtgaagtacagccggctggtgaatgacacctag

SEQ ID NO: 171471 - DNA, 735 bp, synthetic construct
  misc_feature 1..735: note = Description of Artificial Sequence: Synthetic coding sequence
  source 1..735: mol_type = other DNA
atgggcggccggggcggcggcggccgcagccggcagctgcccggccgcttccgggccccagctgcccgctggccaggcggccgctggctgcccggggcccccaggacagtgacctggagcatcatcagccgccgcttcttctgcatcgtgggcaccctgtacctgtaccgctgcatcaccatgtatgtgaccaccctgcctgtgcccggcatgcacttcaactgcagccccaagctgtttggagactgggaggcccagctgcggcgcatcatgaagctgattgctgggggcggcctgagcatcaccggcagccacaacatgtgtggggactacctgtacagcggccacacagtgatgctgaccctgacctacctgttcatcaaggagtacagcccccggcggctgtggtggtaccactggatctgctggctgctgtctgtggtgggcatcttctgcatcctgctggcccatgaccactacacagtggatgtggtggtggcctactacatcaccaccaggctcttctggtggtaccacaccatggccaaccagcaggtgctgaaggaggccagccagatgaacctgctggcccgggtgtggtggtaccggcccttccagtactttgagaagaatgtgcagggcatcgtgcccaggagctaccactggcccttcccctggcctgtggtgcacctgagccggcaggtgaagtacagccggctggtgaatgacacctag

SEQ ID NO: 171472 - DNA, 1098 bp, synthetic construct
  misc_feature 1..1098: note = Description of Artificial Sequence: Synthetic coding sequence
  source 1..1098: mol_type = other DNA
atggacatcatcgagacagccaagctggaggagcacctggagaaccagcccagcgaccccaccaacacctacgcccggcctgctgagcctgtggaggaggagaacaagaatggaaatggcaagcccaagagcctgagcagcggcctgaggaagggcaccaagaagtacccagactacatccagatcgccatgcccacagagagcaggaacaagttccccctggagtggtggaagacaggaattgccttcatctatgctgtgttcaacctggtgctgaccaccgtgatgatcaccgtggtgcatgagcgggtgccccccaaggagctgagcccccccctgcctgacaagttctttgactacatcgacagagtgaagtgggccttctctgtgtctgagatcaatggcatcatcctggtgggcctgtggatcacccagtggctgttcctgcgctacaagagcatcgtgggccgccgcttctgcttcatcatcggcaccctgtacctgtaccgctgcatcaccatgtatgtgaccaccctgcctgtgcccggcatgcacttccagtgtgcccccaagctgaatggagacagccaggccaaggtgcagaggatcctgcggctcatcagcggcggcggcctgagcatcaccggcagccacatcctgtgtggggacttcctgttcagcggccacacagtgaccctgaccctgacctacctgttcatcaaggagtacagccccaggcacttctggtggtaccacctgatctgctggctgctgtctgctgctggcatcatctgcatcctggtggcccacgagcactacaccattgatgtgatcatcgcctactacatcaccaccaggctcttctggtggtaccacagcatggccaatgagaagaacctgaaggtgagcagccagaccaacttcctgagccgggcctggtggttccccatcttctacttctttgagaagaatgtgcagggcagcatcccctgctgcttctcctggcccctgtcctggcccccaggctgcttcaagagcagctgcaagaagtacagccgggtgcagaagattggagaagataatgagaagagcacctag

SEQ ID NO: 171473 - DNA, 1098 bp, synthetic construct; identical to SEQ ID NO: 171472
  misc_feature 1..1098: note = Description of Artificial Sequence: Synthetic coding sequence
  source 1..1098: mol_type = other DNA

SEQ ID NO: 171474 - DNA, 1098 bp, synthetic construct; identical to SEQ ID NO: 171472
  misc_feature 1..1098: note = Description of Artificial Sequence: Synthetic coding sequence
  source 1..1098: mol_type = other DNA

SEQ ID NO: 171475 - DNA, 135 bp, synthetic construct
  misc_feature 1..135: note = Description of Artificial Sequence: Synthetic coding sequence
  source 1..135: mol_type = other DNA
atggacatcatcgagacagccaagctggaggagcacctggagaaccagcccagcgaccccaccaacacctacgcccggcctgctgagcctgtggaggaggagaacaagaatggaaatggcaagcccaagagctag

SEQ ID NO: 171476 - DNA, 105 bp, synthetic construct
  misc_feature 1..105: note = Description of Artificial Sequence: Synthetic coding sequence
  source 1..105: mol_type = other DNA
atggacatcatcgagacagccaagctggaggagcacctggagaaccagcccagcgaccccaccaacacctacgcccggcctgctgagcctgtggaggaggagtag

SEQ ID NO: 171477 - DNA, 1326 bp, synthetic construct
  misc_feature 1..1326: note = Description of Artificial Sequence: Synthetic coding sequence
  source 1..1326: mol_type = other DNA
atgagcctgcggcagaggctggcccagctggtgggccgcctgcaggacccccagaaggtggcccgcttccagaggctgtgtggggtggaggccccaccccggcgctctgctgacagaagagaagatgagaaggccgaggcccccctggccggggacccccggctgcggggccggcagcccggggcccctgggggcccccagcccccaggcagtgacaggaaccagtgcccagccaagccagatggcggcggggccccaaatggagtgagaaatggcctggccgctgagctgggccctgccagccccaggagagctggggccctgcggaggaacagcctgaccggggaggagggccagctggcccgggtgagcaactggcccctgtactgcctcttctgcttcggcacagagctgggcaatgagctgttctacatcctcttcttccccttctggatctggaacctggaccccctggtgggccgccgcctggtggtgatctgggtgctggtgatgtacctgggccagtgcaccaaggacatcatccgctggcccaggcctgccagcccccctgtggtgaagctggaggtgttctacaacagcgagtacagcatgcccagcacccacgccatgtctggaacagccatccccatctccatggtgctgctgacctacggccgctggcagtaccccctcatctacggcctcatcctgatcccctgctggtgcagcctggtgtgcctgagccgcatctacatgggcatgcacagcatcctggacatcatcgccggcttcctgtacaccatcctgatcctggccgtgttctacccctttgtggacctgattgacaacttcaaccagacccacaagtatgcccccttcatcatcatcggcctgcacctggccctgggcatcttctccttcaccctggacacctggagcaccagcagaggagacacagctgagatcctgggcagcggggccggcatcgcctgtggcagccacgtgacctacaacatgggcctggtgctggaccccagcctggacaccctgcccctggccggcccccccatcaccgtgaccctgtttgggaaggccatcctgcgcatcctgattggcatggtgtttgtgctgatcatcagagatgtgatgaagaagatcaccatccccctggcctgcaagatcttcaacatcccctgtgatgacatcaggaaggcccggcagcacatggaggtggagctgccctaccgctacatcacctacggcatggtgggcttcagcatcaccttctttgtgccctacatcttcttcttcatcggcatctcctag

SEQ ID NO: 171478 - DNA, 1200 bp, synthetic construct
  misc_feature 1..1200: note = Description of Artificial Sequence: Synthetic coding sequence
  source 1..1200: mol_type = other DNA
atggccgagctgctgcggagcctgcaggacagccagctggtggcccgcttccagaggcgctgtggcctcttccctgccccagatgagggccccagagaaaatggagctgaccccacagagcgggccgcccgggtgcctggggtggagcacctgcctgctgccaatggaaaaggaggagaggccccagccaacggcctgcggcgggccgccgcccctgaggcctacgtgcagaagtatgtggtgaagaactacttctactactacctgttccagttctctgctgccctgggccaggaggtgttctacatcaccttcctgcccttcacccactggaacatcgacccctacctgagcagaagactcatcatcatctgggtgctggtgatgtacatcggccaggtggccaaggatgtgctgaagtggccccggcccagcagcccccctgtggtgaagctggagaagaggctgattgctgaatatggcatgcccagcacccacgccatggccgccacagccatcgccttcaccctgctgatcagcaccatggaccgctaccagtacccctttgtgctgggcctggtgatggctgtggtgttcagcaccctggtgtgcctgagccggctgtacacaggcatgcacacagtgctggatgtgctgggcggcgtgctgatcacagccctgctgattgtgctgacctacccagcctggaccttcatcgactgcctggacagcgccagccccctcttccctgtgtgtgtgattgtggtgcccttcttcctgtgctacaactaccctgtgtctgactactacagccccaccagggctgacaccaccaccatcctggccgccggggccggcgtgaccatcggcttctggatcaaccacttcttccagctggtgtccaagccagctgagagcctgcccgtcatccagaacatcccccccctgaccacctacatgctggtgctgggcctgaccaagtttgctgtgggcatcgtgctgatcctgctggtgcggcagctggtgcagaacctgagcctgcaggtgctgtacagctggttcaaggtggtgaccaggaacaaggaggcccggcggcggctggagattgaggtgccctacaagtttgtgacctacacctctgtgggcatctgtgccaccacctttgtgcccatgctgcaccgcttcctgggcctgccctag

SEQ ID NO: 171479 - DNA, 1062 bp, synthetic construct
  misc_feature 1..1062: note = Description of Artificial Sequence: Synthetic coding sequence
  source 1..1062: mol_type = other DNA
atgggcagcctgtacagcgagtacctgaaccccaacaaggtgcaggagcactacaactacaccaaggagaccctggagacccaggagaccaccagccggcaggtggccagcgccttcatcgtcatcctgtgctgtgccatcgtggtggagaacctgctggtgctgattgctgtggccaggaacagcaagttccacagcgccatgtacctgttcctgggcaacctggccgccagtgacctgctggccggcgtggcctttgtggccaacaccctgctgagcggctctgtgaccctgcggctgacccctgtgcagtggtttgcccgggagggcagcgccttcatcaccctgagcgcctctgtgttcagcctgctggccatcgccatcgagagacatgtggccatcgccaaggtgaagctgtatggcagtgacaagagctgcaggatgctgctgctgattggagcctcctggctgatcagcctggtgctgggcggcctgcccatcctgggctggaactgcctgggccacctggaggcctgcagcacagtgctgcccctgtatgccaagcactacgtgctgtgtgtggtgaccatcttcagcatcatcctgctggccatcgtggccctgtatgtgcgcatctactgtgtggtgcgcagcagccatgctgacatggccgccccccagaccctggccctgctgaagacagtgaccatcgtgctgggcgtcttcatcgtgtgctggctgcctgccttcagcatcctgctgctggactatgcctgccctgtgcacagctgccccatcctgtacaaggcccactacttctttgctgtgtccaccctgaacagcctgctgaaccctgtgatctacacctggaggagccgggacctgcggcgggaggtgctgcggcccctgcagtgctggaggcctggggtgggcgtgcagggcagaagaagaggaggcaccccaggccaccacctgctgcccctgcggagcagcagcagcctggagcggggcatgcacatgcccaccagccccaccttcctggagggcaacacagtggtgtag

SEQ ID NO: 171480 - DNA, 1137 bp, synthetic construct
  misc_feature 1..1137: note = Description of Artificial Sequence: Synthetic coding sequence
  source 1..1137: mol_type = other DNA
atggccacagccctgcccccccggctgcagcctgtgagaggaaatgagaccctgcgggagcactaccagtatgtgggcaagctggccggccgcctgaaggaggccagcgagggcagcaccctgaccaccgtgctcttcctggtgatctgcagcttcatcgtgctggagaacctgatggtgctgattgccatctggaagaacaacaagttccacaacaggatgtacttcttcatcggcaacctggccctgtgtgacctgctggccggcatcgcctacaaggtgaacatcctgatgtctgggaagaagaccttcagcctgagccccaccgtgtggttcctgcgggagggctccatgtttgtggccctgggcgccagcacctgcagcctgctggccatcgccatcgagcggcacctgaccatgatcaagatgaggccctatgatgccaacaagaggcacagggtcttcctgctgattggcatgtgctggctgattgccttcaccctgggcgccctgcccatcctgggctggaactgcctgcacaacctgcctgactgcagcaccatcctgcccctgtacagcaagaagtacatcgccttctgcatcagcatcttcaccgccatcctggtgaccatcgtcatcctgtatgcccgcatctacttcctggtgaagagcagcagcaggaaggtggccaaccacaacaacagcgagaggtccatggccctgctgaggacagtggtgattgtggtgtctgtgttcatcgcctgctggagccccctcttcatcctcttcctgattgatgtggcctgccgggtgcaggcctgccccatcctcttcaaggcccagtggttcatcgtgctggccgtgctgaacagcgccatgaaccctgtgatctacaccctggccagcaaggagatgaggcgggccttcttccggctggtgtgcaactgcctggtgcggggccgcggggcccgggccagccccatccagcctgccctggaccccagccgcagcaagagcagcagcagcaacaacagcagccacagccccaaggtgaaggaggacctgccccacacagcccccagcagctgcatcatggacaagaatgctgccctgcagaatggcatcttctgcaactag

SEQ ID NO: 171481 - DNA, 1137 bp, synthetic construct; identical to SEQ ID NO: 171480
  misc_feature 1..1137: note = Description of Artificial Sequence: Synthetic coding sequence
  source 1..1137: mol_type = other DNA

SEQ ID NO: 171482 - DNA, 1155 bp, synthetic construct
  misc_feature 1..1155: note = Description of Artificial Sequence: Synthetic coding sequence
  source 1..1155: mol_type = other DNA
atgaatgccaccggcacccctgtggcccctgagagctgccagcagctggccgccggcggccacagccggctgattgtgctgcactacaaccacagcggccgcctggccggccggggcggcccagaagatggcggcctgggcgccctgcggggcctgtctgtggccgccagctgcctggtggtgctggagaacctgctggtgctggccgccatcaccagccacatgaggagccgccgctgggtgtactactgcctggtgaacatcaccctgagtgacctgctgactggagctgcctacctggccaacgtgctgctgagcggggcccggaccttccggctggccccagcccagtggttcctgcgggagggcctgctcttcaccgccctggccgccagcaccttcagcctgctcttcaccgctggggagagatttgccaccatggtgcggcctgtggccgagagcggggccaccaagaccagccgggtgtatggcttcatcggcctgtgctggctgctggccgccctgctgggcatgctgcccctgctgggctggaactgcctgtgtgcctttgaccgctgcagcagcctgctgcccctgtacagcaagcgctacatcctcttctgcctggtgatctttgctggggtgctggccaccatcatgggcctgtatggagccatcttccggctggtgcaggccagcggccagaaggcccccaggcctgctgcccggaggaaggcccggcggctgctgaagacagtgctgatgatcctgctggccttcctggtgtgctggggccccctgtttggcctgctgctggctgatgtgtttggcagcaacctgtgggcccaggagtacctgcggggcatggactggatcctggccctggccgtgctgaacagcgctgtgaaccccatcatctacagcttccgcagccgggaggtgtgcagagctgtgctgtccttcctgtgctgcggctgcctgcggctgggcatgaggggccctggggactgcctggcccgggctgtggaggcccacagcggggccagcaccacagacagcagcctgcggccccgggacagcttccggggcagccgcagcctgtccttcaggatgagggagcccctgagcagcatcagctctgtgcgcagcatctag

SEQ ID NO: 171483 - DNA, 1197 bp, synthetic construct
  misc_feature 1..1197: note = Description of Artificial Sequence: Synthetic coding sequence
  source 1..1197: mol_type = other DNA
atggagagcggcctgctgcggcctgcccctgtgtctgaggtgattgtgctgcactacaactacaccgggaagctgcggggggcccgctaccagcccggggccggcctgcgggcagatgctgtggtgtgcctggccgtgtgtgccttcatcgtgctggagaacctggccgtgctgctggtgctgggccgccacccccgcttccacgcccccatgttcctgctgctgggcagcctgaccctgagtgacctgctggccggggccgcctatgctgccaacatcctgctgagcggccccctgaccctgaagctgagccctgccctgtggtttgcccgggagggcggcgtgtttgtggccctgacagcctctgtgctgagcctgctggccatcgccctggagaggagcctgaccatggcccggcggggccctgcccctgtgagcagccggggccgcaccctggccatggctgctgctgcctggggcgtgtccctgctgctgggcctgctgcctgccctgggctggaactgcctgggccgcctggatgcctgcagcacagtgctgcccctgtatgccaaggcctacgtgctcttctgtgtgctggcctttgtgggcatcctggccgccatctgtgccctgtatgcccgcatctactgccaggtgcgggccaatgcccggcggctgcctgcccggcccggcacagctggcaccaccagcacccgggcccggaggaagcccaggagcctggccctgctgcggaccctgtctgtggtgctgctggcctttgtggcctgctggggccccctcttcctgctgctgctgctggatgtggcctgcccagcccggacctgccctgtgctgctgcaggccgaccccttcctgggcctggccatggccaacagcctgctgaaccccatcatctacaccctgaccaacagagacctgcggcatgccctgctgcggctggtgtgctgcggccgccacagctgtggccgggaccccagcggcagccagcagagcgccagcgctgctgaggccagcggcggcctgcggcgctgcctgcccccaggcctggatggcagcttcagcggcagcgagaggagcagcccccagagagatggcctggacaccagcggcagcacaggcagccctggggcccccacagctgcccggaccctggtgtctgagcctgctgctgactag

SEQ ID NO: 171484 - DNA, 933 bp, synthetic construct
  misc_feature 1..933: note = Description of Artificial Sequence: Synthetic coding sequence
  source 1..933: mol_type = other DNA
atggagagcggcctgctgcggcctgcccctgtgtctgaggtgattgtgctgcactacaactacaccgggaagctgcggggggcccgctaccagcccggggccggcctgcgggcagatgctgtggtgtgcctggccgtgtgtgccttcatcgtgctggagaacctggccgtgctgctggtgctgggccgccacccccgcttccacgcccccatgttcctgctgctgggcagcctgaccctgagtgacctgctggccggggccgcctatgctgccaacatcctgctgagcggccccctgaccctgaagctgagccctgccctgtggtttgcccgggagggcggcgtgtttgtggccctgacagcctctgtgctgagcctgctggccatcgccctggagaggagcctgaccatggcccggcggggccctgcccctgtgagcagccggggccgcaccctggccatggctgctgctgcctggggcgtgtccctgctgctgggcctgctgcctgccctgggctggaactgcctgggccgcctggatgcctgcagcacagtgctgcccctgtatgccaaggcctacgtgctcttctgtgtgctggcctttgtgggcatcctggccgccatctgtgccctgtatgccctggccggcctggccgcccacgcccagagaggagcccctggcctgtgtggcatgctgggcccccccctgcctgctgctgtggcccggcggggcgtgcctggggcccacctgagctgcaccccagctggccgcagcctgcccggcaccggccacggccagctgaccagcgagccccaccacctgcacgcccaccagcccaggcctgccccccgggccccagcccctggcctgctgcggacccccctgctgcggcagaggcctgagtggctgcctgctgtgggggagcggggctag

SEQ ID NO: 171485 - DNA, 1197 bp, synthetic construct; identical to SEQ ID NO: 171483
  misc_feature 1..1197: note = Description of Artificial Sequence: Synthetic coding sequence
  source 1..1197: mol_type = other DNA

SEQ ID NO: 171486 - DNA, 5016 bp, synthetic construct
  misc_feature 1..5016: note = Description of Artificial Sequence: Synthetic coding sequence
  source 1..5016: mol_type = other DNA
atggatggcaacagcctgctgtctgtgcccagcaacctggagagcagcaggatgtatgatgtgctggagccccagcagggccggggctgcggcagcagcggcagcggccctggcaacagcatcacagcctgcaagaaggtgctgcggagcaacagcctgctggagagcacagactactggctgcagaaccagaggatgccctgccagatcggctttgtggaggacaagtctgagaactgtgcctctgtgtgctttgtgaacctggatgtgaacaaggatgagtgcagcacagagcacctgcagcagaagctggtgaatgtgtccccagacctgcccaagctgatcagctccatgaatgtgcagcagcccaaggaaaatgagatcgtggtgctgagcggcctggccagcggcaacctgcaggccgactttgaggtgtcccagtgcccctggctgcctgacatctgcctggtgcagtgtgcccggggcaaccggcccaacagcaccaactgcatcatctttgagatcaacaagttcctgattggcctggagctggtgcaggagcggcagctgcacctggagaccaacatcctgaagctggaggatgacaccaactgcagcctgagcagcattgaggaggacttcctgacagccagcgagcacctggaggaggagagcgaggtggatgagagcagaaatgactatgagaacatcaacgtgtctgccaacgtgctggagagcaagcagctgaagggggccacccaggtggagtggaactgcaacaaggagaagtggctgtatgccctggaggacaagtacatcaacaagtaccccacccccctcatcaagacagagaggagccctgagaacctgaccaagaacacagccctgcagagcctggaccccagcgccaagcccagccagtggaagcgggaggccgtgggcaatggccggcaggccacccactactaccacagcgaggccttcaagggccagatggagaagagccaggccctgtacatccccaaggatgcctacttctccatgatggacaaggatgtgcccagcgcctgtgctgtggccgagcagaggagcaacctgaaccctggggaccacgaggacaccagaaatgccctgcccccccggcaggatggagaggtgaccaccgggaagtatgccaccaacctggccgagagcgtgctgcaggatgccttcatccggctgagccagagccagagcaccctgccccaggagagcgctgtgtctgtgtctgtgggcagcagcctgctgcccagctgctacagcaccaaggacacagtggtgagccgctcctggaatgagctgcccaagatcgtggtggtgcagagcccagatggcagtgatgctgccccccagcccggcatcagctcctggccagagatggaggtgtctgtggagaccagcagcatcctgagcggggagaacagcagccggcagccccagagcgccctggaggtggccctggcctgtgccgccaccgtgattggcaccatcagcagcccccaggccacagagcggctgaagatggagcaggtggtgagcaacttccccccaggcagcagcggggccctgcagacccaggccccccagggcctgaaggagcccagcatcaatgagtacagcttccccagcgccctgtgtggcatgacccaggtggccagcgctgtggccgtgtgtggcctgggggagcgggaggaggtgacctgcagcgtggcccccagcggcagcctgcccccagctgctgaggccagcgaggccatgccacccctgtgtggcctggcctccatggagctgggcaaggaggccatcgccaagggcctgctgaaggaggccgccctggtgctgacccggcccaacacctacagcagcatcggggacttcctggacagcatgaacagacgcatcatggagacagccagcaagagccagaccctgtgcagtgaaaatgtggtgagaaatgagctggcccacaccctgagcaatgtcatcctgcggcacagcattgatgaggtgcaccacaagaacatgatcatcgaccccaatgacaacagacacagcagcgagatcctggacaccctgatggagagcaccaaccagctgctgctggatgtgatctgcttcaccttcaagaagatgagccacatcgtgcggctgggggagtgcccagctgtgctgagcaaggagaccatcagaagaagagaaacagagcccagctgccagcccagcgaccccggggccagccaggcctggaccaaggccacagagagcagcagcagcagccccctgagcaacagccacaacaccagcctggtgatcaacaacctggtggatggcatgtacagcaagcaggacaagggcggcgtgcggcccggcctcttcaagaaccccaccctgcagagccagctgagccgcagccaccgggtgcctgacagcagcacagccaccaccagcagcaaggagatctacctgaagggcattgctggggaggacaccaagagcccccaccacagtgaaaatgaatgtcgggccagcagcgagggccagaggagccccaccgtgtcccagagccgcagcggcagccaggaggccgaggagagcatccaccccaacacccaggagaagtacaactgtgccaccagccgcatcaatgaggtgcaggtgaacctgagcctgctgggagatgacctgctgctgcctgcccagagcaccctgcagaccaagcacccagacatctactgcatcacagactttgctgaggagctggccgacacagtggtgtccatggccacagaaattgctgccatctgcctggacaacagcagcggcaagcagccctggttctgtgcctggaagaggggcagcgagttcctgatgaccccaaatgtgccctgccgcagcctgaagaggaagaaggagagccagggcagcggcacagctgtgaggaagcacaagccaccccggctgtctgagatcaagaggaagacagatgagcaccctgagctgaaggagaagctgatgaacagagtggtggatgagagcatgaacctggaggatgtgcctgacagcgtgaacctgtttgccaatgaggtggccgccaagatcatgaacctgacagagttctccatggtggatggcatgtggcaggcccagggctaccccaggaaccggctgctgagcggggaccgctggagccggctgaaggccagcagctgtgagagcatcccagaagaagattctgaggcccgggcctacgtgaacagcctgggcctgatgagcaccctgagccagcctgtgtcccgggccagctctgtgtccaagcagagcagctgtgagagcatcacagatgagttcagccgcttcatggtgaaccagatggagaatgaaggccggggctttgagctgctgctggactactatgctgggaagaatgccagcagcatcctgaacagcgccatgcagcaggcctgcaggaagagtgaccacctgtctgtgcggcccagctgccccagcaagcagagcagcacagagagcatcacagaggagttctaccgctacatgctgcgggacatcgagcgggacagccgggagagcgccagcagcagaagaagcagccaggactggacagctggcctgctgagccccagcctgcggagccctgtgtgccaccggcagagctccatgccagacagccgcagcccctgcagccggctgactgtgaatgtgcccatcaaggccaacagcctggatggctttgcccagaactgcccccaggacttcctgtctgtgcagcctgtgtcctctgccagcagcagcggcctgtgcaagagtgacagctgcctgtaccgccggggcggcacagaccacatcaccaacatgctgattcatgagacctgggccagcagcattgaggccctgatgaggaagaacaagatcatcgtggatgatgctgaggaggccgacacagagcctgtgtctgggggcagccccagccaggccgagaagtgtgccaaccggctggccgccagcaggatgtgcagcggccccaccctgctggtgcaggagagcctggactgccccaggaaggacagcgtgacagagtgcaagcagccccctgtgagcagcctgagcaagacagccagcctgaccaaccacagccccctggacagcaagaaggagaccagcagctgccaggaccctgtgcccatcaaccacaagaggaggagcctgtgcagccgggaggtgcccctcatccagattgaaacagaccagcgggaggcctgtgccggggagcctgagcccttcctgagcaagagcagcctgctggaggaggccgagggccacagcaatgacaagaacatcccagatgtggtgcggggcggggacacagctgtgtctgcctgccagatccacagcgacagcctggacaccagagatgtgcctgaggccgaggccagcacagaggcccgggccccagatgaggcccccaacccccccagcagcagcgaggagagcacaggctcctggacccagctggccaatgaggaggacaacccagatgacaccagcagcttcctgcagctgtctgagaggtccatgtctgagctggtggaggagaagaagatcctgaagggccagagcgagagcacagaggccccagccagcggcccccccaccggcacagccagcccccagaggagcctgctggtgatcaactttgacctggagccagaatgtccagatgctgagctgcgggccaccctgcagtggattgctgccagcgagctgggcatccccaccatctacttcaagaagagccaggagaaccgcatcgagaagttcctggatgtggtgcagctggtgcacaggaagtcctggaaggtgggggacatcttccacgctgtggtgcagtactgcaagatgcatgaggagcagaaggatggccgcctgagcctgtttgactggctgctggagctgggctag

SEQ ID NO: 171487 - DNA, 5103 bp, synthetic construct
  misc_feature 1..5103: note = Description of Artificial Sequence: Synthetic coding sequence
  source 1..5103: mol_type = other DNA
atggatggcaacagcctgctgtctgtgcccagcaacctggagagcagcaggatgtatgatgtgctggagccccagcagggccggggctgcggcagcagcggcagcggccctggcaacagcatcacagcctgcaagaaggtgctgcggagcaacagcctgctggagagcacagactactggctgcagaaccagaggatgccctgccagatcggctttgtggaggacaagtctgagaactgtgcctctgtgtgctttgtgaacctggatgtgaacaaggatgagtgcagcacagagcacctgcagcagaagctggtgaatgtgtccccagacctgcccaagctgatcagctccatgaatgtgcagcagcccaaggaaaatgagatcgtggtgctgagcggcctggccagcggcaacctgcaggccgactttgaggtgtcccagtgcccctggctgcctgacatctgcctggtgcagtgtgcccggggcaaccggcccaacagcaccaactgcatcatctttgagatcaacaagttcctgattggcctggagctggtgcaggagcggcagctgcacctggagaccaacatcctgaagctggaggatgacaccaactgcagcctgagcagcattgaggaggacttcctgacagccagcgagcacctggaggaggagagcgaggtggatgagagcagaaatgactatgagaacatcaacgtgtctgccaacgtgctggagagcaagcagctgaagggggccacccaggtggagtggaactgcaacaaggagaagtggctgtatgccctggaggacaagtacatcaacaagtaccccacccccctcatcaagacagagaggagccctgagaacctgaccaagaacacagccctgcagagcctggaccccagcgccaagcccagccagtggaagcgggaggccgtgggcaatggccggcaggccacccactactaccacagcgaggccttcaagggccagatggagaagagccaggccctgtacatccccaaggatgcctacttctccatgatggacaaggatgtgcccagcgcctgtgctgtggccgagcagaggagcaacctgaaccctggggaccacgaggacaccagaaatgccctgcccccccggcaggatggagaggtgaccaccgggaagtatgccaccaacctggccgagagcgtgctgcaggatgccttcatccggctgagccagagccagagcaccctgccccaggagagcgctgtgtctgtgtctgtgggcagcagcctgctgcccagctgctacagcaccaaggacacagtggtgagccgctcctggaatgagctgcccaagatcgtggtggtgcagagcccagatggcagtgatgctgccccccagcccggcatcagctcctggccagagatggaggtgtctgtggagaccagcagcatcctgagcggggagaacagcagccggcagccccagagcgccctggaggtggccctggcctgtgccgccaccgtgattggcaccatcagcagcccccaggccacagagcggctgaagatggagcaggtggtgagcaacttccccccaggcagcagcggggccctgcagacccaggccccccagggcctgaaggagcccagcatcaatgagtacagcttccccagcgccctgtgtggcatgacccaggtggccagcgctgtggccgtgtgtggcctgggggagcgggaggaggtgacctgcagcgtggcccccagcggcagcctgcccccagctgctgaggccagcgaggccatgccacccctgtgtggcctggcctccatggagctgggcaaggaggccatcgccaagggcctgctgaaggaggccgccctggtgctgacccggcccaacacctacagcagcatcggggacttcctggacagcatgaacagacgcatcatggagacagccagcaagagccagaccctgtgcagtgaaaatgtggtgagaaatgagctggcccacaccctgagcaatgtcatcctgcggcacagcattgatgaggtgcaccacaagaacatgatcatcgaccccaatgacaacagacacagcagcgagatcctggacaccctgatggagagcaccaaccagctgctgctggatgtgatctgcttcaccttcaagaagatgagccacatcgtgcggctgggggagtgcccagctgtgctgagcaaggagaccatcagaagaagagaaacagagcccagctgccagcccagcgaccccggggccagccaggcctggaccaaggccacagagagcagcagcagcagccccctgagcaacagccacaacaccagcctggtgatcaacaacctggtggatggcatgtacagcaagcaggacaagggcggcgtgcggcccggcctcttcaagaaccccaccctgcagagccagctgagccgcagccaccgggtgcctgacagcagcacagccaccaccagcagcaaggagatctacctgaagggcattgctggggaggacaccaagagcccccaccacagtgaaaatgaatgtcgggccagcagcgagggccagaggagccccaccgtgtcccagagccgcagcggcagccaggaggccgaggagagcatccaccccaacacccaggagaagtacaactgtgccaccagccgcatcaatgaggtgcaggtgaacctgagcctgctgggagatgacctgctgctgcctgcccagagcaccctgcagaccaagcacccagacatctactgcatcacagactttgctgaggagctggccgacacagtggtgtccatggccacagaaattgctgccatctgcctggacaacagcagcggcaagcagccctggttctgtgcctggaagaggggcagcgagttcctgatgaccccaaatgtgccctgccgcagcctgaagaggaagaaggagagccagggcagcggcacagctgtgaggaagcacaagccaccccggctgtctgagatcaagaggaagacagatgagcaccctgagctgaaggagaagctgatgaacagagtggtggatgagagcatgaacctggaggatgtgcctgacagcgtgaacctgtttgccaatgaggtggccgccaagatcatgaacctgacagagttctccatggtggatggcatgtggcaggcccagggctaccccaggaaccggctgctgagcggggaccgctggagccggctgaaggccagcagctgtgagagcatcccagaagaagattctgaggcccgggcctacgtgaacagcctgggcctgatgagcaccctgagccagcctgtgtcccgggccagctctgtgtccaagcagagcagctgtgagagcatcacagatgagttcagccgcttcatggtgaaccagatggagaatgaaggccggggctttgagctgctgctggactactatgctgggaagaatgccagcagcatcctgaacagcgccatgcagcaggcctgcaggaagagtgaccacctgtctgtgcggcccagctgccccagcaagcagagcagcacagagagcatcacagaggagttctaccgctacatgctgcgggacatcgagcgggacagccgggagagcgccagcagcagaagaagcagccaggactggacagctggcctgctgagccccagcctgcggagccctgtgtgccaccggcagagctccatgccagacagccgcagcccctgcagccggctgactgtgaatgtgcccatcaaggccaacagcctggatggctttgcccagaactgcccccaggacttcctgtctgtgcagcctgtgtcctctgccagcagcagcggcctgtgcaagagtgacagctgcctgtaccgccggggcggcacagaccacatcaccaacatgctgattcatgagacctgggccagcagcattgaggccctgatgaggaagaacaagatcatcgtggatgatgctgaggaggccgacacagagcctgtgtctgggggcagccccagccaggccgagaagtgtgccaaccggctggccgccagcaggatgtgcagcggccccaccctgctggtgcaggagagcctggactgccccaggaaggacagcgtgacagagtgcaagcagccccctgtgagcagcctgagcaagacagccagcctgaccaaccacagccccctggacagcaagaaggagaccagcagctgccaggaccctgtgcccatcaaccacaagaggaggagcctgtgcagccgggaggtgcccctcatccagattgaaacagaccagcgggaggcctgtgccggggagcctgagcccttcctgagcaagagcagcctgctggaggaggccgagggccacagcaatgacaagaacatcccagatgtggtgcggggcggggacacagctgtgtctgcctgccagatccacagcgacagcctggacaccagagatgtgcctgaggccgaggccagcacagaggcccgggccccagatgaggcccccaacccccccagcagcagcgaggagagcacaggctcctggacccagctggccaatgaggaggacaacccagatgacaccagcagcttcctgcagctgtctgagaggtccatgagcaatggaaacagcagcgccaccagcagcctgggcatcatggacctggacatctaccaggagagcatgcccagcagccccatgatcaatgagctggtggaggagaagaagatcctgaagggccagagcgagagcacagaggccccagccagcggccccccaactggaacagccagcccccagaggagcctgctggtgatcaactttgacctggagcctgagtgcccagatgctgagctgcgggccaccctgcagtggattgctgccagcgagctgggcatccccaccatctacttcaagaagagccaggagaacagaattgagaagttcctggatgtggtgcagctggtgcacaggaagtcctggaaggtgggggacatcttccacgctgtggtgcagtactgcaagatgcatgaggagcagaaggatggccgcctgagcctgtttgactggctgctggagctgggctag

SEQ ID NO: 171488 - DNA, 789 bp, synthetic construct
  misc_feature 1..789: note = Description of Artificial Sequence: Synthetic coding sequence
  source 1..789: mol_type = other DNA
atgctggccctggaggccgcccagctggatggcccccacttcagctgcctgtacccagatggagtcttctatgacctggacagctgcaagcacagcagctacccagattctgagggcgccccagacagcctgtgggactggacagtggcccctcctgtgcctgccaccccctatgaggcctttgatcctgctgctgctgccttcagccacccccaggccgcccagctgtgctatgagccccccacctacagccctgctggcaacctggagctggcccccagcctggaggcccctggccctggcctgcctgcctaccccacagagaactttgccagccagaccctggtgcccccagcctatgccccctaccccagccctgtgctgtctgaggaggaggacctgcccctggacagccctgccctggaggtgtctgacagcgagagtgatgaggccctggtggccggccctgagggcaaaggaagtgaagctggcaccaggaagaagctgcggctgtaccagttcctgctgggcctgctgaccaggggggacatgagagaatgtgtgtggtgggtggagcctggagctggggtcttccagttcagcagcaagcacaaggagctgctggcccggcgctggggccagcagaagggcaacaggaagaggatgacctaccagaagctggcccgggccctgaggaactatgccaagacaggagagatcaggaaggtgaagaggaagctgacctaccagtttgattctgccctgctgcctgctgtgcggcgggcctag

SEQ ID NO: 171489 - DNA, 516 bp, synthetic construct
  misc_feature 1..516: note = Description of Artificial Sequence: Synthetic coding sequence
  source 1..516: mol_type = other DNA
atggccagctccatgacctggacagctgccagcatcccagccaccctcatccagaggggcctgctgaccctggtgcccccagcctatgccccctaccccagccctgtgctgtctgaggaggaggacctgcccctggacagccctgccctggaggtgtctgattctgagagtgatgaggccctggtggccggccctgagggcaagggcagcgaggccggcaccaggaagaagctgcggctgtaccagttcctgctgggcctgctgaccaggggggacatgagagaatgtgtgtggtgggtggagcccggggccggggtcttccagttcagcagcaagcacaaggagctgctggcccggcgctggggccagcagaagggcaacaggaagaggatgacctaccagaagctggcccgggccctgagaaattatgccaagacaggagagatcaggaaggtgaagaggaagctgacctaccagtttgacagcgccctgctgcctgctgtgagaagagcctag

SEQ ID NO: 171490 - DNA, 747 bp, synthetic construct
  misc_feature 1..747: note = Description of Artificial Sequence: Synthetic coding sequence
  source 1..747: mol_type = other DNA
atgacctgtgtggagcaggacaagctgggccaggcctttgaagatgcctttgaggtgctgcggcagcacagcactggagacctgcagtacagcccagactacagaaactacctggccctgatcaaccaccggccccacgtgaagggcaacagcagctgctacggcgtgctgcccacagaggagcctgtgtacaactggaggacagtcatcaacagcgctgctgacttctactttgagggcaacatccaccagagcctgcagaacatcacagagaaccagctggtgcagcccaccctgctgcagcagaagggcggcaagggcaggaagaagctgcggctgtttgagtacctgcacgagagcctgtacaaccctgagatggccagctgcatccagtgggtggacaagaccaagggcatcttccagtttgtgtccaagaacaaggagaagctggccgagctgtggggcaagaggaagggcaacaggaagaccatgacctaccagaagatggcccgggccctgaggaactacggccgctctggagagatcaccaagatccggaggaagctgacctaccagttcagcgaggccatcctgcagaggctgagccccagctacttcctgggcaaggagatcttctacagccagtgtgtgcagcctgaccaggagtacctgagcctgaacaactggaatgccaactacaactacacctacgccaactaccacgagctgaaccaccacgactgctag

SEQ ID NO: 171491 - DNA, 747 bp, synthetic construct; identical to SEQ ID NO: 171490
  misc_feature 1..747: note = Description of Artificial Sequence: Synthetic coding sequence
  source 1..747: mol_type = other DNA

SEQ ID NO: 171492 - DNA, 2568 bp, synthetic construct
  misc_feature 1..2568: note = Description of Artificial Sequence: Synthetic coding sequence
  source 1..2568: mol_type = other DNA
atgagctttgtgcgggtgaacagatgtggcccccgggtgggcgtgaggaagacccccaaggtgaagaagaagaagacctctgtgaagcaggagtgggacaacacagtgacagacctgactgtgcaccgggccaccccagaggacctggtgagaagacatgagatccacaagagcaagaacagagccctggtgcactgggagctgcaggagaaggccctgaagaggaagtggaggaagcagaagccagagaccctgaacctggagaagaggcggctgagcatcatgaaggagatcctgagtgaccagtaccagatgcaggatgtgctggagaagagtgaccacctgattgctgctgccaaggagctgttccccaggagaagaacaggcttccccaacgtgacagtggccccagacagcagccagggccccatcgtggtgaaccaggaccccatcacccagagcatcttcaatgaatctgtgattgagccccaggccctgaatgatgtggatggagaggaggagggcaccgtgaacagccagagcggggagagtgaaaatgaaaatgagctggacaacagcctgaacagccagagcaacaccaacacagaccgcttcctgcagcagctgacagaggagaactttgagctgatcagcaagctgtggacagacatccagcagaagatcgccacccagagccagatcaccccacctggcacccccagcagcgccctgagcagcggggagcagagagctgccctgaatgccaccaatgctgtgaagaggctgcagacccggctgcagcctgaggagagcacagagaccctggacagcagctatgtggtgggccacgtgctgaacagcaggaagcagaagcagctgctgaacaaggtgaagaggaagcccaacctgcacgccctgagcaagcccaagaagaacatcagcagcggcagcaccaccagcgctgacctgcccaacagaaccaacagcaacctggatgtgctgaagcacatgattcatgaggtggagcacgagatggaggagtatgagcgctggacaggccgggaggtgaagggcctgcagagcagccagggcctgaccggcttcaccctgagcctggtgagcagcctgtgccgcctggtgcgctacctgaaggagagcgagatccagctgaggaaggaggtggagacccggcagcagctggagcaggtgctgggggaccaccgggagctgattgatgccctgacagctgagatcctgcggctgcgggaggagaatgctgccacccaggcccggctgcagcagtacatggtgaccacagatgagcagctgatcagcctgacccacgccatcaagaactgccctgtgatcaacaaccggcaggagatccaggccagcgagagcggggccaccggccggcgggtgatggacagccctgagaggcctgtggtgaatgccaacgtgtctgtgcccctgatgttccgggaggaggtggccgagttcccccaggaggagctgcctgtgaagctgagccaggtgcctgaccccccagacaacatgaacctggccaagaacttccctgcccacatctttgagcctgctgtgctgctgaccccaccccggcagaagagcaacctgaagttcagccccctgcaggatgtgctgcggaggacagtgcagaccaggcctgccccccggctgcccccaacagtggagatcatcgagaaggagcagaactgggaggagaagaccctgcccatcgacacagacatccagaacagcagcgaggagaacagactcttcacccagcgctggagggtgagccacatgggagaggacctggagaacaagacccaggccccctttgtgaacctgagccagcccctgtgcaacagccacagcaacacccagcagagccgcagccccaccttcagcgaggagctgcctgtgctgggagatggccagcagctgcggaccaatgaaagcctcatccagaggaaggacatcatgaccagaattgctgacctgaccctgcagaacagcgccatcaaggcccacatgaacaacatcatcgagcccagaggagagcagggagatggcctgcgggagctgaacaagcaggagagcgccagtgacatgaccagcaccttccctgtggcccagagcctgaccccaggctccatggaggagagaattgctgagctgaaccggcagagcatggaggcccggggcaagctgctgcagctgattgagcagcagaagctggtgggcctgaacctgagcccccccatgagccctgtgcagctgcccctgcgggcctggacagagggcgccaagaggaccatcgaggtgtccatccctggagctgaggcccctgagagcagcaagtgcagcacagtgtcccctgtgtctggcatcaacacccggcgcagcagcggggccaccggcaacagctgcagccccctgaatgccaccagcggcagcggccgcttcacccccctgaacccccgggccaagattgagaagcagaatgaggagggctggtttgccctgagcacccacgtgtcctag

SEQ ID NO: 171493 - DNA, 483 bp, synthetic construct
  misc_feature 1..483: note = Description of Artificial Sequence: Synthetic coding sequence
  source 1..483: mol_type = other DNA
atgagctttgtgcgggtgaacagatgtggcccccgggtgggcgtgaggaagacccccaaggtgaagaagaagaagacctctgtgaagcaggagtgggacaacacagtgacagacctgactgtgcaccgggccaccccagaggacctggtgagaagacatgagatccacaagagcaagaacagagccctggtgcactgggagctgcaggagaaggccctgaagaggaagtggaggaagcagaagccagagaccctgaacctggagaagaggcggctgagcatcatgaaggagatcctgagtgaccagtaccagatgcaggatgtgctggagaagagtgaccacctgattgctgctgccaaggagctgttccccaggagaagaacaggcttccccaacgtgacagtggccccagacagcagccagggccccatcgtggtgaaccaggaccccatcacccagagcatcttcaatgaatctgtgtag

SEQ ID NO: 171494 - DNA, 522 bp, synthetic construct
  misc_feature 1..522: note = Description of Artificial Sequence: Synthetic coding sequence
  source 1..522: mol_type = other DNA
atgagctttgtgcgggtgaacagatgtggcccccgggtgggcgtgaggaagacccccaaggtgaagaagaagaagacctctgtgaagcaggagtgggacaacacagtgacagacctgactgtgcaccgggccaccccagaggacctggtgagaagacatgagatccacaagagcaagaacagagccctggtgcactgggagctgcaggagaaggccctgaagaggaagtggaggaagcagaagccagagaccctgaacctggagaagaggcggctgagcatcatgaaggagatcctgagtgaccagtaccagatgcaggatgtgctggagaagagtgaccacctgattgctgctgccaaggagctgttccccaggagaagaacaggcttccccaacgtgacagtggccccagacagcagccagggccccatcgtggtgaaccaggaccccatcacccagagcatcttcaatgaatctgtgattgagccccaggccctgaatgatgtggatggagaggagtag

SEQ ID NO: 171495 - DNA, 60 bp, synthetic construct
  misc_feature 1..60: note = Description of Artificial Sequence: Synthetic coding sequence
  source 1..60: mol_type = other DNA
atgagctttgtgcgggtgaacagatgtggcccccgggtgggcgtgaggaagaccccctag

SEQ ID NO: 171496 - DNA, 789 bp, synthetic construct
  misc_feature 1..789: note = Description of Artificial Sequence: Synthetic coding sequence
  source 1..789: mol_type = other DNA
atgaagaccccatttgggaagaccccaggccagaggagcagagcagatgctggccacgccggcgtgtctgccaacatgatgaagaagaggaccagccacaagaagcacaggagctctgtgggccccagcaagcctgtgtcccagcccaggagaaatattgtgggctgccgcatccagcacggctggaaggagggcaatggacctgtgacccagtggaagggcaccgtgctggaccaggtgcctgtgaaccccagcctgtacctgatcaagtatgatggctttgactgtgtgtatggcctggagctgaacaaggatgagcgggtgtctgccctggaggtgctgcctgacagagtggccaccagccgcatcagtgatgcccacctggccgacaccatgattggcaaggctgtggagcacatgtttgaaacagaagatggcagcaaggatgagtggaggggcatggtgctggcccgggcccctgtgatgaacacctggttctacatcacctatgagaaggaccctgtgctgtacatgtaccagctgctggatgactacaaggagggggacctgcgcatcatgccagacagcaatgacagccccccagctgagcgggagcccggggaggtggtggacagcctggtgggcaagcaggtggagtatgccaaggaggatggcagcaagaggacaggcatggtgatccaccaggtggaggccaagcccagcgtgtacttcatcaagtttgatgatgacttccacatctacgtgtatgacctggtgaagaccagctag

SEQ ID NO: 171497 - DNA, 789 bp, synthetic construct; identical to SEQ ID NO: 171496
  misc_feature 1..789: note = Description of Artificial Sequence: Synthetic coding sequence
  source 1..789: mol_type = other DNA

SEQ ID NO: 171498 - DNA, 1587 bp, synthetic construct
  misc_feature 1..1587: note = Description of Artificial Sequence: Synthetic coding sequence
  source 1..1587: mol_type = other DNA
atggccggcagtgacacagcccccttcctgagccaggctgatgatcctgatgatggccctgtgcccggcaccccaggcctgcccggcagcactggaaaccccaagtctgaggagcctgaggtgcctgaccaggagggcctgcagaggatcaccggcctgagccctggccgcagcgccctgattgtggccgtgctgtgctacatcaacctgctgaactacatggaccgcttcaccgtggccggcgtgctgcctgacatcgagcagttcttcaacatcggggacagcagcagcggcctcatccagaccgtcttcatcagcagctacatggtgctggcccctgtgtttggctacctgggggaccgctacaacaggaagtacctgatgtgtggcggcatcgccttctggagcctggtgaccctgggcagcagcttcatccctggagagcacttctggctgctgctgctgacccggggcctggtgggcgtgggggaggccagctacagcaccatcgcccccaccctgattgctgacctgtttgtggccgaccagaggagcaggatgctgagcatcttctactttgccatccctgtgggcagcggcctgggctacatcgccggcagcaaggtgaaggacatggccggggactggcactgggccctgcgggtgaccccaggcctgggcgtggtggccgtgctgctgctcttcctggtggtgcgggagcccccaagaggagctgtggagcggcacagcgacctgccccccctgaaccccacctcctggtgggccgacctgcgggccctggccaggaaccccagctttgtgctgagcagcctgggcttcaccgctgtggcctttgtgacaggcagcctggccctgtgggccccagccttcctgctgcggagccgggtggtgctgggggagaccccaccctgcctgcccggggacagctgcagcagcagtgacagcctcatcttcggcctcatcacctgcctgactggagtgctgggcgtgggcctgggcgtggagatcagccggcggctgcggcacagcaaccccagggctgaccccctggtgtgtgccaccggcctgctgggcagcgcccccttcctgttcctgagcctggcctgtgcccggggcagcatcgtggccacctacatcttcatcttcatcggggagaccctgctgtccatgaactgggccatcgtggccgacatcctgctgtatgtggtgatccccacccggcgcagcacagctgaggccttccagatcgtgctgagccacctgctgggagatgctggcagcccctacctgattggcctcatcagtgaccggctgcggaggaactggccacccagcttcctgtctgagttccgggccctgcagttcagcctgatgctgtgtgcctttgtgggcgccctgggcggggccgccttcctgggcacagccatcttcattgaagctgacagaagaagagcccagctgcacgtgcagggcctgctgcatgaagctggcagcacagatgaccgcatcgtggtgccccagaggggccgcagcaccagggtgcctgtggcctctgtgctgatctag

SEQ ID NO: 171499 - DNA, 1368 bp, synthetic construct
  misc_feature 1..1368: note = Description of Artificial Sequence: Synthetic coding sequence
  source 1..1368: mol_type = other DNA
atggaccgcttcaccgtggccggcgtgctgcctgacatcgagcagttcttcaacattggagacagcagcagcggcctcatccagacagtgttcatcagcagctacatggtgctggcccctgtgtttggctacctgggggaccgctacaacaggaagtacctgatgtgtggcggcatcgccttctggagcctggtgaccctgggcagcagcttcatccctggagagcacttctggctgctgctgctgacccggggcctggtgggcgtgggggaggccagctacagcaccatcgcccccaccctgattgctgacctgtttgtggccgaccagaggagcaggatgctgagcatcttctactttgccatccctgtgggcagcggcctgggctacatcgccggcagcaaggtgaaggacatggccggggactggcactgggccctgcgggtgaccccaggcctgggcgtggtggccgtgctgctgctcttcctggtggtgcgggagcccccaagaggagctgtggagcggcacagcgacctgccccccctgaaccccacctcctggtgggccgacctgcgggccctggccaggaaccccagctttgtgctgagcagcctgggcttcaccgctgtggcctttgtgacaggcagcctggccctgtgggccccagccttcctgctgcggagccgggtggtgctgggggagaccccaccctgcctgcccggggacagctgcagcagcagtgacagcctcatcttcggcctcatcacctgcctgactggagtgctgggcgtgggcctgggcgtggagatcagccggcggctgcggcacagcaaccccagggctgaccccctggtgtgtgccaccggcctgctgggcagcgcccccttcctgttcctgagcctggcctgtgcccggggcagcatcgtggccacctacatcttcatcttcatcggggagaccctgctgtccatgaactgggccatcgtggccgacatcctgctgtatgtggtgatccccaccaggaggagcacagctgaggccttccagatcgtgctgagccacctgctgggagatgctggcagcccctacctgattggcctcatcagtgaccggctgcggaggaactggcccccatccttcctgtctgagttccgggccctgcagttcagcctgatgctgtgtgcctttgtgggcgccctgggcggggccgccttcctgggcacagccatcttcatcgaggccgacagaagaagagcccagctgcacgtgcagggcctgctgcacgaggccggcagcacagatgacagaattgtggtgccccagaggggccgcagcaccagggtgcctgtggcctctgtgctgatctag

SEQ ID NO: 171500 - DNA, 1431 bp, synthetic construct
  misc_feature 1..1431: note = Description of Artificial Sequence: Synthetic coding sequence
  source 1..1431: mol_type = other DNA
atggccggcagtgacacagcccccttcctgagccaggctgatgatcctgatgatggccctgtgcccggcaccccaggcctgcccggcagcactggaaaccccaagtctgaggagcctgaggtgcctgaccaggagggcctgcagaggatcaccggcctgagccctggccgcagcgccctgattgtggccgtgctgtgctacatcaacctgctgaactacatggaccgcttcaccgtggccggcgtgctgcctgacatcgagcagttcttcaacatcggggacagcagcagcggcctcatccagaccgtcttcatcagcagctacatggtgctggcccctgtgtttggctacctgggggaccgctacaacaggaagtacctgatgtgtggcggcatcgccttctggagcctggtgaccctgggcagcagcttcatccctggagagcacttctggctgctgctgctgacccggggcctggtgggcgtgggggaggccagctacagcaccatcgcccccaccctgattgctgacctgtttgtggccgaccagaggagcaggatgctgagcatcttctactttgccatccctgtgggcagcggcctgggctacatcgccggcagcaaggtgaaggacatggccggggactggcactgggccctgcgggtgaccccaggcctgggcgtggtggccgtgctgctgctcttcctggtggtgcgggagcccccaagaggagctgtggagcggcacagcgacctgccccccctgaaccccacctcctggtgggccgacctgcgggccctggccaggaacctgatcttcggcctcatcacctgcctgactggagtgctgggcgtgggcctgggcgtggagatcagccggcggctgcggcacagcaaccccagggctgaccccctggtgtgtgccaccggcctgctgggcagcgcccccttcctgttcctgagcctggcctgtgcccggggcagcatcgtggccacctacatcttcatcttcatcggggagaccctgctgtccatgaactgggccatcgtggccgacatcctgctgtatgtggtgatccccacccggcgcagcacagctgaggccttccagatcgtgctgagccacctgctgggagatgctggcagcccctacctgattggcctcatcagtgaccggctgcggaggaactggccacccagcttcctgtctgagttccgggccctgcagttcagcctgatgctgtgtgcctttgtgggcgccctgggcggggccgccttcctgggcacagccatcttcattgaagctgacagaagaagagcccagctgcacgtgcagggcctgctgcatgaagctggcagcacagatgaccgcatcgtggtgccccagaggggccgcagcaccagggtgcctgtggcctctgtgctgatctag

SEQ ID NO: 171501 - DNA, 1365 bp, synthetic construct
  misc_feature 1..1365: note = Description of Artificial Sequence: Synthetic coding sequence
  source 1..1365: mol_type = other DNA
atggccggcagtgacacagcccccttcctgagccaggctgatgatcctgatgatggccctgtgcccggcaccccaggcctgcccggcagcactggaaaccccaagtctgaggagcctgaggtgcctgaccaggagggcctgcagaggatcaccggcctgagccctggccgcagcgccctgattgtggccgtgctgtgctacatcaacctgctgaactacatggaccgcttcaccgtggccgtgttcatcagcagctacatggtgctggcccctgtgtttggctacctgggggaccgctacaacaggaagtacctgatgtgtggcggcatcgccttctggagcctggtgaccctgggcagcagcttcatccctggagagcacttctggctgctgctgctgacccggggcctggtgggcgtgggggaggccagctacagcaccatcgcccccaccctgattgctgacctgtttgtggccgaccagaggagcaggatgctgagcatcttctactttgccatccctgtgggcagcggcctgggctacatcgccggcagcaaggtgaaggacatggccggggactggcactgggccctgcgggtgaccccaggcctgggcgtggtggccgtgctgctgctcttcctggtggtgcgggagcccccaagaggagctgtggagcggcacagcgacctgccccccctgaaccccacctcctggtgggccgacctgcgggccctggccaggaacctgatcttcggcctcatcacctgcctgactggagtgctgggcgtgggcctgggcgtggagatcagccggcggctgcggcacagcaaccccagggctgaccccctggtgtgtgccaccggcctgctgggcagcgcccccttcctgttcctgagcctggcctgtgcccggggcagcatcgtggccacctacatcttcatcttcatcggggagaccctgctgtccatgaactgggccatcgtggccgacatcctgctgtatgtggtgatccccacccggcgcagcacagctgaggccttccagatcgtgctgagccacctgctgggagatgctggcagcccctacctgattggcctcatcagtgaccggctgcggaggaactggccacccagcttcctgtctgagttccgggccctgcagttcagcctgatgctgtgtgcctttgtgggcgccctgggcggggccgccttcctgggcacagccatcttcattgaagctgacagaagaagagcccagctgcacgtgcagggcctgctgcatgaagctggcagcacagatgaccgcatcgtggtgccccagaggggccgcagcaccagggtgcctgtggcctctgtgctgatctag

SEQ ID NO: 171502 - DNA, 1650 bp, synthetic construct
  misc_feature 1..1650: note = Description of Artificial Sequence: Synthetic coding sequence
  source 1..1650: mol_type = other DNA
atgatgtgcctggagtgtgccagcgctgctgctggaggagctgaggaggaggaggctgatgctgagaggagaagaagaagaagaggagcccagagaggagctgggggcagcggctgctgcggggcccggggagctggaggagctggggtgtctgctgctggagatgaggtgcagaccctgagcggctctgtgagaagagcccccactggacctcctggcaccccaggcaccccaggctgtgccgccacagccaagggccctggggcccagcagcccaagccagccagcctgggccggggcagaggagctgctgctgccatcctgagcctgggcaatgtgctgaactacctggaccgctacacagtggccggcgtgctgctggacatccagcagcactttggagtgaaggacagaggagctggcctgctgcagagcgtcttcatctgcagcttcatggtggccgcccccatcttcggctacctgggggaccgcttcaacaggaaggtgatcctgagctgtggcatcttcttctggagcgctgtgaccttcagcagcagcttcatcccccagcagtacttctggctgctggtgctgagccggggcctggtgggcattggagaggccagctacagcaccatcgcccccaccatcatcggggacctcttcaccaagaacaccaggaccctgatgctgagcgtcttctactttgccatccccctgggcagcggcctgggctacatcaccggcagctctgtgaagcaggccgccggggactggcactgggccctgcgggtgtcccctgtgctgggcatgatcaccggcaccctcatcctgatcctggtgcctgccaccaagaggggccatgctgaccagctgggggaccagctgaaggcccggacctcctggctgcgggacatgaaggccctgatccggaacagaagctatgtgttcagcagcctggccaccagcgctgtgtcctttgccactggagccctgggcatgtggatccccctgtacctgcaccgggcccaggtggtgcagaagacagctgagacctgcaacagccccccctgtggggccaaggacagcctcatctttggagccatcacctgcttcaccggcttcctgggcgtggtgactggagctggggccacccgctggtgccgcctgaagacccagagagctgaccccctggtgtgtgctgtgggcatgctgggcagcgccatcttcatctgcctgatctttgtggccgccaagagcagcatcgtgggcgcctacatctgcatctttgtgggggagaccctgctcttcagcaactgggccatcacagctgacatcctgatgtatgtggtgatccccacccggcgggccacagctgtggccctgcagagcttcaccagccacctgctgggagatgctggcagcccctacctgattggcttcatcagtgacctgatccggcagagcaccaaggacagccccctgtgggagttcctgagcctgggctacgccctgatgctgtgcccctttgtggtggtgctgggcggcatgttcttcctggccacagccctcttctttgtgtctgaccgggcccgggcagagcagcaggtgaaccagctggccatgcccccagcctctgtgaaggtgtag

SEQ ID NO: 171503 - DNA, 1158 bp, synthetic construct
  misc_feature 1..1158: note = Description of Artificial Sequence: Synthetic coding sequence
  source 1..1158: mol_type = other DNA
atgctggtgtgcttccggctgtacagctggctgttcttcctgagccggggcatcgtgggcactggaagtgccagctacagcaccatcgcccccaccgtgctgggggacctgtttgtgcgggaccagaggaccagggtgctggccgtgttctacatcttcatccctgtgggcagcggcctgggctacgtgctgggcagcgctgtgaccatgctgaccggcaactggcgctgggccctgcgggtgatgccctgcctggaggccgtggccctgatcctgctgatcctgctggtgcctgaccccccaagaggagctgctgagacccagggcgagggcgctgtgggcggcttccgcagctcctggtgtgaagatgtgcgctacctgggcaagaactggagctttgtgtggagcaccctgggcgtgacagccatggcctttgtgactggagccctgggcttctgggcccccaagttcctgctggaggcccgggtggtgcacggcctgcagcccccctgcttccaggagccctgcagcaacccagacagcctcatctttggagccctgaccatcatgactggagtcatcggggtcatcctgggcgctgaggccgcccggcgctacaagaaggtgattcctggagctgagcccctcatctgtgccagcagcctgctggccacagccccctgcctgtacctggccctggtgctggcccccaccaccctgctggccagctatgtgttcctgggcctgggggagctgctgctgagctgcaactgggccgtggtggccgacatcctgctgtctgtggtggtgccccgctgccggggcacagctgaggccctgcagatcaccgtgggccacatcctgggagatgctggcagcccctacctgaccggcctcatcagctctgtgctgcgggcccggcggccagacagctacctgcagcgcttccgcagcctgcagcagagcttcctgtgctgtgccttcgtcatcgccctgggcggcggctgcttcctgctgacagccctgtacctggagagagatgagacccgggcctggcagcctgtgacaggcaccccagacagcaatgatgtggacagcaatgacctggagcggcagggcctgctgagcggggccggggccagcacagaggagccctag

SEQ ID NO: 171504 - DNA, 1539 bp, synthetic construct
  misc_feature 1..1539: note = Description of Artificial Sequence: Synthetic coding sequence
  source 1..1539: mol_type = other DNA
atggccggcggcatgtctgctgagtgcccagagcccggccctgggggcctgcagggccagagccctggccctggccggcagtgccccccacccatcacccccacctcctggagcctgcccccctggagggcctacgtggccgctgctgtgctgtgctacatcaacctgctgaactacatgaactggttcatcatcgccggcgtgctgctggacatccaggaggtgttccagatcagtgacaaccacgccggcctgctgcagacagtgtttgtgtcctgcctgctgctgagcgcccctgtgtttggctacctgggggacagacacagcaggaaggccaccatgagctttggcatcctgctgtggagcggggccggcctgagcagcagcttcatcagcccccgctacagctggctgttcttcctgagccggggcatcgtgggcaccggcagcgccagctacagcaccatcgcccccaccgtgctgggggacctgtttgtgcgggaccagaggaccagggtgctggccgtgttctacatcttcatccctgtgggcagcggcctgggctacgtgctgggcagcgctgtgaccatgctgactggaaactggcgctgggccctgcgggtgatgccctgcctggaggccgtggccctgatcctgctgatcctgctggtgcctgaccccccaagaggagctgctgagacccagggcgagggcgctgtgggcggcttccgcagctcctggtgtgaagatgtgcgctacctgggcaagaactggagctttgtgtggagcaccctgggcgtgacagccatggcctttgtgactggagccctgggcttctgggcccccaagttcctgctggaggcccgggtggtgcacggcctgcagcccccctgcttccaggagccctgcagcaacccagacagcctcatctttggagccctgaccatcatgactggagtgattggagtcatcctgggcgctgaggccgcccggcgctacaagaaggtgattcctggagctgagcccctcatctgtgccagcagcctgctggccacagccccctgcctgtacctggccctggtgctggcccccaccaccctgctggccagctatgtgttcctgggcctgggggagctgctgctgagctgcaactgggccgtggtggccgacatcctgctgtctgtggtggtgccccgctgccggggcacagctgaggccctgcagatcaccgtgggccacatcctgggagatgctggcagcccctacctgaccggcctcatcagctctgtgctgcgggcccggcggccagacagctacctgcagcgcttccgcagcctgcagcagagcttcctgtgctgtgcctttgtgattgccctgggcggcggctgcttcctgctgacagccctgtacctggagagagatgagacccgggcctggcagcctgtgacaggcaccccagacagcaatgatgtggacagcaatgacctggagcggcagggcctgctgtctggagctggggccagcacagaggagccctag

SEQ ID NO: 171505 - DNA, 249 bp, synthetic construct
  misc_feature 1..249: note = Description of Artificial Sequence: Synthetic coding sequence
  source 1..249: mol_type = other DNA
atgggccagacagccctggccggcggcagcagcagcacccccaccccccaggccctgtacccagacctgagctgcccagagggcctggaggagctgctgagcgcccctcctccagacctgggcgcccagaggagacatggctggaaccccaaggactgcagtgaaaatattgaggtgaaggagggcggcctgtactttgagcggcggcctgtggcccagagcacagatggagcccggggcaagaggtag

SEQ ID NO: 171506 - DNA, 792 bp, synthetic construct
  misc_feature 1..792: note = Description of Artificial Sequence: Synthetic coding sequence
  source 1..792: mol_type = other DNA
atgggccagacagccctggccggcggcagcagcagcacccccaccccccaggccctgtacccagacctgagctgcccagagggcctggaggagctgctgagcgcccctcctccagacctgggcgcccagaggagacatggctggaaccccaaggactgcagtgaaaatattgaggtgaaggagggcggcctgtactttgagcggcggcctgtggcccagagcacagatggagcccggggcaagaggggctacagccggggcctgcacgcctgggagatctcctggcccctggagcagaggggcacccatgctgtggtgggcgtggccacagccctggcccccctgcagacagaccactatgctgccctgctgggcagcaacagcgagagctggggctgggacatcggccggggcaagctgtaccaccagagcaaaggacctggggccccccagtacccagctggcacccagggcgagcagctggaggtgcctgagcggctgctggtggtgctggacatggaggagggcaccctgggctacgccatcggcggcacctacctgggccctgccttccggggcctgaagggccgcaccctgtacccagctgtgtctgctgtgtggggccagtgccaggtgcgcatccgctacctgggggagcggcgggcagagccccacagcctgctgcacctgagccggctgtgtgtgcgccacaacctgggggacacccggctgggccaggtgtctgccctgcccctgcccccagccatgaagcgctacctgctgtaccagtag

SEQ ID NO: 171507 - DNA, 792 bp, synthetic construct; identical to SEQ ID NO: 171506
  misc_feature 1..792: note = Description of Artificial Sequence: Synthetic coding sequence
  source 1..792: mol_type = other DNA

SEQ ID NO: 171508 - DNA, 1068 bp, synthetic construct
  misc_feature 1..1068: note = Description of Artificial Sequence: Synthetic coding sequence
  source 1..1068: mol_type = other DNA
atggcccggcggcccaggaacagccgggcctggcactttgtgctgtctgctgccaggagagatgctgatgcccgggctgtggccctggccggcagcaccaactggggctatgacagtgatggccagcacagcgacagcgacagcgaccctgagtacagcaccctgccccccagcatccccagcgctgtgcctgtgactggagagagcttctgtgactgtgccggccagagcgaggccagcttctgcagcagcctgcacagcgcccaccggggccgggactgccgctgtggggaggaggatgagtactttgactgggtgtgggatgacctgaacaagagcagcgccaccctgctgagctgtgacaacaggaaggtgtccttccacatggagtacagctgtggcacagctgccatccggggcaccaaggagctgggggagggccagcacttctgggagatcaagatgaccagccctgtgtatggaacagacatgatggtgggcatcggcaccagtgatgtggacctggacaagtaccgccacaccttctgcagcctgctgggcagagatgaggacagctggggcctgagctacacaggcctgctgcaccacaagggggacaagaccagcttcagcagccgcttcggccagggcagcatcatcggcgtgcacctggacacctggcacggcaccctgaccttcttcaagaacaggaagtgcatcggcgtggccgccaccaagctgcagaacaagcgcttctaccccatggtgtgcagcacagctgcccggagctccatgaaggtgaccaggagctgtgccagcgccaccagcctgcagtacctgtgctgccaccggctgcggcagctgcggccagacagcggggacaccctggagggcctgcccctgcccccaggcctgaagcaggtgctgcacaacaagctgggctgggtgctgtccatgagctgcagcaggaggaaggcccctgtgtctgacccccaggccgccaccagcgcccaccccagcagccgggagccccggccctgccagaggaagcgctgcagaagaacatag

SEQ ID NO: 171509 - DNA, 480 bp, synthetic construct
  misc_feature 1..480: note = Description of Artificial Sequence: Synthetic coding sequence
  source 1..480: mol_type = other DNA
atggagtacagctgtggcacagctgccatccggggcaccaaggagctgggggagggccagcacttctgggagatcaagatgaccagccctgtgtatggcaccctgaccttcttcaagaacaggaagtgcatcggcgtggccgccaccaagctgcagaacaagcgcttctaccccatggtgtgcagcacagctgcccggagctccatgaaggtgaccaggagctgtgccagcgccaccagcctgcagtacctgtgctgccaccggctgcggcagctgcggccagacagcggggacaccctggagggcctgcccctgcccccaggcctgaagcaggtgctgcacaacaagctgggctgggtgctgtccatgagctgcagcaggaggaaggcccctgtgtctgacccccaggccgccaccagcgcccaccccagcagccgggagccccggccctgccagaggaagcgctgcagaagaacatag

SEQ ID NO: 171510 - DNA, 1068 bp, synthetic construct; identical to SEQ ID NO: 171508
  misc_feature 1..1068: note = Description of Artificial Sequence: Synthetic coding sequence
  source 1..1068: mol_type = other DNA

SEQ ID NO: 171511 - DNA, 822 bp, synthetic construct
  misc_feature 1..822: note = Description of Artificial Sequence: Synthetic coding sequence
  source 1..822: mol_type = other DNA
atgggccagaagctgagcggcagcctgaagtctgtggaggtgcgggagcccgccctgcggcctgccaagcgggagctgcggggagctgagcccggccggcctgcccggctggaccagctgctggacatgcctgctgctggcctggccgtgcagctgcggcatgcctggaacccagaagatagaagcctgaatgtgtttgtgaaggatgatgaccggctgaccttccaccgccaccctgtggcccagagcacagatggcatccggggcaaggtgggccacgcccggggcctgcacgcctggcagatcaactggccagcccggcagaggggcacccatgctgtggtgggcgtggccacagcccgggcccccctgcacagcgtgggctacacagccctggtgggcagtgatgctgagagctggggctgggacctgggccgcagccggctgtaccatgatggcaagaaccagcccggggtggcctacccagccttcctgggcccagatgaggcctttgccctgcctgacagcctgctggtggtgctggacatggatgagggcaccctgtccttcatcgtggatggccagtacctgggcgtggccttccggggcctgaagggcaagaagctgtaccctgtggtgtctgctgtgtggggccactgtgaggtgaccatgagatacatcaatggcctggaccctgagcccctgcccctgatggacctgtgccgccgcagcatccgcagcgccctgggccggcagaggctgcaggacatcagcagcctgcccctgccccagagcctgaagaactacctgcagtaccagtag

SEQ ID NO: 171512 - DNA, 1908 bp, synthetic construct
  misc_feature 1..1908: note = Description of Artificial Sequence: Synthetic coding sequence
  source 1..1908: mol_type = other DNA
atggccagcagcggcatggctgacagcgccaaccacctgcccttcttctttggaaacatcacccgggaggaggccgaggactacctggtgcagggcggcatgtctgatggcctgtacctgctgcggcagagcaggaactacctgggcggctttgccctgtctgtggcccacggcaggaaggcccaccactacaccatcgagcgggagctgaatggcacctacgccatcgccggcggccgcacccacgccagccctgctgacctgtgccactaccacagccaggagagtgatggcctggtgtgcctgctgaagaagcccttcaaccggccccagggcgtgcagcccaagacaggcccctttgaggacctgaaggaaaatctcatccgggagtatgtgaagcagacctggaacctgcagggccaggccctggagcaggccatcatcagccagaagccccagctggagaagctgattgccaccacagcccacgagaagatgccctggttccacggcaagatcagccgggaggagagcgagcagatcgtgctgattggcagcaagaccaacgggaagttcctgatccgggcccgggacaacaacggcagctatgccctgtgcctgctgcacgagggcaaggtgctgcactacagaattgacaaggacaagacaggcaagctgagcatccctgagggcaagaagtttgacaccctgtggcagctggtggagcactacagctacaaggcagatggcctgctgcgggtgctgactgtgccctgccagaagattggcacccagggcaatgtgaactttggaggccggccccagctgcccggcagccacccagccacctggagcgctgggggcatcatcagccgcatcaagagctacagcttccccaagccaggccacaggaagagcagccctgcccagggcaaccggcaggagagcacagtgtccttcaacccctatgagcctgagctggccccctgggccgctgacaagggcccccagcgggaggccctgcccatggacacagaggtgtatgagagcccctatgctgaccctgaggagatccggcccaaggaggtgtacctggacaggaagctgctgaccctggaggacaaggagctgggcagcggcaactttggcaccgtgaagaagggctactaccagatgaagaaggtggtgaagacagtggccgtgaagatcctgaagaatgaggccaatgaccctgccctgaaggatgagctgctggccgaggccaacgtgatgcagcagctggacaacccctacatcgtgaggatgattggcatctgtgaggccgagagctggatgctggtgatggagatggccgagctgggccccctgaacaagtacctgcagcagaacagacatgtgaaggacaagaacatcatcgagctggtgcaccaggtgtccatgggcatgaagtacctggaggagagcaactttgtgcaccgggacctggccgccagaaatgtgctgctggtgacccagcactacgccaagatcagtgactttggcctgagcaaggccctgcgggcagatgagaactactacaaggcccagacccacggcaagtggcctgtgaagtggtacgcccctgagtgcatcaactactacaagttcagcagcaagagtgatgtgtggagctttggagtgctgatgtgggaggccttctcctatggccagaagccctaccggggcatgaagggcagcgaggtgacagccatgctggagaagggggagaggatgggctgcccagctggctgcccccgggagatgtatgacctgatgaacctgtgctggacctatgatgtggagaacagacctggctttgctgctgtggagctgcggctgaggaactactactatgatgtggtgaactag

SEQ ID NO: 171513 - DNA, 1839 bp, synthetic construct
  misc_feature 1..1839: note = Description of Artificial Sequence: Synthetic coding sequence
  source 1..1839: mol_type = other DNA
atggccagcagcggcatggctgacagcgccaaccacctgcccttcttctttggaaacatcacccgggaggaggccgaggactacctggtgcagggcggcatgtctgatggcctgtacctgctgcggcagagcaggaactacctgggcggctttgccctgtctgtggcccacggcaggaaggcccaccactacaccatcgagcgggagctgaatggcacctacgccatcgccggcggccgcacccacgccagccctgctgacctgtgccactaccacagccaggagagtgatggcctggtgtgcctgctgaagaagcccttcaaccggccccagggcgtgcagcccaagacaggcccctttgaggacctgaaggaaaatctcatccgggagtatgtgaagcagacctggaacctgcagggccaggccctggagcaggccatcatcagccagaagccccagctggagaagctgattgccaccacagcccacgagaagatgccctggttccacggcaagatcagccgggaggagagcgagcagatcgtgctgattggcagcaagaccaacgggaagttcctgatccgggcccgggacaacaacggcagctatgccctgtgcctgctgcacgagggcaaggtgctgcactacagaattgacaaggacaagacaggcaagctgagcatccctgagggcaagaagtttgacaccctgtggcagctggtggagcactacagctacaaggcagatggcctgctgcgggtgctgactgtgccctgccagaagattggcacccagggcaatgtgaactttggaggccggccccagctgcccggcagccacccagccagcagccctgcccagggcaaccggcaggagagcacagtgtccttcaacccctatgagcctgagctggccccctgggccgctgacaagggcccccagcgggaggccctgcccatggacacagaggtgtatgagagcccctatgctgaccctgaggagatccggcccaaggaggtgtacctggacaggaagctgctgaccctggaggacaaggagctgggcagcggcaactttggaacagtgaagaagggctactaccagatgaagaaggtggtgaagacagtggccgtgaagatcctgaagaatgaggccaatgaccctgccctgaaggatgagctgctggccgaggccaacgtgatgcagcagctggacaacccctacatcgtgaggatgattggcatctgtgaggccgagagctggatgctggtgatggagatggccgagctgggccccctgaacaagtacctgcagcagaacagacatgtgaaggacaagaacatcatcgagctggtgcaccaggtgtccatgggcatgaagtacctggaggagagcaactttgtgcaccgggacctggccgccagaaatgtgctgctggtgacccagcactacgccaagatcagtgactttggcctgagcaaggccctgcgggcagatgagaactactacaaggcccagacccacggcaagtggcctgtgaagtggtacgcccctgagtgcatcaactactacaagttcagcagcaagagtgatgtgtggagctttggagtgctgatgtgggaggccttctcctatggccagaagccctaccggggcatgaagggcagcgaggtgacagccatgctggagaagggggagaggatgggctgcccagctggctgcccccgggagatgtatgacctgatgaacctgtgctggacctatgatgtggagaaccggcccggctttgctgctgtggagctgcggctgaggaactactactatgatgtggtgaactag

SEQ ID NO: 171514 - DNA, 1839 bp, synthetic construct; identical to SEQ ID NO: 171513
  misc_feature 1..1839: note = Description of Artificial Sequence: Synthetic coding sequence
  source 1..1839: mol_type = other DNA

SEQ ID NO: 171515 - DNA, 1908 bp, synthetic construct; identical to SEQ ID NO: 171512
  misc_feature 1..1908: note = Description of Artificial Sequence: Synthetic coding sequence
  source 1..1908: mol_type = other DNA

SEQ ID NO: 171516 - DNA, 990 bp, synthetic construct
  misc_feature 1..990: note = Description of Artificial Sequence: Synthetic coding sequence
  source 1..990: mol_type = other DNA
atggtgtccaagagccgctggaagctgctggccatgctggccctggtgctggtggtgatggtgtggtacagcatcagccgggaggacagcttctacttccccatccctgagaagaaggagccctgcctgcagggcgaggccgagagcaaggccagcaagctgtttggaaactacagccgggaccagcccatcttcctgcggctggaggactacttctgggtgaagacccccagcgcctatgagctgccctacggcaccaagggcagcgaggacctgctgctgcgggtgctggccatcaccagcagcagcatccccaagaacatccagagcctgcgctgccgccgctgtgtggtggtgggcaatggccaccggctgaggaacagcagcctgggagatgccatcaacaagtatgatgtggtgatccggctgaacaatgcccctgtggccggctatgaaggagatgtgggcagcaagaccaccatgaggctcttctacccagagagcgcccactttgaccccaaggtggagaacaacccagacaccctgctggtgctggtggccttcaaggccatggacttccactggattgagaccatcctgagtgacaagaagagggtgaggaagggcttctggaagcagcccccactcatctgggatgtgaaccccaagcagatccgcatcctgaaccccttcttcatggagattgctgctgacaagctgctgagcctgcccatgcagcagcccaggaagatcaagcagaagcccaccaccggcctgctggccatcaccctggccctgcacctgtgtgacctggtgcacatcgccggcttcggctacccagatgcctacaacaagaagcagaccatccactactatgagcagatcaccctgaagtccatggccggcagcggccacaacgtgtcccaggaggccctggccatcaagaggatgctggagatgggcgccatcaagaacctgaccagcttctag

SEQ ID NO: 171517 - DNA, 1917 bp, synthetic construct
  misc_feature 1..1917: note = Description of Artificial Sequence: Synthetic coding sequence
  source 1..1917: mol_type = other DNA
atggccactggagccaatgccacccccctggacttccccagcaagaagaggaagaggagccgctggaaccaggacaccatggagcagaagacagtcatccctggcatgcccaccgtcatccccccaggcctgacccgggagcaggagcgggcctacatcgtgcagctgcagatcgaggacctgaccaggaagctgaggactggagacctgggcatcccccccaacccagaagatagaagccccagccctgagcccatctacaacagcgagggcaagaggctgaacacccgggagttccgcaccaggaagaagctggaggaggagcggcacaacctgatcacagagatggtggccctgaacccagacttcaagcccccagctgactacaagcccccagccaccagggtgtctgacaaggtgatgatcccccaggatgagtacccagagatcaactttgtgggcctgctgattggcccccggggcaacaccctgaagaacatcgagaaggagtgcaatgccaagatcatgatccggggcaagggctctgtgaaggagggcaaggtgggcaggaaggatggccagatgctgcctggagaagatgagcccctgcacgccctggtgacagccaacaccatggagaatgtgaagaaggctgtggagcagatccggaacatcctgaagcagggcatcgagaccccagaggaccagaatgacctgaggaagatgcagctgcgggagctggcccggctgaatggcaccctgcgggaggatgacaaccgcatcctgcggccctggcagagcagcgagaccaggagcatcaccaacaccaccgtgtgcaccaagtgtggcggggccggccacatcgccagtgactgcaagttccagaggcctggggacccccagagcgcccaggacaaggccaggatggacaaggagtacctgagcctgatggccgagctgggggaggcccctgtgcctgcctctgtgggcagcaccagcggccctgccaccacccccctggccagcgcccccaggcctgctgccccagccaacaaccccccaccacccagcctgatgagcaccacccagagccggcccccctggatgaacagcggccccagcgagagccggccctaccacggcatgcatggaggcggccctgggggccctgggggcggcccccacagcttcccccaccccctgcccagcctgactggaggccacggcggccaccccatgcagcacaaccccaacggccccccaccaccctggatgcagcccccacctccacccatgaaccagggcccccaccccccaggccaccacggccccccacccatggaccagtacctgggcagcacccctgtgggcagcggcgtgtaccgcctgcaccagggcaagggcatgatgcctcctccacccatgggcatgatgcctcctcctcctcctccacccagcggccagcccccacctccacccagcggccccctgcccccctggcagcagcagcagcagcagcccccacctcctcctccacccagcagctccatggccagcagcacccccctgccctggcagcagaacaccaccaccaccaccaccagcgctggcaccggcagcatccccccctggcagcagcagcaggccgctgctgctgccagccctggggccccccagatgcagggcaaccccaccatggtgcccctgcccccaggagtgcagccccccctgcccccaggggcccctcctcctcctcctcctcctcctcctggcagcgctggcatgatgatccccccaagaggaggagatggccccagccatgaaagtgaggacttcccccggcccctggtgaccctgcccggccggcagccccagcagaggccctggtggacaggctggtttgggaaggccgcctag

SEQ ID NO: 171518 - DNA, 1920 bp, synthetic construct
  misc_feature 1..1920: note = Description of Artificial Sequence: Synthetic coding sequence
  source 1..1920: mol_type = other DNA
atggccactggagccaatgccacccccctggacttccccagcaagaagaggaagaggagccgctggaaccaggacaccatggagcagaagacagtcatccctggcatgcccaccgtcatccccccaggcctgacccgggagcaggagcgggcctacatcgtgcagctgcagatcgaggacctgaccaggaagctgaggactggagacctgggcatcccccccaacccagaagatagaagccccagccctgagcccatctacaacagcgagggcaagaggctgaacacccgggagttccgcaccaggaagaagctggaggaggagcggcacaacctgatcacagagatggtggccctgaacccagacttcaagcccccagctgactacaagcccccagccaccagggtgtctgacaaggtgatgatcccccaggatgagtacccagagatcaactttgtgggcctgctgattggcccccggggcaacaccctgaagaacatcgagaaggagtgcaatgccaagatcatgatccggggcaagggctctgtgaaggagggcaaggtgggcaggaaggatggccagatgctgcctggagaagatgagcccctgcacgccctggtgacagccaacaccatggagaatgtgaagaaggctgtggagcagatccggaacatcctgaagcagggcatcgagaccccagaggaccagaatgacctgaggaagatgcagctgcgggagctggcccggctgaatggcaccctgcgggaggatgacaaccgcatcctgcggccctggcagagcagcgagaccaggagcatcaccaacaccaccgtgtgcaccaagtgtggcggggccggccacatcgccagtgactgcaagttccagaggcctggggacccccagagcgcccaggacaaggccaggatggacaaggagtacctgagcctgatggccgagctgggggaggcccctgtgcctgcctctgtgggcagcaccagcggccctgccaccacccccctggccagcgcccccaggcctgctgccccagccaacaaccccccaccacccagcctgatgagcaccacccagagccggcccccctggatgaacagcggccccagcgagagccggccctaccacggcatgcatggaggcggccctgggggccctgggggcggcccccacagcttcccccaccccctgcccagcctgactggaggccacggcggccaccccatgcagcacaaccccaacggccccccaccaccctggatgcagcccccacctccacccatgaaccagggcccccaccccccaggccaccacggccccccacccatggaccagtacctgggcagcacccctgtgggcagcggcgtgtaccgcctgcaccagggcaagggcatgatgcctcctccacccatgggcatgatgcctcctcctcctcctccacccagcggccagcccccacctccacccagcggccccctgcccccctggcagcagcagcagcagcagcccccacctcctcctccacccagcagctccatggccagcagcacccccctgccctggcagcagaacaccaccaccaccaccaccagcgctggcaccggcagcatccccccctggcagcagcagcaggccgctgctgctgccagccctggggccccccagatgcagggcaaccccaccatggtgcccctgcccccaggagtgcagccccccctgcccccaggggcccctcctcctcctcctcctcctcctcctggcagcgctggcatgatgtatgcccctcctcctcctcctcctccacccatggaccccagcaactttgtgaccatgatgggcatgggcgtggccggcatgccacccttcggcatgcccccagcccctcctcctcctccaccccagaactag

SEQ ID NO: 171519 - DNA, 1716 bp, synthetic construct
  misc_feature 1..1716: note = Description of Artificial Sequence: Synthetic coding sequence
  source 1..1716: mol_type = other DNA
atggccactggagccaatgccacccccctggacttccccagcaagaagaggaagaggagccgctggaaccaggacaccatggagcagaagacagtcatccctggcatgcccaccgtcatccccccaggcctgacccgggagcaggagcgggcctacatcgtgcagctgcagatcgaggacctgaccaggaagctgaggactggagacctgggcatcccccccaacccagaagatagaagccccagccctgagcccatctacaacagcgagggcaagaggctgaacacccgggagttccgcaccaggaagaagctggaggaggagcggcacaacctgatcacagagatggtggccctgaacccagacttcaagcccccagctgactacaagcccccagccaccagggtgtctgacaaggtgatgatcccccaggatgagtacccagagatcaactttgtgggcctgctgattggcccccggggcaacaccctgaagaacatcgagaaggagtgcaatgccaagatcatgatccggggcaagggctctgtgaaggagggcaaggtgggcaggaaggatggccagatgctgcctggagaagatgagcccctgcacgccctggtgacagccaacaccatggagaatgtgaagaaggctgtggagcagatccggaacatcctgaagcagggcatcgagaccccagaggaccagaatgacctgaggaagatgcagctgcgggagctggcccggctgaatggcaccctgcgggaggatgacaaccgcatcctgcggccctggcagagcagcgagaccaggagcatcaccaacaccaccgtgtgcaccaagtgtggcggggccggccacatcgccagtgactgcaagttccagaggcctggggacccccagagcgcccaggacaaggccaggatggacaaggagtacctgagcctgatggccgagctgggggaggcccctgtgcctgcctctgtgggcagcaccagcggccctgccaccacccccctggccagcgcccccaggcctgctgccccagccaacaaccccccaccacccagcctgatgagcaccacccagagccggcccccctggatgaacagcggccccagcgagagccggccctaccacggcatgcatggaggcggccctgggggccctgggggcggcccccacagcttcccccaccccctgcccagcctgactggaggccacggcggccaccccatgcagcacaaccccaacggccccccaccaccctggatgcagcccccacctccacccatgaaccagggcccccaccccccaggccaccacggccccccacccatgggcaagtctgtgcctgggaagtatgcctgtggcctgtggggcctgagccctgccagcaggaagagatatgatgctgccaccacctacggccatgatgctgctgctgctgctgccagccagtgggccgcccccacccccagcctgtggagcagcagccccatggccaccacagctgctgctgccagcgccaccccatctgcccagcagcagtatggcttccagtaccccctggccatggccgccaagatccccccaagaggaggagatggccccagccatgaaagtgaggacttcccccggcccctggtgaccctgcccggccggcagccccagcagaggccctggtggacaggctggtttgggaaggccgcctag

SEQ ID NO: 171520 - DNA, 1302 bp, synthetic construct
  misc_feature 1..1302: note = Description of Artificial Sequence: Synthetic coding sequence
  source 1..1302: mol_type = other DNA
atggtggccctgaacccagacttcaagcccccagctgactacaagcccccagccaccagggtgtctgacaaggtgatgatcccccaggatgagtacccagagatcaactttgtgggcctgctgattggcccccggggcaacaccctgaagaacatcgagaaggaatgtaatgccaagatcatgatccggggcaaaggatctgtgaaggagggcaaggtgggcaggaaggatggccagatgctgcccggggaggatgagcccctgcacgccctggtgacagccaacaccatggagaatgtgaagaaggctgtggagcagatccggaacatcctgaagcagggcatcgagaccccagaggaccagaatgacctgaggaagatgcagctgcgggagctggcccggctgaatggcaccctgagagaagatgacaaccgcatcctgcggccctggcagagcagcgagaccaggagcatcaccaacaccaccgtgtgcaccaagtgtggcggggccggccacatcgccagtgactgcaagttccagaggcctggggacccccagagcgcccaggacaaggccaggatggacaaggagtacctgagcctgatggccgagctgggggaggcccctgtgcctgcctctgtgggcagcaccagcggccctgccaccacccccctggccagcgcccccaggcctgctgccccagccaacaaccccccaccacccagcctgatgagcaccacccagagcaggcctccctggatgaacagcggccccagcgagagccggccctaccacggcatgcacggcggcggccctgggggccctgggggcggcccccacagcttcccccaccccctgcccagcctgaccggcggccatggaggccaccccatgcagcacaaccccaatggacctcctccaccctggatgcagcccccacctccacccatgaaccagggcccccaccccccaggccaccacggccccccacccatggaccagtacctgggcagcacccctgtgggcagcggcgtgtaccgcctgcaccagggcaagggcatgatgcctcctccacccatgggcatgatgcctcctcctcctcctcctccttctggccagcccccacctcctccttctggccccctgcccccctggcagcagcagcagcagcagcccccacctcctcctccacccagcagctccatggccagcagcacccccctgccctggcagcagaggagcctgcctgctgctgccatggcccgggccatgagggtgaggaccttccgggcccactggtag

SEQ ID NO: 171521 - DNA, 2022 bp, synthetic construct
  misc_feature 1..2022: note = Description of Artificial Sequence: Synthetic coding sequence
  source 1..2022: mol_type = other DNA
atggccactggagccaatgccacccccctgggcaagctgggccccccaggcctgccccccctgcccggccccaagggcggctttgagcccggccccccaccagcccctggccctggggccggcctgctggcccctggccccccacctcctcctcctgtgggctccatgggcgccctgacagctgccttcccctttgctgccctgcccccacctcctcctcctcctcctcctcctccaccccagcagcccccacctcctcctcctccacccagccctggggccagctaccccccaccccagcccccacctcctccacccctgtaccagagggtgtccccaccccagcccccaccaccccagccccccaggaaggaccagcagcccggccctgctgggggcggcggggacttccccagcaagaagaggaagaggagccgctggaaccaggacaccatggagcagaagacagtcatccctggcatgcccaccgtcatccccccaggcctgacccgggagcaggagcgggcctacatcgtgcagctgcagatcgaggacctgaccaggaagctgaggactggagacctgggcatcccccccaaccctgaggacaggagccccagccctgagcccatctacaacagcgagggcaagaggctgaacacccgggagttccgcaccaggaagaagctggaggaggagcggcacaacctgatcacagagatggtggccctgaacccagacttcaagcccccagctgactacaagcccccagccaccagggtgtctgacaaggtgatgatcccccaggatgagtacccagagatcaactttgtgggcctgctgattggcccccggggcaacaccctgaagaacatcgagaaggaatgtaatgccaagatcatgatccggggcaaaggatctgtgaaggagggcaaggtgggcaggaaggatggccagatgctgcccggggaggatgagcccctgcacgccctggtgacagccaacaccatggagaatgtgaagaaggctgtggagcagatccggaacatcctgaagcagggcatcgagaccccagaggaccagaatgacctgaggaagatgcagctgcgggagctggcccggctgaatggcaccctgagagaagatgacaaccgcatcctgcggccctggcagagcagcgagaccaggagcatcaccaacaccaccgtgtgcaccaagtgtggcggggccggccacatcgccagtgactgcaagttccagaggcctggggacccccagagcgcccaggacaaggccaggatggacaaggagtacctgagcctgatggccgagctgggggaggcccctgtgcctgcctctgtgggcagcaccagcggccctgccaccacccccctggccagcgcccccaggcctgctgccccagccaacaaccccccaccacccagcctgatgagcaccacccagagcaggcctccctggatgaacagcggccccagcgagagccggccctaccacggcatgcacggcggcggccctgggggccctgggggcggcccccacagcttcccccaccccctgcccagcctgaccggcggccatggaggccaccccatgcagcacaaccccaatggacctcctccaccctggatgcagcccccacctccacccatgaaccagggcccccaccccccaggccaccacggccccccacccatggaccagtacctgggcagcacccctgtgggcagcggcgtgtaccgcctgcaccagggcaagggcatgatgcctcctccacccatgggcatgatgcctcctcctcctcctcctccttctggccagcccccacctcctccttctggccccctgcccccctggcagcagcagcagcagcagcccccacctcctcctccacccagcagctccatggccagcagcacccccctgccctggcagcagaggagcctgcctgctgctgccatggcccgggccatgagggtgaggaccttccgggcccactggtag

SEQ ID NO: 171522 - DNA, 1842 bp, synthetic construct
  misc_feature 1..1842: note = Description of Artificial Sequence: Synthetic coding sequence
  source 1..1842: mol_type = other DNA
atggagcagaagacagtcatccctggcatgcccaccgtcatccccccaggcctgacccgggagcaggagcgggcctacatcgtgcagctgcagatcgaggacctgaccaggaagctgaggactggagacctgggcatcccccccaacccagaagatagaagccccagccctgagcccatctacaacagcgagggcaagaggctgaacacccgggagttccgcaccaggaagaagctggaggaggagcggcacaacctgatcacagagatggtggccctgaacccagacttcaagcccccagctgactacaagcccccagccaccagggtgtctgacaaggtgatgatcccccaggatgagtacccagagatcaactttgtgggcctgctgattggcccccggggcaacaccctgaagaacatcgagaaggagtgcaatgccaagatcatgatccggggcaagggctctgtgaaggagggcaaggtgggcaggaaggatggccagatgctgcctggagaagatgagcccctgcacgccctggtgacagccaacaccatggagaatgtgaagaaggctgtggagcagatccggaacatcctgaagcagggcatcgagaccccagaggaccagaatgacctgaggaagatgcagctgcgggagctggcccggctgaatggcaccctgcgggaggatgacaaccgcatcctgcggccctggcagagcagcgagaccaggagcatcaccaacaccaccgtgtgcaccaagtgtggcggggccggccacatcgccagtgactgcaagttccagaggcctggggacccccagagcgcccaggacaaggccaggatggacaaggagtacctgagcctgatggccgagctgggggaggcccctgtgcctgcctctgtgggcagcaccagcggccctgccaccacccccctggccagcgcccccaggcctgctgccccagccaacaaccccccaccacccagcctgatgagcaccacccagagccggcccccctggatgaacagcggccccagcgagagccggccctaccacggcatgcatggaggcggccctgggggccctgggggcggcccccacagcttcccccaccccctgcccagcctgactggaggccacggcggccaccccatgcagcacaaccccaacggccccccaccaccctggatgcagcccccacctccacccatgaaccagggcccccaccccccaggccaccacggccccccacccatggaccagtacctgggcagcacccctgtgggcagcggcgtgtaccgcctgcaccagggcaagggcatgatgcctcctccacccatgggcatgatgcctcctcctcctcctccacccagcggccagcccccacctccacccagcggccccctgcccccctggcagcagcagcagcagcagcccccacctcctcctccacccagcagctccatggccagcagcacccccctgccctggcagcagaacaccaccaccaccaccaccagcgctggcaccggcagcatccccccctggcagcagcagcaggccgctgctgctgccagccctggggccccccagatgcagggcaaccccaccatggtgcccctgcccccaggagtgcagccccccctgcccccaggggcccctcctcctcctcctcctcctcctcctggcagcgctggcatgatgtatgcccctcctcctcctcctcctccacccatggaccccagcaactttgtgaccatgatgggcatgggcgtggccggcatgccacccttcggcatgcccccagcccctcctcctcctccaccccagaactag

SEQ ID NO: 171523 - DNA, 1527 bp, synthetic construct
  misc_feature 1..1527: note = Description of Artificial Sequence: Synthetic coding sequence
  source 1..1527: mol_type = other DNA
atggccaagagcaatggagaaaatggcccccgggccccagctgctggggagagcctgagcggcacccgggagagcctggcccagggcccagatgctgccaccacagatgagctgagcagcctgggcagtgacagcgaggccaacggctttgctgagaggagaattgacaagtttggcttcatcgtgggcagccagggcgctgagggcgccctggaggaggtgcccctggaggtgctgcggcagcgggagagcaagtggctggacatgctgaacaactgggacaagtggatggccaagaagcacaagaagatccggctgcgctgccagaagggcatcccccccagcctgcggggccgggcctggcagtacctgagcggcggcaaggtgaagctgcagcagaaccctgggaagtttgatgagctggacatgagccctggggaccccaagtggctggatgtgattgaaagagacctgcaccggcagttccccttccacgagatgtttgtgtcccggggcggccacggccagcaggacctcttccgggtgctgaaggcctacaccctgtacagacctgaggagggctactgccaggcccaggcccccatcgctgctgtgctgctgatgcacatgcctgctgagcaggccttctggtgcctggtgcagatctgtgagaagtacctgcccggctactacagcgagaagctggaggccatccagctggatggagagatcctcttcagcctgctgcagaaggtgtcccctgtggcccacaagcacctgagccggcagaagattgaccccctgctgtacatgacagagtggttcatgtgtgccttcagcaggaccctgccctggagctctgtgctgcgggtgtgggacatgttcttctgtgaaggagtgaagatcatcttccgggtgggcctggtgctgctgaagcacgccctgggcagccctgagaaggtgaaggcctgccagggccagtatgagaccatcgagcggctgcggagcctgagccccaagatcatgcaggaggccttcctggtgcaggaggtggtggagctgcctgtgacagagcggcagatcgagcgggagcacctgatccagctgcggcgctggcaggagaccagaggagagctgcagtgccgcagccccccccggctgcacggggccaaggccatcctggatgctgagcccggccccaggcctgccctgcagcccagccccagcatccggctgcccctggatgcccccctgcccggcagcaaggccaagcccaagccacccaagcaggcccagaaggagcagaggaagcagatgaagggccggggccagctggagaagcccccagcccccaaccaggccatggtggtggccgctgctggagatgcctgccccccccagcacgtgccccccaaggacagcgcccccaaggacagcgccccccaggacctggccccccaggtgtctgcccaccacaggagccaggagagcctgaccagccaggagagcgaggacacctacctgtag

SEQ ID NO: 171524 - DNA, 2187 bp, synthetic construct
  misc_feature 1..2187: note = Description of Artificial Sequence: Synthetic coding sequence
  source 1..2187: mol_type = other DNA
atgcctgctggccctgtgcaggccgtgcccccacctcctcctgtgcccacagagcccaagcagcccacagaggaggaggccagcagcaaagaagattctgcccccagcaagcctgtggtgggcatcatctacccacctcctgaggtgaggaacatcgtggacaagacagccagctttgtggccagaaatggacctgagtttgaggcccgcatccggcagaatgagatcaacaaccccaagttcaacttcctgaaccccaatgacccctaccacgcctactaccgccacaaggtgtctgagttcaaggagggcaaggcccagtttgtggccagaaatggccggcagttcctgacccagctgatgcagaaggagcagaggaactaccagtttgacttcctgcggccccagcacagcctcttcaactacttcaccaagctggtggagcagtacaccaagatcctgatcccccccaagggcctcttcagcaagctgaagaaggaggccgagaacccccgggaggtgctggaccaggtgtgctacagagtggagtgggccaagttccaggagcgggagaggaagaaggaggaggaggagaaggagaaggagcgggtggcctatgcccagattgactggcatgactttgtggtggtggagaccgtggacttccagcccaatgagcagggcaacttccccccacccaccaccccagaggagctgggcgcccgcatcctgatccaggagagatatgagaagtttggagagagcgaggaggtggagatggaggtggagagtgatgaagaagatgacaagcaggagaaggccgaggagccccccagccagctggaccaggacacccaggtgcaggacatggatgagggcagtgatgatgaggaggagggccagaaggtgcccccacctcctgagacccccatgcccccacccctgccccccaccccagaccaggtgattgtgaggaaggactatgaccccaaggccagcaagcccctgcccccagccccagccccagatgagtacctggtgagccccatcactggagagaagatcccagccagcaagatgcaggagcacatgagaattggcctgctggacccccgctggctggagcagagggacaggagcatccgggagaagcagagtgatgatgaggtgtatgcccctggcctggacatcgagagcagcctgaagcagctggccgagaggagaacagacatcttcggcgtggaggagacagccatcggcaagaagattggagaggaggagatccagaagccagaggagaaggtgacctgggatggccacagcggctccatggcccggacccagcaggccgcccaggccaacatcaccctgcaggagcagatcgaggccatccacaaggccaagggcctggtgcctgaagatgacaccaaggagaagattggccccagcaagcccaatgagatcccccagcagcccccaccacccagcagcgccaccaacatccccagcagcgccccacccatcacctctgtgccccggccccccaccatgcctcctcctgtgaggaccaccgtggtgtctgctgtgcctgtgatgcccaggcctcccatggcctctgtggtgcggctgcccccaggctctgtgattgcccccatgccacccatcatccacgccccccgcatcaacgtggtgcccatgcctccttctgccccacccatcatggccccccggcccccacccatgattgtgcccacagcctttgtgcctgcccctcctgtggcccctgtgcctgccccagcccccatgcctcctgtgcaccccccaccacccatggaggatgagcccaccagcaagaagctgaagacagaggacagcctgatgcctgaggaggagttcctgcggagaaataaaggacctgtgtccatcaaggtgcaggtgcccaacatgcaggacaagacagagtggaagctgaatggccaggtgctggtgttcaccctgcccctgacagaccaggtgtctgtcatcaaggtgaagatccacgaggccaccggcatgcctgctgggaagcagaagctgcagtatgagggcatcttcatcaaggacagcaacagcctggcctactacaacatggccaacggggccgtcatccacctggccctgaaggagcggggcggcaggaagaagtag

SEQ ID NO: 171525 - DNA, 2073 bp, synthetic construct
  misc_feature 1..2073: note = Description of Artificial Sequence: Synthetic coding sequence
  source 1..2073: mol_type = other DNA
atgaccctgaccatgcccaccacagccatccccaaggtgatgcagcagcagcagcagaccacccagcagcagctgccccagaaggtgcaggcccaggtgatccaggagaccatcgtgcccaaggagcccccacctgagtttgagttcatcgctgaccccccatccatcagcgcctttgacctggatgtggtgaagctgacagcccagtttgtggccagaaatggccggcagttcctgacccagctgatgcagaaggagcagaggaactaccagtttgacttcctgcggccccagcacagcctcttcaactacttcaccaagctggtggagcagtacaccaagatcctgatcccccccaagggcctcttcagcaagctgaagaaggaggccgagaacccccgggaggtgctggaccaggtgtgctacagagtggagtgggccaagttccaggagcgggagaggaagaaggaggaggaggagaaggagaaggagcgggtggcctatgcccagattgactggcatgactttgtggtggtggagaccgtggacttccagcccaatgagcagggcaacttccccccacccaccaccccagaggagctgggcgcccgcatcctgatccaggagagatatgagaagtttggagagagcgaggaggtggagatggaggtggagagtgatgaagaagatgacaagcaggagaaggccgaggagccccccagccagctggaccaggacacccaggtgcaggacatggatgagggcagtgatgatgaggaggagggccagaaggtgcccccacctcctgagacccccatgcccccacccctgccccccaccccagaccaggtgattgtgaggaaggactatgaccccaaggccagcaagcccctgcccccagccccagccccagatgagtacctggtgagccccatcactggagagaagatcccagccagcaagatgcaggagcacatgagaattggcctgctggacccccgctggctggagcagagggacaggagcatccgggagaagcagagtgatgatgaggtgtatgcccctggcctggacatcgagagcagcctgaagcagctggccgagaggagaacagacatcttcggcgtggaggagacagccatcggcaagaagattggagaggaggagatccagaagccagaggagaaggtgacctgggatggccacagcggctccatggcccggacccagcaggccgcccaggccaacatcaccctgcaggagcagatcgaggccatccacaaggccaagggcctggtgcctgaagatgacaccaaggagaagattggccccagcaagcccaatgagatcccccagcagcccccaccacccagcagcgccaccaacatccccagcagcgccccacccatcacctctgtgccccggccccccaccatgcctcctcctgtgaggaccaccgtggtgtctgctgtgcctgtgatgcccaggcctcccatggcctctgtggtgcggctgcccccaggctctgtgattgcccccatgccacccatcatccacgccccccgcatcaacgtggtgcccatgcctccttctgccccacccatcatggccccccggcccccacccatgattgtgcccacagcctttgtgcctgcccctcctgtggcccctgtgcctgccccagcccccatgcctcctgtgcaccccccaccacccatggaggatgagcccaccagcaagaagctgaagacagaggacagcctgatgcctgaggaggagttcctgcggagaaataaaggacctgtgtccatcaaggtgcaggtgcccaacatgcaggacaagacagagtggaagctgaatggccaggtgctggtgttcaccctgcccctgacagaccaggtgtctgtcatcaaggtgaagatccacgaggccaccggcatgcctgctgggaagcagaagctgcagtatgagggcatcttcatcaaggacagcaacagcctggcctactacaacatggccaacggggccgtcatccacctggccctgaaggagcggggcggcaggaagaagtag

SEQ ID NO: 171526 - DNA, 900 bp, synthetic construct
  misc_feature 1..900: note = Description of Artificial Sequence: Synthetic coding sequence
  source 1..900: mol_type = other DNA
atggacctgtctgagctggagcgggacaacacaggccgctgccgcctgagcagccctgtgcctgctgtgtgcaggaaggagccctgtgtgctgggcgtggatgaggccggccggggccctgtgctgggccccatggtgtatgccatctgctactgccccctgccccggctggccgacctggaggccctgaaggtggccgacagcaagaccctgctggagagcgagcgggagcggctgtttgccaagatggaggacacagactttgtgggctgggccctggatgtgctgagccccaacctgatcagcacctccatgctgggccgggtgaagtacaacctgaacagcctgagccatgacacagccaccggcctcatccagtatgccctggaccagggcgtgaatgtgacccaggtgtttgtggacacagtgggcatgcctgagacctaccaggcccggctgcagcagagcttccctggcatcgaggtgacagtgaaggccaaggcagatgccctgtaccctgtggtgtctgctgccagcatctgtgccaaggtggcccgggaccaggccgtgaagaagtggcagtttgtggagaagctgcaggacctggacacagattatggcagcggctacccaaatgaccccaagaccaaggcctggctgaaggagcacgtggagcctgtgtttggcttcccccagtttgtgcgcttctcctggaggacagcccagaccatcctggagaaggaggccgaggatgtgatctgggaggacagcgccagcgagaaccaggagggcctgaggaagatcaccagctacttcctgaatgaaggcagccaggcccggcccaggagcagccaccgctacttcctggagcggggcctggagagcgccaccagcctgtag

SEQ ID NO: 171527 - DNA, 3915 bp, synthetic construct
  misc_feature 1..3915: note = Description of Artificial Sequence: Synthetic coding sequence
  source 1..3915: mol_type = other DNA
atggccaagatcgccaagacccatgaagatattgaggcccagatccgggagatccagggcaagaaggccgccctggatgaggcccagggcgtgggcctggacagcacaggctactatgaccaggagatctacggcggcagtgacagcagatttgctggctacgtgaccagcattgctgccacagagctggaggatgatgatgatgactacagcagcagcaccagcctgctgggccagaagaagccaggctaccacgcccctgtggccctgctgaatgacatcccccagagcacagagcagtatgacccctttgctgagcacaggcctcccaagattgctgaccgggaggatgagtacaagaagcacaggaggaccatgatcatcagccctgagcggctggacccctttgctgatggcggcaagaccccagaccccaagatgaatgcccggacctacatggatgtgatgagggagcagcacctgaccaaggaggagcgggagatccggcagcagctggccgagaaggccaaggccggggagctgaaggtggtgaatggagctgctgccagccagccccccagcaagaggaagaggcgctgggaccagacagctgaccagacccctggggccacccccaagaagctgagctcctgggaccaggccgagaccccaggccacacccccagcctgcgctgggatgagaccccaggccgggccaagggcagcgagacccctggggccaccccaggcagcaagatctgggaccccacccccagccacaccccagctggagctgccaccccaggccgcggggacaccccaggccacgccaccccaggccatggaggagccaccagcagcgccaggaagaaccgctgggatgagacccccaagacagagcgggacaccccaggccacggcagcggctgggccgagacccccaggacagacagaggaggagacagcattggagagacccccacccctggggccagcaagaggaagagccgctgggatgagaccccagccagccagatgggcggcagcacccctgtgctgaccccaggcaagacccccatcggcaccccagccatgaacatggccacccccaccccaggccacatcatgtccatgaccccagagcagctgcaggcctggcgctgggagcgggagattgatgaaagaaaccggcccctgagtgatgaggagctggatgccatgtttcctgagggctacaaggtgctgcccccacctgctggctacgtgcccatccgcaccccagccaggaagctgacagccacccccacccccctgggcggcatgacaggcttccacatgcagacagaggacaggaccatgaagtctgtgaatgaccagcccagcggcaacctgcccttcctgaagccagatgacatccagtactttgacaagctgctggtggatgtggatgagagcaccctgagccctgaggagcagaaggagaggaagatcatgaagctgctgctgaagatcaagaatggcaccccacccatgaggaaggccgccctgcggcagatcacagacaaggcccgggagtttggagctggccccctcttcaaccagatcctgcccctgctgatgagccccaccctggaggaccaggagcggcacctgctggtgaaggtgattgaccgcatcctgtacaagctggatgacctggtgcggccctacgtgcacaagatcctggtggtgattgagcccctgctgattgatgaggactactatgcccgggtggagggccgggagatcatcagcaacctggccaaggccgccggcctggccaccatgatcagcaccatgaggccagacatcgacaacatggatgaatatgtgaggaacaccacagcccgggcctttgctgtggtggccagcgccctgggcatccccagcctgctgcccttcctgaaggctgtgtgcaagagcaagaagtcctggcaggcccggcacacaggcatcaagatcgtgcagcagatcgccatcctgatgggctgtgccatcctgccccacctgcggagcctggtggagatcatcgagcacggcctggtggatgagcagcagaaggtgaggaccatcagcgccctggccatcgccgccctggccgaggccgccaccccctatggaattgagagctttgacagcgtgctgaagcccctgtggaagggcatccggcagcaccggggcaagggcctggccgccttcctgaaggccatcggctacctgatccccctgatggatgctgaatatgccaactactacacccgggaggtgatgctgatcctgatccgggagttccagagcccagatgaggagatgaagaagatcgtgctgaaggtggtgaagcagtgctgcggcacagatggagtggaggccaactacatcaagacagagatcctgccccccttcttcaagcacttctggcagcacaggatggccctggacagaagaaactaccggcagctggtggacaccaccgtggagctggccaacaaggtgggcgctgctgagatcatcagcagaattgtggatgacctgaaggatgaagctgagcagtacaggaagatggtgatggagaccatcgagaagatcatgggcaacctgggcgctgctgacatcgaccacaagctggaggagcagctgattgatggcatcctgtatgccttccaggagcagaccacagaggacagcgtgatgctgaatggcttcggcaccgtggtgaatgccctgggcaagagggtgaagccctacctgccccagatctgtggcaccgtgctgtggaggctgaacaacaagagcgccaaggtgcggcagcaggccgctgacctgatcagcaggacagctgtggtgatgaagacctgccaggaggagaagctgatgggccacctgggcgtggtgctgtatgagtacctgggggaggagtacccagaggtgctgggcagcatcctgggcgccctgaaggccatcgtgaatgtcatcggcatgcacaagatgaccccacccatcaaggacctgctgccccggctgacccccatcctgaagaacagacatgagaaggtgcaggagaactgcatcgacctggtgggcagaattgctgacagaggagcagaatatgtgtctgcccgggagtggatgaggatctgctttgagctgctggagctgctgaaggcccacaagaaggccatccggcgggccaccgtgaacaccttcggctacatcgccaaggccatcggcccccatgatgtgctggccaccctgctgaacaacctgaaggtgcaggagcggcagaacagagtgtgcaccaccgtggccatcgccatcgtggccgagacctgcagccccttcaccgtgctgcctgccctgatgaatgagtacagagtgcctgagctgaatgtgcagaatggagtgctgaagagcctgtccttcctgtttgagtacatcggggagatgggcaaggactacatctatgctgtgacccccctgctggaggatgccctgatggaccgggacctggtgcaccggcagacagccagcgctgtggtgcagcacatgagcctgggcgtgtatggcttcggctgtgaggacagcctgaaccacctgctgaactacgtgtggcccaacgtgtttgagaccagcccccacgtgatccaggccgtgatgggcgccctggagggcctgcgggtggccatcggcccctgcaggatgctgcagtactgcctgcagggcctcttccacccagccaggaaggtgagagatgtgtactggaagatctacaacagcatctacatcggcagccaggatgccctgattgcccactacccccgcatctacaatgatgacaagaacacctacatccgctatgagctggactacatcctgtag

SEQ ID NO: 171528 - DNA, 435 bp, synthetic construct
  misc_feature 1..435: note = Description of Artificial Sequence: Synthetic coding sequence
  source 1..435: mol_type = other DNA
atggccaagatcgccaagacccatgaagatattgaggcccagatccgggagatccagggcaagaaggccgccctggatgaggcccagggcgtgggcctggacagcacaggctactatgaccaggagatctacggcggcagtgacagcagatttgctggctacgtgaccagcattgctgccacagagctggaggatgatgatgatgactacagcagcagcaccagcctgctgggccagaagaagccaggctaccacgcccctgtggccctgctgaatgacatcccccagagcacagagcagtatgacccctttgctgagcacaggcctcccaagattgctgaccgggaggatgagtacaagaagcacaggaggaccatgatcatcagccctgagcggctggacccctttgctgatggcttctacagcgctgcctag

SEQ ID NO: 171529 - DNA, 435 bp, synthetic construct; identical to SEQ ID NO: 171528
  misc_feature 1..435: note = Description of Artificial Sequence: Synthetic coding sequence
  source 1..435: mol_type = other DNA

SEQ ID NO: 171530 - DNA, 2688 bp, synthetic construct
  misc_feature 1..2688: note = Description of Artificial Sequence: Synthetic coding sequence
  source 1..2688: mol_type = other DNA
atggccacagagcaccctgagccccccaaggccgagctgcagctgcccccacctcctcctcctggccactacggggcctgggccgcccaggagctgcaggccaagctggccgagattggagcccccatccagggcaaccgggaggagctggtggagcggctgcagagctacacccggcagacaggaattgtgctgaacagacctgtgctgcggggagaagatggagacaaggccgcccccccacccatgtctgcccagctgcccggcatccccatgcctcctccacccctgggcctgccccccctgcagcccccacctcctcctcctcctcctcctcctggcctgggcctgggcttccccatggcccacccccccaacctgggccccccaccacccctgcgggtgggggagcctgtggccctgtctgaggaggagcggctgaagctggcccagcagcaggccgccctgctgatgcagcaggaggagcgggccaagcagcagggcgaccacagcctgaaggagcacgagctgctggagcagcagaagagagctgctgtgctgctggagcaggagcggcagcaggagatcgccaagatgggcacccctgtgccccggcccccccaggacatgggccagattggagtgaggacccccctgggcccccgggtggccgcccctgtgggccctgtgggccccacccccaccgtgctgcccatgggcgcccctgtgccccggccccggggccccccacctcctcctggagatgagaaccgggagatggatgaccccagcgtgggccccaagatcccccaggccctggagaagatcctgcagctgaaggagagccggcaggaggagatgaacagccagcaggaggaggaggagatggagacagatgcccggagcagcctgggccagagcgccagcgagacagaagaagatactgtgtctgtgtccaagaaggagaagaacaggaagagaagaaacaggaagaagaagaagaagccccagagggtgcggggcgtgagcagcgagagcagcggggaccgggagaaggacagcaccaggagccggggcagtgacagccctgctgctgatgtggagattgaatatgtgacagaggagcctgagatctatgagcccaacttcatcttcttcaagaggatctttgaggccttcaagctgacagatgatgtgaagaaggagaaggagaaggagcctgagaagctggacaagctggagaacagcgctgcccccaagaagaagggctttgaggaggagcacaaggacagtgatgatgacagcagtgatgatgagcaggagaagaagccagaggcccccaagctgagcaagaagaagctgcggaggatgaaccgcttcaccgtggccgagctgaagcagctggtggcccggccagatgtggtggagatgcatgatgtgacagcccaggaccccaagctgctggtgcacctgaaggccaccagaaattctgtgcctgtgcccaggcactggtgcttcaagaggaagtacctgcagggcaagaggggcatcgagaagcccccatttgagctgcctgacttcatcaagaggacaggcatccaggagatgagggaggccctgcaggagaaggaggagcagaagaccatgaagagcaagatgagggagaaggtgcggcccaagatgggcaagattgacatcgactaccagaagctgcatgatgccttcttcaagtggcagaccaagcccaagctgaccatccatggagacctgtactatgagggcaaggagtttgagacccggctgaaggagaagaagccaggggacctgagtgatgagctgcgcatcagcctgggcatgcctgtgggccccaatgcccacaaggtgcccccaccctggctgattgccatgcagagatatggccccccacccagctaccccaacctgaagatccctggcctgaacagccccatccctgagagctgcagctttggctaccacgccggcggctggggcaagccccctgtggatgagaccgggaagcccctgtatggagatgtgtttggcaccaatgctgctgagttccagaccaagacagaggaggaggagattgacaggaccccctggggcgagctggagcccagtgatgaggagagcagcgaggaggaggaggaggaggagagtgatgaggacaagccagatgaaacaggcttcatcaccccagctgacagcggcctcatcacccctgggggcttcagctctgtgcctgctggcatggagaccccagagctgattgagctgaggaagaagaagattgaggaggccatggatggcagcgagaccccccagctgttcaccgtgctgcctgagaagaggacagccaccgtgggcggggccatgatgggcagcacccacatctatgacatgagcacagtgatgagcaggaaaggacctgcccctgagctgcagggcgtggaggtggccctggcccctgaggagctggagctggaccccatggccatgacccagaagtatgaggagcacgtgcgggagcagcaggcccaggtggagaaggaggacttcagtgacatggtggccgagcacgccgccaagcagaagcagaagaagaggaaggcccagccccaggacagcagaggaggcagcaagaagtacaaggagttcaagttctag

SEQ ID NO: 171531 - DNA, 2400 bp, synthetic construct
  misc_feature 1..2400: note = Description of Artificial Sequence: Synthetic coding sequence
  source 1..2400: mol_type = other DNA
gccaagatggccacagagcaccctgagccccccaaggccgagctgcagctgcccccacctcctcctcctggccactacggggcctgggccgcccaggagctgcaggccaagctggccgagattggagcccccatccagggcaaccgggaggagctggtggagcggctgcagagctacacccggcagacaggaattgtgctgaacagacctgtgctgcggggagaagatggagacaaggccgcccccccacccatgtctgcccagctgcccggcatccccatgcctcctccacccctgggcctgccccccctgcagcccccacctcctcctcctcctcctcctcctggcctgggcctgggcttccccatggcccacccccccaacctgggccccccaccacccctgcgggtgggggagcctgtggccctgtctgaggaggagcggctgaagctggcccagcagcaggccgccctgctgatgcagcaggaggagcgggccaagcagggcgaccacagcctgaaggagcacgagctgctggagcagcagaagagagctgctgtgctgctggagcaggagcggcagcaggaggaggaggagatggagacagatgcccggagcagcctgggccagagcgccagcgagacagaagaagatactgtgtctgtgtccaagaaggagaagaacaggaagagaagaaacaggaagaagaagaagaagccccagagggtgcggggcgtgagcagcgagagcagcggggaccgggagaaggacagcaccaggagccggggcagtgacagccctgctgctgatgtggagattgaatatgtgacagaggagcctgagatctatgagcccaacttcatcttcttcaagaggatctttgaggccttcaagctgacagatgatgtgaagaaggagaaggagaaggagcctgagaagctggacaagctggagaacagcgctgcccccaagaagaagggctttgaggaggagcacaaggacagtgatgatgacagcagtgatgatgagcaggagaagaagccagaggcccccaagctgagcaagaagaagctgcggaggatgaaccgcttcaccgtggccgagctgaagcagctggtggcccggccagatgtggtggagatgcatgatgtgacagcccaggaccccaagctgctggtgcacctgaaggccaccagaaattctgtgcctgtgcccaggcactggtgcttcaagaggaagtacctgcagggcaagaggggcatcgagaagcccccatttgagctgcctgacttcatcaagaggacaggcatccaggagatgagggaggccctgcaggagaaggaggagcagaagaccatgaagagcaagatgagggagaaggtgcggcccaagatgggcaagattgacatcgactaccagaagctgcatgatgccttcttcaagtggcagaccaagcccaagctgaccatccatggagacctgtactatgagggcaaggagtttgagacccggctgaaggagaagaagccaggggacctgagtgatgagctgcgcatcagcctgggcatgcctgtgggccccaatgcccacaaggtgcccccaccctggctgattgccatgcagagatatggccccccacccagctaccccaacctgaagatccctggcctgaacagccccatccctgagagctgcagctttggctaccacgccggcggctggggcaagccccctgtggatgagaccgggaagcccctgtatggagatgtgtttggcaccaatgctgctgagttccagaccaagacagaggaggaggagattgacaggaccccctggggcgagctggagcccagtgatgaggagagcagcgaggaggaggaggaggaggagagtgatgaggacaagccagatgaaacaggcttcatcaccccagctgacagcggcctcatcacccctgggggcttcagctctgtgcctgctggcatggagaccccagagctgattgagctgaggaagaagaagattgaggaggccatggatggcagcgagaccccccagctgttcaccgtgctgcctgagaagaggacagccaccgtgggcggggccatgatgggcagcacccacatctatgacatgagcacagtgatgagcaggaaaggacctgcccctgagctgcagggcgtggaggtggccctggcccctgaggagctggagctggaccccatggccatgacccagaagtatgaggagcacgtgcgggagcagcaggcccaggtggagaaggaggacttcagtgacatggtggccgagcacgccgccaagcagaagcagaagaagaggaaggcccagccccaggacagcagaggaggcagcaagaagtacaaggagttcaagttctag

SEQ ID NO: 171532 - DNA, 3654 bp, synthetic construct
  misc_feature 1..3654: note = Description of Artificial Sequence: Synthetic coding sequence
  source 1..3654: mol_type = other DNA
atgttcctgtacaacctgaccctgcagagggccaccggcatcagctttgccatccacggcaacttcagcggcaccaagcagcaggagatcgtggtgtcccggggcaagatcctggagctgctgcggccagaccccaacacaggcaaggtgcacaccctgctgactgtggaggtgtttggagtcatccgcagcctgatggccttccggctgactggaggcaccaaggactacatcgtggtgggcagtgacagcggcagaattgtcatcctggagtaccagcccagcaagaacatgtttgagaagatccaccaggagaccttcggcaagagcggctgcagaagaattgtgcccggccagttcctggccgtggaccccaagggccgggctgtgatgatcagcgccatcgagaagcagaagctggtgtacatcctgaacagagatgctgctgcccggctgaccatcagcagccccctggaggcccacaaggccaacaccctggtgtaccacgtggtgggcgtggatgtgggctttgagaaccccatgtttgcctgcctggagatggactatgaggaggccgacaatgaccccactggagaggccgccgccaacacccagcagaccctgaccttctatgagctggacctgggcctgaaccacgtggtgaggaagtacagcgagcccctggaggagcacggcaacttcctgatcaccgtgcctgggggcagtgatggccccagcggcgtgctgatctgcagcgagaactacatcacctacaagaactttggagaccagcctgacatccgctgccccatccccaggagaagaaatgacctggatgatcctgagcggggcatgatctttgtgtgcagcgccacccacaagaccaagtccatgttcttcttcctggcccagacagagcagggcgacatcttcaagatcaccctggagacagatgaggacatggtgacagagatccggctgaagtactttgacacagtgcctgtggccgccgccatgtgtgtgctgaagacaggcttcctgtttgtggccagcgagtttggaaaccactacctgtaccagatcgcccacctgggagatgatgatgaggagcctgagttcagcagcgccatgcccctggaggagggggacaccttcttcttccagccccggcccctgaagaacctggtgctggtggatgagctggacagcctgagccccatcctcttctgccagattgctgacctggccaatgaagacaccccccagctgtatgtggcctgtggccggggccccaggagcagcctgcgggtgctgcggcacggcctggaggtgtctgagatggctgtgtctgagctgcccggcaaccccaatgctgtgtggacagtgagaagacacattgaagatgaatttgatgcctacatcatcgtgtcctttgtgaatgccaccctggtgctgagcattggagagaccgtggaggaggtgacagattctggcttcctgggcaccacccccaccctgagctgcagcctgctgggagatgatgccctggtgcaggtgtacccagatggcatccgccacatccgggctgacaagagggtgaatgagtggaagaccccaggcaagaagaccatcgtgaagtgtgctgtgaaccagaggcaggtggtgattgccctgactggaggagagctggtgtactttgagatggaccccagcggccagctgaatgagtacacagagaggaaggagatgtctgcagatgtggtgtgcatgagcctggccaacgtgcccccaggagagcagaggagccgcttcctggccgtgggcctggtggacaacacagtgcgcatcatcagcctggaccccagcgactgcctgcagcccctgtccatgcaggccctgcctgcccagcctgagagcctgtgcatcgtggagatgggcggcacagagaagcaggatgagctgggggagcggggcagcatcggcttcctgtacctgaacatcggcctgcagaatggagtgctgctgaggacagtgctggaccctgtgactggagacctgagtgacaccaggacccgctacctgggcagcaggcctgtgaagctgttccgggtgaggatgcagggccaggaggccgtgctggccatgagcagccgctcctggctgagctacagctaccagagccgcttccacctgacccccctgtcctatgagaccctggagtttgccagcggctttgccagcgagcagtgcccagagggcatcgtggccatcagcaccaacaccctgcgcatcctggccctggagaagctgggcgctgtgttcaaccaggtggccttccccctgcagtacacccccaggaagtttgtgatccaccctgagagcaacaacctgatcatcatcgagacagaccacaatgcctacacagaggccaccaaggcccagaggaagcagcagatggccgaggagatggtggaggccgctggagaagatgagcgggagctggccgctgagatggccgccgccttcctgaatgaaaacctgcctgagagcatctttggagcccccaaggctggaaatggccagtgggccagcgtcatccgggtgatgaaccccatccagggcaacaccctggacctggtgcagctggagcagaatgaagctgccttctctgtggccgtgtgccgcttcagcaacacaggagaggactggtacgtgctggtgggcgtggccaaggacctgatcctgaaccccaggtctgtggccggcggctttgtgtacacctacaagctggtgaacaatggagagaagctggagttcctgcacaagacccctgtggaggaggtgcctgctgccatcgcccccttccagggccgggtgctgattggagtgggcaagctgctgcgggtgtatgacctgggcaagaagaagctgctgaggaaatgtgagaacaagcacatcgccaactacatcagcggcatccagaccatcggccaccgggtgattgtgtctgatgtgcaggagagcttcatctgggtgcgctacaagagaaatgaaaaccagctgatcatctttgctgatgacacctacccccgctgggtgaccacagccagcctgctggactatgacacagtggccggggctgacaagtttggaaacatctgtgtggtgcggctgccccccaacaccaatgatgaggtggatgaggaccccactggaaacaaggccctgtgggaccggggcctgctgaatggagccagccagaaggccgaggtgatcatgaactaccacgtgggggagaccgtgctgagcctgcagaagaccaccctcatccctgggggcagcgagagcctggtgtacaccaccctgagcggcggcatcggcatcctggtgcccttcaccagccatgaggaccatgacttcttccagcacgtggagatgcacctgcggtctgagcacccccccctgtgtggccgggaccacctgtccttccgcagctactacttccctgtgaagaatgtgattgatggagacctgtgtgagcagttcaacagcatggagcccaacaagcagaagaatgtgtctgaggagctggacaggaccccacctgaggtgtccaagaagctggaggacatccgcaccaggtatgccttctag

SEQ ID NO: 171533 - DNA, 828 bp, synthetic construct
  misc_feature 1..828: note = Description of Artificial Sequence: Synthetic coding sequence
  source 1..828: mol_type = other DNA
atgttcctgtacaacctgaccctgcagagggccaccggcatcagctttgccatccacggcaacttcagcggcaccaagcagcaggagatcgtggtgtcccggggcaagatcctggagctgctgcggccagaccccaacacaggcaaggtgcacaccctgctgactgtggaggtgtttggagtcatccgcagcctgatggccttccggctgactggaggcaccaaggactacatcgtggtgggcagtgacagcggcagaattgtcatcctggagtaccagcccagcaagaacatgtttgagaagatccaccaggagaccttcggcaagagcggctgcagaagaattgtgcccggccagttcctggccgtggaccccaagggccgggctgtgatgatcagcgccatcgagaagcagaagctggtgtacatcctgaacagagatgctgctgcccggctgaccatcagcagccccctggaggcccacaaggccaacaccctggtgtaccacgtggtgggcgtggatgtgggctttgagaaccccatgtttgcctgcctggagatggactatgaggaggccgacaatgaccccactggagaggccgccgccaacacccagcagaccctgaccttctatgagctggacctgggcctgaaccacgtggtgaggaagtacagcgagcccctggaggagcacggcaacttcctgatcaccgtgcctgggggcagtgatggccccagcggcgtgctgaacctgagcccccccttccccaaggccatcccagccctgatctgcctggacagccctgtgtacttctgcacccacccctag

SEQ ID NO: 171534 - DNA, 1275 bp, synthetic construct
  misc_feature 1..1275: note = Description of Artificial Sequence: Synthetic coding sequence
  source 1..1275: mol_type = other DNA
atggctgctggccccatcagcgagaggaaccaggatgccaccgtgtatgtgggcggcctggatgagaaggtgtctgagcccctgctgtgggagctgttcctgcaggccggccctgtggtgaacacccacatgcccaaggacagagtgacaggccagcaccagggctacggctttgtggagttcctgtctgaagaagatgctgactatgccatcaagatcatgaacatgatcaagctgtatggcaagcccatccgggtgaacaaggccagcgcccacaacaagaacctggatgtgggcgccaacatcttcatcggcaacctggaccctgagattgatgagaagctgctgtatgacaccttcagcgcctttggagtcatcctgcagacccccaagatcatgagggaccctgacaccggcaacagcaagggctacgccttcatcaactttgccagctttgatgccagtgatgctgccatcgaggccatgaatggccagtacctgtgcaaccggcccatcaccgtgtcctatgccttcaagaaggacagcaaaggagagagacatggcagcgctgctgagcggctgctggccgcccagaaccccctgagccaggccgaccggccccaccagctgtttgctgatgcccctcctcctccttctgcccccaaccctgtggtgagcagcctgggcagcggcctgcccccacctggcatgcctcctcctggcagcttccccccacctgtgcccccacctggggccctgcccccaggcatccccccagccatgcctcctccacccatgcctcctggagctgctggccacggccccccatctgctggcaccccaggagctggccaccctggccacggccacagccacccccaccccttccccccaggcggcatgccccaccctggcatgagccagatgcagctggcccaccacggcccccacggcctgggccacccccacgccggccccccaggcagcggcggccagcccccacccaggcctcctcctggcatgccccaccctggccccccacccatgggcatgccaccccggggcccccccttcggcagccccatgggccaccctggccccatgcctcctcatggcatgaggggccccccacccctgatgcctcctcatggctacacaggccccccccggcccccaccctacggctaccagaggggccccctgcccccaccccggcccaccccccggccccctgtgcccccccggggccccctgcggggccccctgccccagtag

SEQ ID NO: 171535 - DNA, 573 bp, synthetic construct
  misc_feature 1..573: note = Description of Artificial Sequence: Synthetic coding sequence
  source 1..573: mol_type = other DNA
atgcccaaggacagagtgacaggccagcaccagggctacggctttgtggagttcctgtctgaggaggatgctgactatgccatcaagatcatgaacatgatcaagctgtatggcaagcccatccgggtgaacaaggccagcgcccacaacaagaacctggatgtgggcgccaacatcttcatcggcaacctggaccctgagattgatgagaagctgctgtatgacaccttcagcgccttcggggtcatcctgcagacccccaagatcatgagggaccctgacaccggcaacagcaagggctacgccttcatcaactttgccagctttgatgccagtgatgctgccatcgaggccatgaatggccagtacctgtgcaaccggcccatcaccgtgtcctatgccttcaagaaggacagcaagggggagcggcacggcagcgctgctgagcggctgctggccgcccagaaccccctgagccaggccgaccggccccaccagctgtttgctgatgcccctcctccacccagcgcccccaaccctgtggtgagcagcctgggcagcggcctgccctag

SEQ ID NO: 171536 - DNA, 2124 bp, synthetic construct
  misc_feature 1..2124: note = Description of Artificial Sequence: Synthetic coding sequence
  source 1..2124: mol_type = other DNA
atgagccgggaccgcttccgcagccggggcggcggcggcggcggcttccaccggcggggcggcggcggcggccggggcggcctgcatgacttccgcagccccccacctggcatgggcctgaaccagaacagaggccccatgggccctggccctggccagagcggccccaagccacccatccccccacctccaccccaccagcagcagcagcagcccccaccccagcagcccccaccccagcagcccccaccccaccagcccccaccccacccccagccccaccagcagcagcagcccccacctccaccccaggacagcagcaagcctgtggtggcccagggccctggccctgcccctggggtgggcagcgcccccccagccagcagcagcgcccccccagccaccccacccaccagcggggcccctcctggcagcggccctggccccacccccaccccacctcctgctgtgaccagcgcccctcctggggcccccccacccaccccacccagcagcggcgtgcccaccaccccaccccaggccggcggccccccacctcctcctgctgctgtgcccggccctggccctggccccaagcagggccctggccctgggggccccaagggcggcaagatgcctgggggccccaagccaggcggcggccctggcctgagcaccccaggcggccaccccaagccaccccacagaggaggaggagagccccggggcggccggcagcaccaccccccctaccaccagcagcaccaccagggccccccacctgggggccctgggggccgctctgaggagaagatcagtgacagcgagggcttcaaggccaacctgagcctgctgcggcggcctggagagaagacctacacccagcgctgccgcctgtttgtgggcaacctgcctgctgacatcacagaagatgagttcaagaggctgtttgccaagtacggggagcctggagaggtgttcatcaacaagggcaagggcttcggcttcatcaagctggagagccgggccctggccgagatcgccaaggccgagctggatgacacccccatgaggggccggcagctgcgggtgcgctttgccacccacgccgccgccctgtctgtgaggaacctgagcccctacgtgtccaatgagctgctggaggaggccttcagccagtttggccccatcgagagagctgtggtgattgtggatgaccggggccgcagcactggaaaaggaattgtggagtttgccagcaagccagctgccaggaaggcctttgagcgctgcagcgagggcgtcttcctgctgaccaccacccccaggcctgtgattgtggagcccctggagcagctggatgatgaagatggcctgcctgagaagctggcccagaagaaccccatgtaccagaaggagcgggagaccccacccaggtttgcccagcacggcacctttgaatatgagtacagccagcgctggaagagcctggatgagatggagaagcagcagcgggagcaggtggagaagaacatgaaggatgccaaggacaagctggagagcgagatggaggatgcctaccacgagcaccaggccaacctgctgcggcaggacctgatgaggcggcaggaggagctgcggaggatggaggagctgcacaaccaggagatgcagaagaggaaggagatgcagctgcggcaggaggaggagaggagaagaagagaggaggagatgatgatccggcagcgggagatggaggagcagatgaggcggcagcgggaggagagctacagcaggatgggctacatggacccccgggagcgggacatgaggatgggcggcggcggggccatgaacatgggagacccctacggcagcggcggccagaagttcccccccctgggcggcggcggcggcatcggctatgaggccaaccctggggtgcccccagccaccatgagcggctccatgatgggcagtgacatgaggacagaaagatttggccagggcggggccggccctgtgggcggccagggcccccggggcatgggccctggcaccccagctggctacggccggggccgggaggagtatgagggccccaacaagaagccccgcttctag

SEQ ID NO: 171537 - DNA, 1875 bp, synthetic construct
  misc_feature 1..1875: note = Description of Artificial Sequence: Synthetic coding sequence
  source 1..1875: mol_type = other DNA
atgaacagcggcggcggcttcggcctgggcctgggcttcggcctgacccccaccagcgtcatccaggtgaccaacctgagcagcgctgtgaccagcgagcagatgaggaccctcttctccttcctgggggagattgaggagctgcggctgtaccccccagacaatgcccccctggccttcagcagcaaggtgtgctacgtgaagttccgggaccccagctctgtgggcgtggcccagcacctgaccaacacagtgttcatcgaccgggccctgattgtggtgccctgtgccgagggcaagatccctgaggagagcaaggccctgagcctgctggccccagcccccaccatgaccagcctgatgcctggggccggcctgctgcccatccccacccccaaccccctgaccaccctgggcgtgtccctgagcagcctgggcgccatcccagctgctgccctggaccccaacatcgccaccctgggggagatcccccagccccccctgatgggaaatgtggaccccagcaagattgatgagatcagaagaacagtgtatgtgggcaacctgaacagccagaccaccacagctgaccagctgctggagttcttcaagcaggtgggggaggtgaagtttgtgaggatggctggagatgagacccagcccaccaggtttgcctttgtggagtttgctgaccagaacagcgtgccccgggccctggccttcaacggggtgatgtttggagaccggcccctgaagatcaaccacagcaacaatgccatcgtgaagcccccagagatgaccccccaggccgccgccaaggagctggaggaggtgatgaagagggtgcgggaggcccagagcttcatctctgctgccatcgagcctgagagcggcaagagcaatgaaaggaagggcggccgcagccgcagccacaccaggagcaagagccgcagcagcagcaagagccacagcaggaggaagaggagccagagcaagcacaggagccgcagccacaacagaagccgcagccggcagaaggacagaagaagaagcaagagcccccacaagaagaggagcaagagccgggagaggaggaagagccgcagccgcagccacagccgggacaagaggaaggacacccgggagaagatcaaggagaaggagcgggtgaaggagaaggaccgggagaaggagcgggagcgggagaaggagcgggagaaggagaaggagcggggcaagaacaaggaccgggacaaggagcgggagaaggaccgggagaaggacaaggagaaggaccgggagcgggagcgggagaaggagcacgagaaggaccgggacaaggagaaggagaaggagcaggacaaggagaaggagcgggagaaggacaggagcaaggagattgatgagaagaggaagaaggacaagaagagcaggaccccacccaggagctacaatgccagccgccgcagccgcagcagcagccgggagaggagaagaagaagaagccgcagcagcagccgcagccccaggaccagcaagaccatcaagaggaagagcagccgcagccccagccccaggagcaggaacaagaaggacaagaagcgggagaaggagcgggaccacatcagcgagcggcgggagcgggagaggagcacctccatgaggaagagcagcaatgacagagatggcaaggagaagctggagaagaacagcaccagcctgaaggagaaggagcacaacaaggagccagacagctctgtgtccaaggaggtggatgacaaggatgcccccaggacagaggagaacaagatccagcacaatggaaactgccagctgaatgaggagaacctgagcaccaagacagaagctgtgtag

SEQ ID NO: 171538 - DNA, 1527 bp, synthetic construct
  misc_feature 1..1527: note = Description of Artificial Sequence: Synthetic coding sequence
  source 1..1527: mol_type = other DNA
atgaccagcctgatgcctggggccggcctgctgcccatccccacccccaaccccctgaccaccctgggcgtgtccctgagcagcctgggcgccatcccagctgctgccctggaccccaacatcgccaccctgggggagatcccccagccccccctgatgggaaatgtggaccccagcaagattgatgagatcagaagaacagtgtatgtgggcaacctgaacagccagaccaccacagctgaccagctgctggagttcttcaagcaggtgggggaggtgaagtttgtgaggatggctggagatgagacccagcccaccaggtttgcctttgtggagtttgctgaccagaacagcgtgccccgggccctggccttcaacggggtgatgtttggagaccggcccctgaagatcaaccacagcaacaatgccatcgtgaagcccccagagatgaccccccaggccgccgccaaggagctggaggaggtgatgaagagggtgcgggaggcccagagcttcatctctgctgccatcgagcctgagagcggcaagagcaatgaaaggaagggcggccgcagccgcagccacaccaggagcaagagccgcagcagcagcaagagccacagcaggaggaagaggagccagagcaagcacaggagccgcagccacaacagaagccgcagccggcagaaggacagaagaagaagcaagagcccccacaagaagaggagcaagagccgggagaggaggaagagccgcagccgcagccacagccgggacaagaggaaggacacccgggagaagatcaaggagaaggagcgggtgaaggagaaggaccgggagaaggagcgggagcgggagaaggagcgggagaaggagaaggagcggggcaagaacaaggaccgggacaaggagcgggagaaggaccgggagaaggacaaggagaaggaccgggagcgggagcgggagaaggagcacgagaaggaccgggacaaggagaaggagaaggagcaggacaaggagaaggagcgggagaaggacaggagcaaggagattgatgagaagaggaagaaggacaagaagagcaggaccccacccaggagctacaatgccagccgccgcagccgcagcagcagccgggagaggagaagaagaagaagccgcagcagcagccgcagccccaggaccagcaagaccatcaagaggaagagcagccgcagccccagccccaggagcaggaacaagaaggacaagaagcgggagaaggagcgggaccacatcagcgagcggcgggagcgggagaggagcacctccatgaggaagagcagcaatgacagagatggcaaggagaagctggagaagaacagcaccagcctgaaggagaaggagcacaacaaggagccagacagctctgtgtccaaggaggtggatgacaaggatgcccccaggacagaggagaacaagatccagcacaatggaaactgccagctgaatgaggagaacctgagcaccaagacagaagctgtgtag

SEQ ID NO: 171539 - DNA, 231 bp, synthetic construct
  misc_feature 1..231: note = Description of Artificial Sequence: Synthetic coding sequence
  source 1..231: mol_type = other DNA
atgaccagcctgatgcctggggccggcctgctgcccatccccacccccaaccccctgaccaccctgggcgtgtccctgagcagcctgggcgccatcccagctgctgccctggaccccaacatcgccaccctgggggagatcccccagccccccctgatgggaaatgtggaccccagcaagattgatgagatcagaagaacagtgtatgtgggcaacctgaacagccagtag

SEQ ID NO: 171540 - DNA, 1545 bp, synthetic construct
  misc_feature 1..1545: note = Description of Artificial Sequence: Synthetic coding sequence
  source 1..1545: mol_type = other DNA
atgaacagcggcggcggcttcggcctgggcctgggcttcggcctgacccccaccagcgtcatccaggtgaccaacctgagcagcgctgtgaccagcgagcagatgaggaccctcttctccttcctgggggagattgaggagctgcggctgtaccccccagacaatgcccccctggccttcagcagcaaggtgtgctacgtgaagttccgggaccccagctctgtgggcgtggcccagcacctgaccaacacagtgttcatcgaccgggccctgattgtggtgccctgtgccgagggcaagatccctgaggagagcaaggccctgagcctgctggccccagcccccaccatgaccagcctgatgcctggggccggcctgctgcccatccccacccccaaccccctgaccaccctgggcgtgtccctgagcagcctgggcgccatcccagctgctgccctggaccccaacatcgccaccctgggggagatcccccagccccccctgatgggaaatgtggaccccagcaagattgatgagatcagaagaacagtgtatgtgggcaacctgaacagccagaccaccacagctgaccagctgctggagttcttcaagcaggtgggggaggtgaagtttgtgaggatggctggagatgagacccagcccaccaggtttgcctttgtggagtttgctgaccagaacagcgtgccccgggccctggccttcaacggggtgatgtttggagaccggcccctgaagatcaaccacagcaacaatgccatcgtgaagcccccagagatgaccccccaggccgccgccaaggagctggaggaggtgatgaagagggtgcgggaggcccagagcttcatctctgctgccatcgagcctgagagcggcaagagcaatgaaaggaagggcggccgcagccgcagccacaccaggagcaagagccgcagcagcagcaagagccacagcaggaggaagaggagccagagcaagcacaggagccgcagccacaacagaagccgcagccggcagaaggacagaagaagaagcaagagcccccacaagaagaggagcaagagccgggagaggaggaagagccgcagccgcagccacagccgggacaagaggaaggacacccgggagaagatcaaggagaaggagcgggtgaaggagaaggaccgggagaaggagcgggagcgggagaaggagcgggagaaggagaaggagcggggcaagaacaaggaccgggacaaggagcgggagaaggaccgggagaaggacaaggagaaggaccgggagcgggagcgggagaaggagcacgagaaggaccgggacaaggagaaggagaaggagcaggacaaggagaaggagcgggagaaggacaggagcaaggagattgatgagaagaggaagaaggacaagaaccctgagcaccaccctggggtgaccatgcaccgggaggacctggtggtgcctgctgggaagggcgtgggcggcggggccggcgtgctgcctgaccggcaggagcaccagaagccctag

SEQ ID NO: 171541 - DNA, 213 bp, synthetic construct
  misc_feature 1..213: note = Description of Artificial Sequence: Synthetic coding sequence
  source 1..213: mol_type = other DNA
atgtctgagaagaagcagcctgtggacctgggcctgctggaggaggatgatgaatttgaggagttccctgctgaggactgggccggcctggatgaagatgaagatgcccacgtgtgggaggacaactgggatgatgacaacgtggaggatgacttcagcaaccagctgcgggcagagctggagaagcacggctacaagatggagaccagctag

SEQ ID NO: 171542 - DNA, 1077 bp, synthetic construct
  misc_feature 1..1077: note = Description of Artificial Sequence: Synthetic coding sequence
  source 1..1077: mol_type = other DNA
atggcctttgcccccatgggccctgaggccagcttctttgatgtgctggacagacaccgggagagcctgctggccgccctgcggcggggcggccgggagccccccaccggcggcagccggctggccagcagatttgaggacagcgtgggcctgcagatggtgagccactgcaccaccaggaagatcaagagtgacagccccaagagcgcccagaagttcagcctcatcctgaagatcctgtccatgatctacaagctggtgcagagcaacacctacgccaccaagagggacatctactacacagacagccagctgtttggaaaccagacagtggtggacaacatcatcaatgacatcagctgcatgctgaaggtgtccagaagaagcctgcacatcctgagcaccagcaagggcctgattgctggcaacctgcgctacattgaagaagatggcaccaaggtgaactgcacctgtggggccacagctgtggccgtgcccagcaacatccagggcatccggaacctggtgacagatgccaagtttgtgctgattgtggagaaggatgccaccttccagaggctgctggatgacaacttctgcaacaagctgagcccctgcatcatgatcaccgggaagggcgtgcctgacctgaacacccggctgctggtgaagaagctgtgggacaccttccacgtgcctgtgttcaccctggtggatgctgacccccatggaattgagatcatgtgcatctacaagtatggctccatgtccatgagctttgaggcccaccacctgactgtgcctgccatccgctggctgggcctgctgcccagcgacctgaagaggctgaatgtgcccaaggacagcctcatccccctgaccaagagggaccagatgaagctggacagcatcctgcggcggccctacgtgacctgccagcccttctggaggaaggagatggagatcatggctgacagcaagatgaaggccgagatccaggccctgaccttcctgagcagtgactacctgagccgggtgtacctgcccaacaagctgaagtttggaggctggatctag

SEQ ID NO: 171543 - DNA, 1065 bp, synthetic construct
  misc_feature 1..1065: note = Description of Artificial Sequence: Synthetic coding sequence
  source 1..1065: mol_type = other DNA
atggcctttgcccccatgggccctgaggccagcttctttgatgtgctggacagacaccgggagagcctgctggccgccctgcggcggggcggccgggagccccccaccggcggcagccggctggccagcagatttgaggacagcgtgggcctgcagatggtgagccactgcaccaccaggaagatcaagagtgacagccccaagagcgcccagaagttcagcctcatcctgaagatcctgtccatgatctacaagctggtgcagagcaacacctacgccaccaagagggacatctactacacagacagccagctgtttggaaaccagacagtggtggacaacatcatcaatgacatcagctgcatgctgaaggtgtccagaagaagcctgcacatcctgagcaccagcaagggcctgattgctggcaacctgcgctacattgaagaagatggcaccaaggtgaactgcacctgtggggccacagctgtggccgtgcccagcaacatccagggcatcagaaatgccaagtttgtgctgattgtggagaaggatgccaccttccagaggctgctggatgacaacttctgcaacaagctgagcccctgcatcatgatcaccgggaagggcgtgcctgacctgaacacccggctgctggtgaagaagctgtgggacaccttccacgtgcctgtgttcaccctggtggatgctgacccccatggaattgagatcatgtgcatctacaagtatggctccatgtccatgagctttgaggcccaccacctgactgtgcctgccatccgctggctgggcctgctgcccagcgacctgaagaggctgaatgtgcccaaggacagcctcatccccctgaccaagagggaccagatgaagctggacagcatcctgcggcggccctacgtgacctgccagcccttctggaggaaggagatggagatcatggctgacagcaagatgaaggccgagatccaggccctgaccttcctgagcagtgactacctgagccgggtgtacctgcccaacaagctgaagtttggaggctggatctag

SEQ ID NO: 171544 - DNA, 1191 bp, synthetic construct
  misc_feature 1..1191: note = Description of Artificial Sequence: Synthetic coding sequence
  source 1..1191: mol_type = other DNA
atggcctttgcccccatgggccctgaggccagcttctttgatgtgctggacagacaccgggagagcctgctggccgccctgcggcggggcggccgggagccccccaccggcggcagccggctggccagcagcagcgaggtgctggccagcattgagaacatcatccaggacatcatcaccagcctggccagaaatgaggccccagccttcaccatcgacaacagaagctcctgggagaacatcaagtttgaggacagcgtgggcctgcagatggtgagccactgcaccaccaggaagatcaagagtgacagccccaagagcgcccagaagttcagcctcatcctgaagatcctgtccatgatctacaagctggtgcagagcaacacctacgccaccaagagggacatctactacacagacagccagctgtttggaaaccagacagtggtggacaacatcatcaatgacatcagctgcatgctgaaggtgtccagaagaagcctgcacatcctgagcaccagcaagggcctgattgctggcaacctgcgctacattgaagaagatggcaccaaggtgaactgcacctgtggggccacagctgtggccgtgcccagcaacatccagggcatccggaacctggtgacagatgccaagtttgtgctgattgtggagaaggatgccaccttccagaggctgctggatgacaacttctgcaacaagctgagcccctgcatcatgatcaccgggaagggcgtgcctgacctgaacacccggctgctggtgaagaagctgtgggacaccttccacgtgcctgtgttcaccctggtggatgctgacccccatggaattgagatcatgtgcatctacaagtatggctccatgtccatgagctttgaggcccaccacctgactgtgcctgccatccgctggctgggcctgctgcccagcgacctgaagaggctgaatgtgcccaaggacagcctcatccccctgaccaagagggaccagatgaagctggacagcatcctgcggcggccctacgtgacctgccagcccttctggaggaaggagatggagatcatggctgacagcaagatgaaggccgagatccaggccctgaccttcctgagcagtgactacctgagccgggtgtacctgcccaacaagctgaagtttggaggctggatctag

SEQ ID NO: 171545 - DNA, 813 bp, synthetic construct
  misc_feature 1..813: note = Description of Artificial Sequence: Synthetic coding sequence
  source 1..813: mol_type = other DNA
ctgctggccgccctgcggcggggcggccgggagccccccaccggcggcagccggctggccagcagcagcgaggtgctggccagcattgagaacatcatccaggacatcatcaccagcctggccagaaatgaggccccagccttcaccatcgacaacagaagctcctgggagaacatcaagtttgaggacagcgtgggcctgcagatggtgagccactgcaccaccaggaagatcaagagtgacagccccaagagcgcccagaagttcagcctcatcctgaagatcctgtccatgatctacaagctggtgcagagcaacacctacgccaccaagagggacatctactacacagacagccagctgtttggaaaccagacagtggtggacaacatcatcaatgacatcagctgcatgctgaaggtgtccagaagaagcctgcacatcctgagcaccagcaagggcctgattgctggcaacctgcgctacattgaagaagatggcaccaaggtgaactgcacctgtggggccacagctgtggccgtgcccagcaacatccagggcatccgcatcacagatgccaagtttgtgctgattgtggagaaggatgccaccttccagaggctgctggatgacaacttctgcaacaagctgagcccctgcatcatgatcaccgggaagggcgtgcctgacctgaacacccggctgctggtgaagaagctgtgggacaccttccacgtgcctgtgttcaccctggtggatgctgacccccatggaattgagatcatgtgcatctacaagtatggctccatgtag

SEQ ID NO: 171546 - DNA, 996 bp, synthetic construct
  misc_feature 1..996: note = Description of Artificial Sequence: Synthetic coding sequence
  source 1..996: mol_type = other DNA
atggagaaccccagccctgctgctgccctgggcaaggccctgtgtgccctgctgctggccaccctgggcgctgctggccagcccctgggcggggagagcatctgcagcgcccgggccctggccaagtacagcatcaccttcaccgggaagtggagccagacagccttccccaagcagtaccccctcttccggcccccagcccagtggagcagcctgctgggcgccgcccacagcagtgactacagcatgtggaggaagaaccagtatgtgtccaatggcctgcgggactttgctgagcggggggaggcctgggccctgatgaaggagattgaggccgccggggaggccctgcagagcgtgcatgctgtgttttctgccccagctgtgcccagcggcaccggccagaccagcgctgagctggaggtgcagaggaggcacagcctggtgtcctttgtggtgagaattgtgcccagcccagactggtttgtgggcgtggacagcctggacctgtgtgatggagaccgctggagggagcaggccgccctggacctgtacccctatgatgctggaacagattctggcttcaccttcagcagccccaactttgccaccatcccccaggacacagtgacagagatcaccagcagcagccccagccacccagccaacagcttctactacccccggctgaaggccctgccccccatcgcccgggtgaccctggtgcggctgcggcagagcccccgggccttcatccccccagcccctgtgctgcccagccgggacaatgaaattgtggacagcgcctctgtgcctgagacccccctggactgtgaggtgtccctgtggagctcctggggcctgtgtggcggccactgcggccgcctgggcaccaagagcaggacccgctacgtgcgggtgcagcctgccaacaacggcagcccctgcccagagctggaggaggaggccgagtgtgtgcctgacaactgtgtgtag

SEQ ID NO: 171547 - DNA, 996 bp, synthetic construct; identical to SEQ ID NO: 171546
  misc_feature 1..996: note = Description of Artificial Sequence: Synthetic coding sequence
  source 1..996: mol_type = other DNA

SEQ ID NO: 171548 - DNA, 186 bp, synthetic construct
  misc_feature 1..186: note = Description of Artificial Sequence: Synthetic coding sequence
  source 1..186: mol_type = other DNA
atggagaaccccagccctgctgctgccctgggcaaggccctgtgtgccctgctgctggccaccctgggcgctgctggccagcccctgggcggggagagcatctgcagcgcccgggccctggccaagtacagcatcaccttcaccgggaagtggagccagacagccttccccaagcagtacccctag

SEQ ID NO: 171549 - DNA, 327 bp, synthetic construct
  misc_feature 1..327: note = Description of Artificial Sequence: Synthetic coding sequence
  source 1..327: mol_type = other DNA
atggagaaccccagccctgctgctgccctgggcaaggccctgtgtgccctgctgctggccaccctgggcgctgctggccagcccctgggcggggagagcatctgcagcgcccgggccctggccaagtacagcatcaccttcaccgggaagtggagccagacagccttccccaagcagtaccccctcttccggcccccagcccagtggagcagcctgctgggcgccgcccacagcagtgactacagcatgtggaggaagaaccagtatgtgtccaatggcctgcgggactttgctgagcggggggaggcctgggccctgatgaagtag

SEQ ID NO: 171550 - DNA, 54 bp, synthetic construct
  misc_feature 1..54: note = Description of Artificial Sequence: Synthetic coding sequence
  source 1..54: mol_type = other DNA
atggagaaccccagccctgctgctgccctgggcaaggccctgtgtgccctgtag

SEQ ID NO: 171551 - DNA, 27 bp, synthetic construct
  misc_feature 1..27: note = Description of Artificial Sequence: Synthetic coding sequence
  source 1..27: mol_type = other DNA
atggagaaccccagccctgctgcctag

SEQ ID NO: 171552 - DNA, 51 bp, synthetic construct
  misc_feature 1..51: note = Description of Artificial Sequence: Synthetic coding sequence
  source 1..51: mol_type = other DNA
atggagaaccccagccctgctgctgccctgggcaaggccctgtgtgcctag

SEQ ID NO: 171553 - DNA, 75 bp, synthetic construct
  misc_feature 1..75: note = Description of Artificial Sequence: Synthetic coding sequence
  source 1..75: mol_type = other DNA
atggagaaccccagccctgctgctgccctgggcaaggccctgtgtgccctgctgctggccaccctgggcgcctag

SEQ ID NO: 171554 - DNA, 195 bp, synthetic construct
  misc_feature 1..195: note = Description of Artificial Sequence: Synthetic coding sequence
  source 1..195: mol_type = other DNA
atggagaaccccagccctgctgctgccctgggcaaggccctgtgtgccctgctgctggccaccctgggcgctgctggccagcccctgggcggggagagcatctgcagcgcccgggccctggccaagtacagcatcaccttcaccgggaagtggagccagacagccttccccaagcagtaccccctcttcagatag

SEQ ID NO: 171555 - DNA, 960 bp, synthetic construct
  misc_feature 1..960: note = Description of Artificial Sequence: Synthetic coding sequence
  source 1..960: mol_type = other DNA
atggacccccagaaccagcacggcagcggcagcagcctggtggtgatccagcagcccagcctggacagccggcagaggctggactatgagcgggagatccagcccacagccatcctgagcctggaccagatcaaggccatccggggcagcaatgagtacacagagggccccagcgtggtgaagaggcctgcccccaggacagccccccggcaggagaagcatgagaggacccatgagatcatccccatcaacgtgaacaacaactatgagcaccgccacaccagccacctgggccatgctgtgctgcccagcaatgcccggggccccatcctgagccgcagcaccagcactggatctgctgccagcagcggcagcaacagcagcgccagcagcgagcagggcctgctgggccgcagcccccccaccaggcctgtgcccggccacaggtctgagcgggccatccgcacccagcccaagcagctgattgtggatgacctgaagggcagcctgaaggaggacctgacccagcacaagttcatctgtgagcagtgtgggaagtgcaagtgtggagaatgtacagcccccaggaccctgcccagctgcctggcctgcaaccggcagtgcctgtgcagcgctgagagcatggtggagtatggcacctgcatgtgcctggtgaagggcatcttctaccactgcagcaatgatgatgaaggagacagctacagcgacaacccctgcagctgcagccagagccactgctgcagccgctacctgtgcatgggcgccatgagcctcttcctgccctgcctgctgtgctaccccccagccaagggctgcctgaagctgtgccgccgctgctatgactggatccacaggcctggctgccgctgcaagaacagcaacacagtgtactgcaagctggagagctgccccagccggggccagggcaagcccagctag

SEQ ID NO: 171556 - DNA, 960 bp, synthetic construct; identical to SEQ ID NO: 171555
  misc_feature 1..960: note = Description of Artificial Sequence: Synthetic coding sequence
  source 1..960: mol_type = other DNA

SEQ ID NO: 171557 - DNA, 204 bp, synthetic construct
  misc_feature 1..204: note = Description of Artificial Sequence: Synthetic coding sequence
  source 1..204: mol_type = other DNA
atggacccccagaaccagcacggcagcggcagcagcctggtggtgatccagcagcccagcctggacagccggcagaggctggactatgagcgggagatccagcccacagccatcctgagcctggaccagatcaaggccatccggggcagcaatgagtacacagagggccccagcgtggtgaagaggcctgcccccaggacatag

SEQ ID NO: 171558 - DNA, 630 bp, synthetic construct
  misc_feature 1..630: note = Description of Artificial Sequence: Synthetic coding sequence
  source 1..630: mol_type = other DNA
atggacccccagaaccagcacggcagcggcagcagcctggtggtgatccagcagcccagcctggacagccggcagaggctggactatgagcgggagatccagcccacagccatcctgagcctggaccagatcaaggccatccggggcagcaatgagtacacagagggccccagcgtggtgaagaggcctgcccccaggacagccccccggcaggagaagcatgagaggacccatgagatcatccccatcaacgtgaacaacaactatgagcaccgccacaccagccacctgggccatgctgtgctgcccagcaatgcccggggccccatcctgagccgcagcaccagcactggatctgctgccagcagcggcagcaacagcagcgccagcagcgagcagggcctgctgggccgcagcccccccaccaggcctgtgcccggccacaggtctgagcgggccatccgcacccagcccaagcagctgattgtggatgacctgaagggcagcctgaaggaggacctgacccagcacaagttcatctgtgagcagtgtgggaagtgcaagtgtggagaatgtacagcccccaggaccctgcccagctgcctggcctgcaaccggcagtgcctgtag

SEQ ID NO: 171559 - DNA, 108 bp, synthetic construct
  misc_feature 1..108: note = Description of Artificial Sequence: Synthetic coding sequence
  source 1..108: mol_type = other DNA
atggacccccagaaccagcacggcagcggcagcagcctggtggtgatccagcagcccagcctggacagccggcagaggctggactatgagcgggagatccagccctag

SEQ ID NO: 171560 - DNA, 948 bp, synthetic construct
  misc_feature 1..948: note = Description of Artificial Sequence: Synthetic coding sequence
  source 1..948: mol_type = other DNA
atggaggcccgggcccagagcggaaatggcagccagcccctgctgcagaccccaagagatggcggccggcagagaggagagccagaccccagagatgccctgacccagcaggtgcacgtgctgagcctggaccagatccgggccatccggaacaccaatgagtacacagagggccccaccgtggtgcccaggcctggcctgaagccagccccccggcccagcacccagcacaagcatgagcggctgcacggcctgcctgagcaccggcagcccccccggctgcagcacagccaggtgcacagcagcgcccgggcccccctgagccgcagcatcagcacagtgagcagcggcagccgcagcagcaccaggaccagcaccagcagcagcagcagcgagcagaggctgctgggcagcagcttcagcagcggccctgtggctgatggcatcatccgggtgcagcccaagtctgagctgaagccaggagagctgaagcccctgagcaaagaagacctgggcctgcacgcctaccgctgtgaggactgtgggaagtgcaagtgcaaggagtgcacctacccccggcccctgcccagcgactggatctgtgacaagcagtgcctgtgcagcgcccagaatgtgattgattatggcacctgtgtgtgctgcgtgaagggcctcttctaccactgcagcaatgatgatgaggacaactgtgccgacaacccctgcagctgcagccagagccactgctgcacccgctggagcgccatgggcgtgatgagcctcttcctgccctgcctgtggtgctacctgcctgccaagggctgcctgaagctgtgccagggctgctatgacagagtgaacagacctggctgccgctgcaagaacagcaacacagtgtgctgcaaggtgcccaccgtgcccccaagaaactttgagaagcccacctag

SEQ ID NO: 171561 - DNA, 948 bp, synthetic construct; identical to SEQ ID NO: 171560
  misc_feature 1..948: note = Description of Artificial Sequence: Synthetic coding sequence
  source 1..948: mol_type = other DNA

SEQ ID NO: 171562 - DNA, 948 bp, synthetic construct; identical to SEQ ID NO: 171560
  misc_feature 1..948: note = Description of Artificial Sequence: Synthetic coding sequence
  source 1..948: mol_type = other DNA

SEQ ID NO: 171563 - DNA, 1062 bp, synthetic construct
  misc_feature 1..1062: note = Description of Artificial Sequence: Synthetic coding sequence
  source 1..1062: mol_type = other DNA
atggaggcccgggcccagagcggaaatggcagccagcccctgctgcagaccccaagagatggcggccggcagagaggagagccagaccccagagatgccctgacccagcaggtgcacgtgctgagcctggaccagatccgggccatccggaacaccaatgagtacacagagggccccaccgtggtgcccaggcctggcctgaagccagccccccggcccagcacccagcacaagcatgagcggctgcacggcctgcctgagcaccggcagcccccccggctgcagcacagccaggtgcacagcagcgcccgggcccccctgagccgcagcatcagcacagtgagcagcggcagccgcagcagcaccaggaccagcaccagcagcagcagcagcgagcagaggctgctgggcagcagcttcagcagcggccctgtggctgatggcatcatccgggtgcagcccaagtctgagctgaagccaggagagctgaagcccctgagcaaagaagacctgggcctgcacgcctaccgctgtgaggactgtgggaagtgcaagtgcaaggagtgcacctacccccggcccctgcccagcgactggatctgtgacaagcagtgcctgtgcagcgcccagaatgtgattgattatggcacctgtgtgtgctgcgtgaagggcctcttctaccactgcagcaatgatgatgaggacaactgtgccgacaacccctgcagctgcagccagagccactgctgcacccgctggagcgccatgggcgtgatgagcctcttcctgccctgcctgtggtgctacctgcctgccaagggctgcctgaagctgtgccagggctgctatgacagagtgaacagacctggctgccgctgcaagaacagcaacacagtgtgctgcaaggtgcccaccgtgccccccaggaccctgaagaaccagcacagcatcatcaaccaggagtactacagcaatgaagacttcttcttcctgttcctgatccacatctgcaaccagctgaacagctacaacctgggcaccgtgaacaggaaggtgggctag

SEQ ID NO: 171564 - DNA, 867 bp, synthetic construct
  misc_feature 1..867: note = Description of Artificial Sequence: Synthetic coding sequence
  source 1..867: mol_type = other DNA
atggatgctgctgtgacagatgacttccagcagatcctgcccatcgagcagctgcggagcacccacgccagcaatgactatgtggagcggcccccagccccctgcaagcaggccctgagcagccccagcctgattgtgcagacccacaagagtgactggagcctggccaccatgcccaccagcctgcccaggagcctgagccagtgccaccagctgcagcccctgccccagcacctgagccagagcagcatcgccagctccatgagccacagcaccacagccagtgaccagaggctgctggccagcatcacccccagccccagcggccagagcatcatccgcacccagcctggagctggggtgcaccccaaggcagatggagccctgaagggggaggccgagcagagcgctggccaccccagcgagcacctgttcatctgtgaagaatgtggccgctgcaagtgtgtgccctgcacagctgcccggcccctgcccagctgctggctgtgcaaccagcgctgcctgtgcagcgctgagagcctgctggactatggcacctgcctgtgctgcgtgaagggcctcttctaccactgcagcacagatgatgaggacaactgtgctgatgagccctgcagctgtggccccagcagctgctttgtgcgctgggccgccatgagcctcatcagcctcttcctgccctgcctgtgctgctacctgcccacccggggctgcctgcacctgtgccagcagggctatgacagcctgcggcggcccggctgccgctgcaagaggcacaccaacacagtgtgcaggaagatcagcagcggcagcgcccccttccccaaggcccaggagaagtctgtgtag

SEQ ID NO: 171565 - DNA, 378 bp, synthetic construct
  misc_feature 1..378: note = Description of Artificial Sequence: Synthetic coding sequence
  source 1..378: mol_type = other DNA
atggatgctgctgtgacagatgacttccagcagatcctgcccatcgagcagctgcggagcacccacgccagcaatgactatgtggagcggcccccagccccctgcaagcaggccctgagcagccccagcctgattgtgcagacccacaagagtgactggagcctggccaccatgcccaccagcctgcccaggagcctgagccagtgccaccagctgcagcccctgccccagcacctgagccagagcagcatcgccagctccatgagccacagcaccacagccagcagcaccacagcccccctgatgatgaagaccaccgtgctgatgagccctgccctggtgggcctggtgctggccctgtctgctggccagccctag

SEQ ID NO: 171566 - DNA, 969 bp, synthetic construct
  misc_feature 1..969: note = Description of Artificial Sequence: Synthetic coding sequence
  source 1..969: mol_type = other DNA
atgctgagccccctgcccaccggccccctggaggcctgcttctctgtgcagagcaggaccagcagccccatggagccccccatcccccagagcgcccccctgacccccaacagcgtgatggtgcagcccctgctggacagcaggatgagccacagccggctgcagcaccccctgaccatcctgcccatcgaccaggtgaagaccagccacgtggagaatgactacatcgacaaccccagcctggccctgaccaccggccccaagaggacccggggcggggcccctgagctggcccccaccccagcccgctgtgaccaggatgtgacccaccactggatctccttcagcggccggcccagctctgtgagcagcagcagcagcaccagcagtgaccagaggctgctggaccacatggcccctcctcctgtggccgaccaggccagccccagggctgtgcgcatccagcccaaggtggtgcactgccagcccctggacctgaagggccctgctgtgcccccagagctggacaagcacttcctgctgtgtgaggcctgtgggaagtgcaagtgcaaggaatgtgccagccccaggaccctgcccagctgctgggtgtgcaaccaggagtgcctgtgcagcgcccagaccctggtgaactacggcacctgcatgtgcctggtgcagggcatcttctaccactgcaccaatgaagatgatgagggcagctgtgccgaccacccctgcagctgcagccgcagcaactgctgtgcccgctggagcttcatgggcgccctgtctgtggtgctgccctgcctgctgtgctacctgcctgccaccggctgtgtgaagctggcccagaggggctatgaccggctgcggcggcccggctgccgctgcaagcacaccaacagcgtcatctgcaaggccgccagcggagatgccaagaccagcaggccagacaagcccttctag

SEQ ID NO: 171567 - DNA, 321 bp, synthetic construct
  misc_feature 1..321: note = Description of Artificial Sequence: Synthetic coding sequence
  source 1..321: mol_type = other DNA
atggagccccccatcccccagagcgcccccctgacccccaacagcgtgatggtgcagcccctgctggacagcaggatgagccacagccggctgcagcaccccctgaccatcctgcccatcgaccaggtgaagaccagccacgtggagaatgactacatcgacaaccccagcctggccctgaccaccggccccaagaggacccggggcggggcccctgagctggcccccaccccagcccgctgtgaccaggatgtgacccaccactggatctccttcagcggccggccctgcagcgccacctgcctgcccccagctgcctag

SEQ ID NO: 171568 - DNA, 900 bp, synthetic construct
  misc_feature 1..900: note = Description of Artificial Sequence: Synthetic coding sequence
  source 1..900: mol_type = other DNA
atggagccccccatcccccagagcgcccccctgacccccaacagcgtgatggtgcagcccctgctggacagcaggatgagccacagccggctgcagcaccccctgaccatcctgcccatcgaccaggtgaagaccagccacgtggagaatgactacatcgacaaccccagcctggccctgaccaccggccccaagaggacccggggcggggcccctgagctggcccccaccccagcccgctgtgaccaggatgtgacccaccactggatctccttcagcggccggcccagctctgtgagcagcagcagcagcaccagcagtgaccagaggctgctggaccacatggcccctcctcctgtggccgaccaggccagccccagggctgtgcgcatccagcccaaggtggtgcactgccagcccctggacctgaagggccctgctgtgcccccagagctggacaagcacttcctgctgtgtgaggcctgtgggaagtgcaagtgcaaggaatgtgccagccccaggaccctgcccagctgctgggtgtgcaaccaggagtgcctgtgcagcgcccagaccctggtgaactacggcacctgcatgtgcctggtgcagggcatcttctaccactgcaccaatgaagatgatgagggcagctgtgccgaccacccctgcagctgcagccgcagcaactgctgtgcccgctggagcttcatgggcgccctgtctgtggtgctgccctgcctgctgtgctacctgcctgccaccggctgtgtgaagctggcccagaggggctatgaccggctgcggcggcccggctgccgctgcaagcacaccaacagcgtcatctgcaaggccgccagcggagatgccaagaccagcaggccagacaagcccttctag

SEQ ID NO: 171569 - DNA, 153 bp, synthetic construct
  misc_feature 1..153: note = Description of Artificial Sequence: Synthetic coding sequence
  source 1..153: mol_type = other DNA
atggagccccccatcccccagagcgcccccctgacccccaacagcgtgatggtgcagcccctgctggacagcaggatgagccacagccggctgcagcaccccctgaccatcctgcccatcgaccaggtgaagaccagccacgtggagaactag

SEQ ID NO: 171570 - DNA, 1335 bp, synthetic construct
  misc_feature 1..1335: note = Description of Artificial Sequence: Synthetic coding sequence
  source 1..1335: mol_type = other DNA
atgtctgaggagacagccaccagtgacaatgacaacagctatgcccgggtgcgggctgtggtgatgaccagagatgacagcagcggcggctggctgcccctgggcggcagcggcctgagctctgtgacagtgttcaaggtgccccaccaggaggagaatggctgtgccgacttcttcatccggggggagcggctgcgggacaagatggtggtgctggagtgcatgctgaagaaggacctgatctacaacaaggtgacccccaccttccaccactggaagattgatgacaagaagtttggcctgaccttccagagccctgcagatgcccgggcctttgaccggggcatcagaagagccatcgaggacatcagccagggctgcccagagagcaagaatgaggccgagggcgcagatgacctgcaggccaatgaggaggacagcagcagcagcctggtgaaggaccacctgttccagcaggagaccgtggtgaccagcgagccctaccgcagcagcaacatccggcccagcccctttgaggacctgaatgcccggcgggtgtacatgcagagccaggccaaccagatcaccttcggccagcccggcctggacatccagagccgctccatggagtatgtgcagaggcagatcagcaaagaatgtggcagcctgaagagccagaacagagtgcccctgaagagcatccgccacgtgtccttccaggatgaagatgaaattgtgcgcatcaacccccgggacatcctgatccgccgctatgctgactaccgccacccagacatgtggaagaatgacctggagagagatgatgctgacagcagcatccagttcagcaagccagacagcaagaagagtgactacctgtacagctgtggagatgagaccaagctgagcagccccaaggacagcgtggtgttcaagacccagcccagcagcctgaagatcaagaagagcaagaggaggaaggaggatggagagaggagccgctgtgtgtactgccaggagcgcttcaaccacgaggagaatgtgcggggcaagtgccaggatgccccagaccccatcaagcgctgcatctaccaggtgtcctgcatgctgtgtgccgagagcatgctgtaccactgcatgtctgattctgagggggacttcagtgacccctgcagctgtgacaccagtgatgacaagttctgcctgcgctggctggccctggtggccctgtccttcatcgtgccctgcatgtgctgctacgtgcccctgaggatgtgccaccgctgtggggaggcctgtggctgctgcggcggcaagcacaaggctgctggatag

SEQ ID NO: 171571 - DNA, 1257 bp, synthetic construct
  misc_feature 1..1257: note = Description of Artificial Sequence: Synthetic coding sequence
  source 1..1257: mol_type = other DNA
atgacagaggagacccacccagatgatgacagctacatcgtgcgggtgaaggctgtggtgatgaccagagatgacagcagcggcggctggttcccccaggagggcggcggcatcagccgggtgggcgtgtgcaaggtgatgcaccctgagggcaatggccgcagcggcttcctgatccacggggagcggcagaaggacaagctggtggtgctggagtgctacgtgaggaaggacctggtgtacaccaaggccaaccccaccttccaccactggaaggtggacaacaggaagtttggcctgaccttccagagccctgcagatgcccgggcctttgaccggggcgtgaggaaggccatcgaggacctgattgagggcagcaccaccagcagcagcaccatccacaatgaagctgagctgggagatgatgatgtgttcaccacagccacagacagcagcagcaacagcagccagaagcgggagcagcccaccaggaccatcagcagccccaccagctgtgagcaccggcgcatctacaccctgggccacctgcatgacagctaccccacagaccactaccacctggaccagcccatgccccggccctaccggcaggtgtccttcccagatgatgatgaggagatcgtgcgcatcaacccccgggagaagatctggatgacaggctatgaggactacagacatgcccctgtgcggggcaagtacccagaccccagtgaagatgctgacagcagctatgtgcgctttgccaagggggaggtgcccaagcatgactacaactacccctacgtggacagcagtgactttggcctgggggaggaccccaagggccggggcggcagcgtcatcaagacccagcccagccggggcaagagcagaagaaggaaggaggatggagagaggagccgctgtgtgtactgccgggacatgttcaaccacgaggagaacagaagaggccactgccaggatgccccagacagcgtgaggacctgcatccggcgggtgtcctgcatgtggtgtgccgacagcatgctgtaccactgcatgtctgaccctgagggggactacacagacccctgcagctgtgacaccagtgatgagaagttctgcctgcgctggatggccctgattgccctgtccttcctggccccctgcatgtgctgctacctgcccctgcgggcctgctaccactgcggcgtgatgtgccgctgctgcggcggcaagcacaaggctgctgcctag

SEQ ID NO: 171572 - DNA, 351 bp, synthetic construct
  misc_feature 1..351: note = Description of Artificial Sequence: Synthetic coding sequence
  source 1..351: mol_type = other DNA
atgacagaggagacccacccagatgatgacagctacatcgtgcgggtgaaggctgtggtgatgaccagagatgacagcagcggcggctggttcccccaggagggcggcggcatcagccgggtgggcgtgtgcaaggtgatgcaccctgagggcaatggccgcagcggcttcctgatccacggggagcggcagaaggacaagctggtggtgctggagtgctacgtgaggaaggacctggtgtacaccaaggccaaccccaccttccaccactggaaggtggacaacaggaagtttggcctgaccttccagagccctgcagatgcccgggcctttgaccggggcgtgaggtag

SEQ ID NO: 171573 - DNA, 1248 bp, synthetic construct
  misc_feature 1..1248: note = Description of Artificial Sequence: Synthetic coding sequence
  source 1..1248: mol_type = other DNA
atggccagccctggcagtgacagctacatcgtgcgggtgaaggctgtggtgatgaccagagatgacagcagcggcggctggttcccccaggagggcggcggcatcagccgggtgggcgtgtgcaaggtgatgcaccctgagggcaatggccgcagcggcttcctgattcatggagagcggcagaaggacaagctggtggtgctggagtgctacgtgaggaaggacctggtgtacaccaaggccaaccccaccttccaccactggaaggtggacaacaggaagtttggcctgaccttccagagccctgcagatgcccgggcctttgacagaggagtgaggaaggccattgaagatctcatcgagggcagcaccaccagcagcagcaccatccacaatgaggccgagctgggagatgatgatgtgttcaccacagccacagacagcagcagcaacagcagccagaagcgggagcagcccaccaggaccatcagcagccccaccagctgtgagcaccggcgcatctacaccctgggccacctgcatgacagctaccccacagaccactaccacctggaccagcccatgccccggccctaccggcaggtgtccttcccagatgatgatgaggagatcgtgcgcatcaacccccgggagaagatctggatgacaggctatgaggactacagacatgcccctgtgcggggcaagtacccagaccccagtgaagatgctgacagcagctatgtgcgctttgccaagggggaggtgcccaagcatgactacaactacccctacgtggacagcagtgactttggcctgggggaggaccccaagggccggggcggcagcgtcatcaagacccagcccagccggggcaagagcagaagaagaaaagaagatggagagaggagccgctgtgtgtactgccgggacatgttcaaccatgaagaaaatagaagaggccactgccaggatgccccagattctgtgaggacctgcatcagaagagtgtcctgcatgtggtgtgccgacagcatgctgtaccactgcatgtctgaccctgagggggactacacagacccctgcagctgtgacaccagtgatgagaagttctgcctgcgctggatggccctgattgccctgtccttcctggccccctgcatgtgctgctacctgcccctgcgggcctgctaccactgcggcgtgatgtgccgctgctgcggcggcaagcacaaggccgccgcctag

SEQ ID NO: 171574 - DNA, 1233 bp, synthetic construct
  misc_feature 1..1233: note = Description of Artificial Sequence: Synthetic coding sequence
  source 1..1233: mol_type = other DNA
atggtgcgggtgcgggctgtggtgatggccagagatgacagcagcggcggctggctgcctgtgggcggcggcggcctgagccaggtgtctgtgtgccgggtgcggggggcccggcctgagggcggggcccggcagggccactacgtgattcatggagagcggctgcgggaccagaagaccaccctggagtgcaccctgaagccaggcctggtgtacaacaaggtgaaccccatcttccaccactggagcctgggggactgcaagtttggcctgaccttccagagccctgctgaggctgatgagttccagaagagcctgctggccgccctggccgccctgggccggggcagcctgacccccagcagcagcagcagcagcagcagccccagccaggacacagctgagaccccctgccccctgaccagccacgtggacagcgacagcagcagcagccacagccggcaggagaccccacccagcgctgctgctgcccccatcatcaccatggagagcgccagcggcttcggccccaccaccccaccccagaggcggcgcagcagcgcccagagctacccacccctgctgcccttcaccggcatccctgagcccagcgagcccctggccggggccggcggcctgggctggggcggccggggctatgaggactaccgccgcagcggccccccagcccccctggccctgagcacctgtgtggtgcgctttgccaagacaggagccctgcggggggccgccctgggccccccagctgccctgcctgcccccctgacagaagctgcccccccagcccccccagcccggcccccacctggccctggccccagcagcgccccagccaaggccagccctgaggccgaggaggccgcccgctgtgtgcactgccgggccctcttcagaagaagagcagatggccggggcggccgctgtgccgaggccccagaccccggccgcctgctggtgcggcggctgagctgcctgtggtgtgccgagagcctgctgtaccactgcctgagtgatgctgagggggacttcagtgacccctgtgcctgtgagcccggccaccccaggcctgctgcccgctgggccgccctggccgccctgagcctggccgtgccctgcctgtgctgctacgcccccctgcgggcctgccactgggtggccgcccgctgtggctgtgccggctgcggcggcagacatgaggaggccgccaggtag

SEQ ID NO: 171575 - DNA, 459 bp, synthetic construct
  misc_feature 1..459: note = Description of Artificial Sequence: Synthetic coding sequence
  source 1..459: mol_type = other DNA
atggtgcgggtgcgggctgtggtgatggccagagatgacagcagcggcggctggctgcctgtgggcggcggcggcctgagccaggtgtctgtgtgccgggtgcggggggcccggcctgagggcggggcccggcagggccactacgtgattcatggagagcggctgcgggaccagaagaccaccctggagtgcaccctgaagccaggcctggtgtacaacaaggtgaaccccatcttccaccactggagcctgggggactgcaagtttggcctgaccttccagagccctgctgaggctgatgagttccagaagagcctgctggccgccctggccgccctgggccggggcagcctgacccccagcagcagcagcagcagcagcagccccagccaggacacagctgagaccccctgccccctgaccctgagccagtacttccgccacatgctgtgcccctag

SEQ ID NO: 171576 - DNA, 1725 bp, synthetic construct
  misc_feature 1..1725: note = Description of Artificial Sequence: Synthetic coding sequence
  source 1..1725: mol_type = other DNA
atgtggaccttcctgggcatcgccaccttcacctacttctacaagaagtttggagacttcatcaccctggccaaccgggaggtgctgctgtgtgtgctggtgttcctgagcctgggcctggtgctgagctaccgctgccgccacagaaatggaggcctgctgggccggcagcagagcggcagccagtttgccctcttcagtgacatcctgagcggcctgcccttcatcggcttcttctgggccaagagccccccagagagcgagaacaaggagcagctggaggccaggagaagaaggaagggcaccaacatcagcgagaccagcctcatcggcacagctgcctgcaccagcaccagcagccagaatgaccctgaggtgatcatcgtgggcgccggcgtgctgggcagcgccctggccgctgtgctgagcagagatggcaggaaggtgaccgtcatcgagcgggacctgaaggagccagaccgcatcgtgggggagttcctgcagcccggcggctaccacgtgctgaaggacctgggcctgggggacacagtggagggcctggatgcccaggtggtgaatggctacatgattcatgaccaggagagcaagtctgaggtgcagatcccctaccccctgtctgagaacaaccaggtgcagagcggccgggccttccaccacggccgcttcatcatgagcctgaggaaggccgccatggccgagcccaatgccaagttcatcgagggcgtggtgctgcagctgctggaggaggatgatgtggtgatgggcgtgcagtacaaggacaaggagaccggggacatcaaggagctgcacgcccccctgactgtggtggctgatggcctcttcagcaagttcaggaagagcctggtgagcaacaaggtgtctgtgagcagccactttgtgggcttcctgatgaagaatgccccccagttcaaggccaaccacgccgagctgatcctggccaaccccagccctgtgctgatctaccagatcagcagcagcgagaccagggtgctggtggacatccggggggagatgcccaggaacctgcgggagtacatggtggagaagatctacccccagatcccagaccacctgaaggagcccttcctggaggccacagacaacagccacctgcgctccatgcctgccagcttcctgccccccagctctgtgaagaagaggggcgtgctgctgctgggagatgcctacaacatgaggcaccccctgactggaggcggcatgacagtggccttcaaggacatcaagctgtggaggaagctgctgaagggcatcccagacctgtatgatgatgctgccatctttgaggccaagaagagcttctactgggccaggaagaccagccacagctttgtggtgaacatcctggcccaggccctgtatgagctgttcagcgccacagatgacagcctgcaccagctgaggaaggcctgcttcctgtacttcaagctgggcggggagtgtgtggccggccctgtgggcctgctgtctgtgctgagccccaaccccctggtgctgattggccacttctttgctgtggccatctatgctgtgtacttctgcttcaagtctgagccctggatcaccaagccccgggccctgctgagcagcggggctgtgctgtacaaggcctgcagcgtcatcttccccctcatctacagcgagatgaagtacatggtgcactag

SEQ ID NO: 171577 - DNA, 1440 bp, synthetic construct
  misc_feature 1..1440: note = Description of Artificial Sequence: Synthetic coding sequence
  source 1..1440: mol_type = other DNA
atgctgcggaggaagggcaccaacatcagcgagaccagcctgattggaacagctgcctgcaccagcaccagcagccagaatgaccctgaggtgatcatcgtgggcgctggggtgctgggcagcgccctggccgctgtgctgagcagagatggcaggaaggtgacagtgattgagcgggacctgaaggagccagacagaattgtgggggagttcctgcagcccggcggctaccacgtgctgaaggacctgggcctgggggacacagtggagggcctggatgcccaggtggtgaatggctacatgattcatgaccaggagagcaagtctgaggtgcagatcccctaccccctgtctgagaacaaccaggtgcagagcggccgggccttccaccacggccgcttcatcatgagcctgaggaaggccgccatggccgagcccaatgccaagttcattgaaggagtggtgctgcagctgctggaggaggatgatgtggtgatgggcgtgcagtacaaggacaaggagactggagacatcaaggagctgcacgcccccctgactgtggtggctgatggcctcttcagcaagttcaggaagagcctggtgagcaacaaggtgtctgtgagcagccactttgtgggcttcctgatgaagaatgccccccagttcaaggccaaccacgccgagctgatcctggccaaccccagccctgtgctgatctaccagatcagcagcagcgagaccagggtgctggtggacatccggggggagatgcccaggaacctgcgggagtacatggtggagaagatctacccccagatcccagaccacctgaaggagcccttcctggaggccacagacaacagccacctgcgctccatgcctgccagcttcctgccccccagctctgtgaagaagaggggcgtgctgctgctgggagatgcctacaacatgaggcaccccctgaccggcggcggcatgacagtggccttcaaggacatcaagctgtggaggaagctgctgaagggcatcccagacctgtatgatgatgctgccatctttgaggccaagaagagcttctactgggccaggaagaccagccacagctttgtggtgaacatcctggcccaggccctgtatgagctgttcagcgccacagatgacagcctgcaccagctgaggaaggcctgcttcctgtacttcaagctgggcggagaatgtgtggccggccctgtgggcctgctgtctgtgctgagccccaaccccctggtgctgattggccacttctttgctgtggccatctatgctgtgtacttctgcttcaagtctgagccctggatcaccaagccccgggccctgctgagcagtggagctgtgctgtacaaggcctgcagcgtcatcttccccctcatctacagcgagatgaagtacatggtgcactag

SEQ ID NO: 171578 - DNA, 1140 bp, synthetic construct
  misc_feature 1..1140: note = Description of Artificial Sequence: Synthetic coding sequence
  source 1..1140: mol_type = other DNA
atgattcatgaccaggagagcaagtctgaggtgcagatcccctaccccctgtctgagaacaaccaggtgcagagcggccgggccttccaccacggccgcttcatcatgagcctgaggaaggccgccatggccgagcccaatgccaagttcattgaaggagtggtgctgcagctgctggaggaggatgatgtggtgatgggcgtgcagtacaaggacaaggagactggagacatcaaggagctgcacgcccccctgactgtggtggctgatggcctcttcagcaagttcaggaagagcctggtgagcaacaaggtgtctgtgagcagccactttgtgggcttcctgatgaagaatgccccccagttcaaggccaaccacgccgagctgatcctggccaaccccagccctgtgctgatctaccagatcagcagcagcgagaccagggtgctggtggacatccggggggagatgcccaggaacctgcgggagtacatggtggagaagatctacccccagatcccagaccacctgaaggagcccttcctggaggccacagacaacagccacctgcgctccatgcctgccagcttcctgccccccagctctgtgaagaagaggggcgtgctgctgctgggagatgcctacaacatgaggcaccccctgaccggcggcggcatgacagtggccttcaaggacatcaagctgtggaggaagctgctgaagggcatcccagacctgtatgatgatgctgccatctttgaggccaagaagagcttctactgggccaggaagaccagccacagctttgtggtgaacatcctggcccaggccctgtatgagctgttcagcgccacagatgacagcctgcaccagctgaggaaggcctgcttcctgtacttcaagctgggcggagaatgtgtggccggccctgtgggcctgctgtctgtgctgagccccaaccccctggtgctgattggccacttctttgctgtggccatctatgctgtgtacttctgcttcaagtctgagccctggatcaccaagccccgggccctgctgagcagtggagctgtgctgtacaaggcctgcagcgtcatcttccccctcatctacagcgagatgaagtacatggtgcactag

SEQ ID NO: 171579 - DNA, 822 bp, synthetic construct
  misc_feature 1..822: note = Description of Artificial Sequence: Synthetic coding sequence
  source 1..822: mol_type = other DNA
atgaagaagacccagacctggatcctgacctgcatctacctgcagctgctgctcttcaaccccctggtgaagacagagggcatctgcaggaacagagtgaccaacaacgtgaaggatgtgaccaagctggtggccaacctgcccaaggactacatgatcaccctgaagtatgtgcccggcatggatgtgctgcccagccactgctggatcagcgagatggtggtgcagctgagtgacagcctgacagacctgctggacaagttcagcaacatcagcgagggcctgagcaactacagcatcatcgacaagctggtgaacatcgtggatgacctggtggagtgtgtgaaggagaacagcagcaaggacctgaagaagagcttcaagagccctgagcccaggctcttcaccccagaggagttcttccgcatcttcaacagaagcattgatgccttcaaggactttgtggtggccagcgagaccagtgactgtgtggtgagcagcaccctgagccctgagaaggacagccgggtgtctgtgaccaagcccttcatgctgccccctgtggccgccagcagcctgagaaatgacagcagcagcagcaacaggaaggccaagaaccccccaggggacagcagcctgcactgggccgccatggccctgcctgccctcttcagcctcatcatcggctttgccttcggggccctgtactggaagaagaggcagcccagcctgaccagggctgtggagaacatccagatcaatgaggaggacaatgagatctccatgctgcaggagaaggagcgggagttccaggaggtgtag

SEQ ID NO: 171580 - DNA, 2100 bp, synthetic construct
  misc_feature 1..2100: note = Description of Artificial Sequence: Synthetic coding sequence
  source 1..2100: mol_type = other DNA
atgaggctgcggcggctgggccagggcggccgctgctaccggggcctgtggcccctgcggcacacccggccctggagcagccctggagaatatgagtgggagtatgatgaggaggaggagaagaaccagctggagattgaaaggctggaggagcagctgagcatcaacgtgtatgactacaactgccacgtggacctgatccggctgctgcggctggagggggagctgaccaaggtgaggatggcccggcagaagatgtctgagatcttccccctgacagaggagctgtggctggagtggctgcatgatgagatctccatggcccaggacggcctggaccgggagcacgtgtatgacctgtttgagaaggctgtgaaggactacatctgccccaacatctggctggagtatggccagtacagcgtgggcggcatcggccagaagggcggcctggagaaggtgcgctctgtgtttgagcgggccctgagctctgtgggcctgcacatgaccaagggcctggccctgtgggaggcctaccgggagtttgagagcgccatcgtggaggccgcccggctggagaaggtgcacagcctcttccggcggcagctggccatccccctgtatgacatggaggccacctttgctgaatatgaggagtggagcgaggaccccatccctgagagcgtcatccagaactacaacaaggccctgcagcagctggagaagtacaagccctatgaggaggccctgctgcaggccgaggccccccggctggccgagtaccaggcctacatcgactttgagatgaagattggagaccctgcccgcatccagctgatctttgagcgggccctggtggagaactgcctggtgcctgacctgtggatccgctacagccagtacctggaccggcagctgaaggtgaaggacctggtgctgtctgtgcacaacagagccatccggaactgcccctggacagtggccctgtggagccgctacctgctggccatggagagacatggagtggaccaccaggtgatctctgtgacctttgagaaggccctgaatgccggcttcatccaggccacagattatgtggagatctggcaggcctacctggactacctgcggcggcgggtggacttcaagcaggacagcagcaaggagctggaggagctgcgggccgccttcacccgggccctggagtacctgaagcaggaggtggaggagcgcttcaatgaaagtggggaccccagctgtgtgatcatgcagaactgggccagaattgaggcccggctgtgcaacaacatgcagaaggcccgggagctgtgggacagcatcatgaccagaggaaatgccaagtatgccaacatgtggctggagtactacaacctggagcgggcccatggagacacccagcactgcaggaaggccctgcacagagctgtgcagtgcaccagtgactacccagagcacgtgtgtgaggtgctgctgaccatggagaggacagagggcagcctggaggactgggacattgctgtgcagaagacagagacccggctggcccgggtgaatgagcagaggatgaaggctgctgagaaggaggccgccctggtgcagcaggaggaggagaaggccgagcagaggaagagggcccgggcagagaagaaggccctgaagaagaagaagaagatccggggccctgagaagagaggagcagatgaagatgatgagaaggagtggggagatgatgaggaggccttccagacccagaagggccgggagcagcacccctgctcctggaggaacaccaagtgccgcagcagcagccgggcccgctgggagatgtgctgcagaagatgtggggccccctttgaagctgagggggagggcagcctgcctgaggagggccacgcccagggcgccgcccggcagcagcagggccagcaccaccggctgtgccagcagcctgccctgcagcacgccggggccggccacgaggcccaggccaccctgcggggcctgtggggcggcggccctgaccccacccacctgcagcagccctggggcttcccccggctgctgctgcggggcgtgtag

SEQ ID NO: 171581 - DNA, 2784 bp, synthetic construct
  misc_feature 1..2784: note = Description of Artificial Sequence: Synthetic coding sequence
  source 1..2784: mol_type = other DNA
atggccacagctgctgagaccagcgccagcgagcctgaggccgagagcaaggccggccccaaggcagatggagaggaggatgaggtgaaggccgcccggaccaggaggaaggtgctgagcagagctgtggccgccgccacctacaagaccatgggccctgcctgggaccagcaggaggagggcgtgtctgagagtgatggagatgaatatgccatggccagcagcgctgagagcagccctggagaatatgagtgggagtatgatgaggaggaggagaagaaccagctggagattgaaaggctggaggagcagctgagcatcaacgtgtatgactacaactgccacgtggacctgatccggctgctgcggctggagggggagctgaccaaggtgaggatggcccggcagaagatgtctgagatcttccccctgacagaggagctgtggctggagtggctgcatgatgagatctccatggcccaggacggcctggaccgggagcacgtgtatgacctgtttgagaaggctgtgaaggactacatctgccccaacatctggctggagtatggccagtacagcgtgggcggcatcggccagaagggcggcctggagaaggtgcgctctgtgtttgagcgggccctgagctctgtgggcctgcacatgaccaagggcctggccctgtgggaggcctaccgggagtttgagagcgccatcgtggaggccgcccggctggagaaggtgcacagcctcttccggcggcagctggccatccccctgtatgacatggaggccacctttgctgaatatgaggagtggagcgaggaccccatccctgagagcgtcatccagaactacaacaaggccctgcagcagctggagaagtacaagccctatgaggaggccctgctgcaggccgaggccccccggctggccgagtaccaggcctacatcgactttgagatgaagattggagaccctgcccgcatccagctgatctttgagcgggccctggtggagaactgcctggtgcctgacctgtggatccgctacagccagtacctggaccggcagctgaaggtgaaggacctggtgctgtctgtgcacaacagagccatccggaactgcccctggacagtggccctgtggagccgctacctgctggccatggagagacatggagtggaccaccaggtgatcagtgacagcagcaaggagctggaggagctgcgggccgccttcacccgggccctggagtacctgaagcaggaggtggaggagcgcttcaatgaaagtggggaccccagctgtgtgatcatgcagaactgggccagaattgaggcccggctgtgcaacaacatgcagaaggcccgggagctgtgggacagcatcatgaccagaggaaatgccaagtatgccaacatgtggctggagtactacaacctggagcgggcccatggagacacccagcactgcaggaaggccctgcacagagctgtgcagtgcaccagtgactacccagagcacgtgtgtgaggtgctgctgaccatggagaggacagagggcagcctggaggactgggacattgctgtgcagaagacagagacccggctggcccgggtgaatgagcagaggatgaaggctgctgagaaggaggccgccctggtgcagcaggaggaggagaaggccgagcagaggaagagggcccgggcagagaagaaggccctgaagaagaagaagaagatccggggccctgagaagagaggagcagatgaagatgatgagaaggagtggggagatgatgaggaggagcagcccagcaagagaagaagagtggagaacagcatcccagctgctggggagacccagaatgtggaggtggccgccggccctgctggaaaatgtgccgctgtggatgtggagccccccagcaagcagaaggagaaggccgccagcctgaagagggacatgcccaaggtgctgcatgacagcagcaaggacagcatcaccgtgtttgtgagcaacctgccctacagcatgcaggagccagacaccaagctgcggcccctgtttgaggcctgtggggaggtggtgcagatccggcccatcttcagcaacagaggagacttccggggctactgctacgtggagttcaaggaggagaagagcgccctgcaggccctggagatggacaggaagtctgtggagggccggcccatgtttgtgagcccctgtgtggacaagagcaagaacccagacttcaaggtgttccgctacagcaccagcctggagaagcacaagctgttcatcagcggcctgcccttcagctgcaccaaggaggagctggaggagatctgcaaggcccacggcaccgtgaaggacctgcggctggtgaccaacagagctgggaagcccaagggcctggcctacgtggagtatgaaaatgaaagccaggccagccaggccgtgatgaagatggatggcatgaccatcaaggagaacatcatcaaggtggccatcagcaaccccccccagaggaaggtgcctgagaagccagagaccaggaaggcccctgggggccccatgctgctgccccagacctatggagcccggggcaagggccgcacccagctgagcctgctgccccgggccctgcagaggcccagcgctgctgccccccaggctgaaaatggacctgctgctgccccagctgtggccgccccagctgccacagaggcccccaagatgagcaatgctgactttgccaagctgttcctgaggaagtag

SEQ ID NO: 171582 - DNA, 1587 bp, synthetic construct
  misc_feature 1..1587: note = Description of Artificial Sequence: Synthetic coding sequence
  source 1..1587: mol_type = other DNA
atggagagacatggagtggaccaccaggtgatcagtgacagcagcaaggagctggaggagctgcgggccgccttcacccgggccctggagtacctgaagcaggaggtggaggagcgcttcaatgaaagtggggaccccagctgtgtgatcatgcagaactgggccagaattgaggcccggctgtgcaacaacatgcagaaggcccgggagctgtgggacagcatcatgaccagaggaaatgccaagtatgccaacatgtggctggagtactacaacctggagcgggcccatggagacacccagcactgcaggaaggccctgcacagagctgtgcagtgcaccagtgactacccagagcacgtgtgtgaggtgctgctgaccatggagaggacagagggcagcctggaggactgggacattgctgtgcagaagacagagacccggctggcccgggtgaatgagcagaggatgaaggctgctgagaaggaggccgccctggtgcagcaggaggaggagaaggccgagcagaggaagagggcccgggcagagaagaaggccctgaagaagaagaagaagatccggggccctgagaagagaggagcagatgaagatgatgagaaggagtggggagatgatgaggaggagcagcccagcaagagaagaagagtggagaacagcatcccagctgctggggagacccagaatgtggaggtggccgccggccctgctggaaaatgtgccgctgtggatgtggagccccccagcaagcagaaggagaaggccgccagcctgaagagggacatgcccaaggtgctgcatgacagcagcaaggacagcatgcaggagccagacaccaagctgcggcccctgtttgaggcctgtggggaggtggtgcagatccggcccatcttcagcaacagaggagacttccggggctactgctacgtggagttcaaggaggagaagagcgccctgcaggccctggagatggacaggaagtctgtggagggccggcccatgtttgtgagcccctgtgtggacaagagcaagaacccagacttcaaggtgttccgctacagcaccagcctggagaagcacaagctgttcatcagcggcctgcccttcagctgcaccaaggaggagctggaggagatctgcaaggcccatggaacagtgaaggacctgcggctggtgaccaacagagctgggaagcccaagggcctggcctacgtggagtatgaaaatgaaagccaggccagccaggccgtgatgaagatggatggcatgaccatcaaggagaacatcatcaaggtggccatcagcaaccccccccagaggaaggtgcctgagaagccagagaccaggaaggcccctgggggccccatgctgctgccccagacctacggggcccggggcaaaggaagaacccagctgagcctgctgccccgggccctgcagaggccttctgctgctgccccccaggccgagaatggacctgctgctgccccagctgtggccgccccagctgccacagaggcccccaagatgagcaatgctgactttgccaagctgttcctgaggaagtag

SEQ ID NO: 171583 - DNA, 390 bp, synthetic construct
  misc_feature 1..390: note = Description of Artificial Sequence: Synthetic coding sequence
  source 1..390: mol_type = other DNA
atggccacagctgctgagaccagcgccagcgagcctgaggccgagagcaaggccggccccaaggcagatggagaggaggatgaggtgaaggccgcccggaccaggaggaaggtgctgagcagagctgtggccgccgccacctacaagaccatgggccctgcctgggaccagcaggaggagggcgtgtctgagagtgatggagatgaatatgccatggccagcagcgctgagagcagccctggagaatatgagtgggagtatgatgaggaggaggagaagaaccagctggagattgaaaggctggaggagcaggtgggccctggggtgggcagcggccacctgcctgtgttccaggtgctgggcagcccctgccccggccccccaccctag

SEQ ID NO: 171584 - DNA, 330 bp, synthetic construct
  misc_feature 1..330: note = Description of Artificial Sequence: Synthetic coding sequence
  source 1..330: mol_type = other DNA
atggccgccagcgctgcccggggagctgctgccctgcggcgcagcatcaaccagcctgtggcctttgtgcggcgcatcccctggacagctgccagcagccagctgaaggagcactttgcccagtttggccacgtgcggcgctgcatcctgccctttgacaaggagaccggcttccaccggggcctgggctgggtgcagttcagcagcgaggagggcctgagaaatgccctgcagcaggagaaccacatcattgatggagtgaaggtgcaggtgcacacccggcggcccaagctgccccagaccagtgatgatgagaagaaggacttctag

SEQ ID NO: 171585 - DNA, 894 bp, synthetic construct
  misc_feature 1..894: note = Description of Artificial Sequence: Synthetic coding sequence
  source 1..894: mol_type = other DNA
atggccaagtggctgaacaagtacttcagcctgggcaacagcaagaccaagagccccccccagccccccaggccagactaccgggagcagaggcggcggggggagcggcccagccagcccccccaggccgtgccccaggccagcagcgctgccagcgccagctgtggccctgccacagccagctgcttcagcgccagcagcggcagcctgcctgatgacagcggcagcaccagtgacctgatccgggcctaccgggcccagaaggagcgggactttgaggacccctacaatggacctggcagcagcctgaggaagctgcgggccatgtgccgcctggactactgcggcggcagcggggagcctggaggagtgcagagggccttcagcgccagcagcgccagcggggctgctggctgctgctgtgccagcagcggggccggggctgctgccagcagcagcagcagcagcggcagcccccacctgtaccgcagcagcagcgagcggcggcctgccaccccagctgaggtgcgctacatcagccccaagcacaggctcatcaaggtggagagcgctgctgggggcggggccggggaccccctgggcggggcctgtgccggcggccgcacctggagccccacagcctgtggcggcaagaagctgctgaacaagtgtgccgccagcgctgctgaggagagcggggccggcaagaaggacaaggtgaccatcgcagatgactacagcgacccctttgatgccaagaatgacctgaagagcaaggccggcaagggggagagcgctggctacatggagccctatgaggcccagaggatcatgacaggcctgcaggaggcctggaggcacagccccagcggctgcttccctgtgggcccctag

SEQ ID NO: 171586 - DNA, 1530 bp, synthetic construct
  misc_feature 1..1530: note = Description of Artificial Sequence: Synthetic coding sequence
  source 1..1530: mol_type = other DNA
atggccaagtggctgaacaagtacttcagcctgggcaacagcaagaccaagagccccccccagccccccaggccagactaccgggagcagaggcggcggggggagcggcccagccagcccccccaggccgtgccccaggccagcagcgctgccagcgccagctgtggccctgccacagccagctgcttcagcgccagcagcggcagcctgcctgatgacagcggcagcaccagtgacctgatccgggcctaccgggcccagaaggagcgggactttgaggacccctacaatggacctggcagcagcctgaggaagctgcgggccatgtgccgcctggactactgcggcggcagcggggagcctggaggagtgcagagggccttcagcgccagcagcgccagcggggctgctggctgctgctgtgccagcagcggggccggggctgctgccagcagcagcagcagcagcggcagcccccacctgtaccgcagcagcagcgagcggcggcctgccaccccagctgaggtgcgctacatcagccccaagcacaggctcatcaaggtggagagcgctgctgggggcggggccggggaccccctgggcggggcctgtgccggcggccgcacctggagccccacagcctgtggcggcaagaagctgctgaacaagtgtgccgccagcgctgctgaggagagcggggccggcaagaaggacaaggtgaccatcgcagatgactacagcgacccctttgatgccaagaatgacctgaagagcaaggccggcaagggggagagcgctggctacatggagccctatgaggcccagaggatcatgacagagttccagaggcaggagagcgtgcgcagccagcacaagggcatccagctgtatgacaccccctatgagcctgagggccagagcgtggacagcgacagcgagagcacagtgagcccccggctgcgggagagcaagctgccccaggatgatgacaggcctgcagatgaatatgaccagccctgggagtggaacagagtgaccatcccagccctggccgcccagttcaatggaaatgagaagaggcagagcagccccagccccagccgggacagaagacggcagctgcgggcccctgggggcggcttcaagcccatcaagcacggcagccctgagttctgtggcatcctgggggagcgggtggaccctgctgtgcccctggagaagcagatctggtaccacggggccatcagcagaggagatgctgagaacctgctgcggctgtgcaaggaatgttcctacctggtgaggaacagccagaccagcaagcatgactacagcctgagcctgcggagcaaccagggcttcatgcacatgaagctggccaagaccaaggagaagtatgtgctgggccagaacagccccccatttgattctgtgcctgaggtgatccactactacaccaccaggaagctgcccatcaagggagctgagcacctgagcctgctgtaccctgtggccgtgaggaccctgtag

SEQ ID NO: 171587 - DNA, 1080 bp, synthetic construct
  misc_feature 1..1080: note = Description of Artificial Sequence: Synthetic coding sequence
  source 1..1080: mol_type = other DNA
atgcaggccgccgccctgcctgaggagatccgctggctgctggaggatgctgaggagttcctggccgagggcctgagaaatgaaaacctgtctgctgtggcccgggaccaccgggaccacatcctgcggggcttccagcagatcaaggcccgctactactgggacttccagccccagggcggggacatcggccaggacagcagtgatgacaaccacagcggcaccctgggcctgagcctgaccagtgatgcccccttcctgagtgactaccaggatgagggcatggaggacatcgtgaagggggcccaggagctggacaacgtcatcaagcagggctacctggagaagaagagcaaggaccacagcttcttcggcagcgagtggcagaagcgctggtgtgtggtgtcccggggcctcttctactactatgccaatgagaagagcaagcagcccaagggcaccttcctgatcaagggctacggcgtgaggatggccccccacctgcggcgggacagcaagaaggagagctgctttgagctgaccagccaggacagaagaagctatgagttcaccgccaccagccctgctgaggcccgggactgggtggaccagatctccttcctgctgaaggacctgagcagcctgaccatcccctatgaagaagatgaggaggaggaggagaaggaggagacctatgatgacattgatggctttgacagccccagctgtggcagccagtgccggcccaccatcctgcccggctctgtgggcatcaaggagcccacagaggagaaggaggaggaggacatctatgaggtgctgcctgatgaggagcatgacctggaggaggatgagagcggcaccaggaggaaaggagtggactatgccagctactaccagggcctgtgggactgccacggggaccagccagatgagctgtccttccagagaggagacctgatccgcatcctgagcaaggagtacaacatgtatggctggtgggtgggggagctgaacagcctggtgggcatcgtgcccaaggagtacctgaccacagcctttgaggtggaggagaggtag

SEQ ID NO: 171588 - DNA, 831 bp, synthetic construct
  misc_feature 1..831: note = Description of Artificial Sequence: Synthetic coding sequence
  source 1..831: mol_type = other DNA
atgggcaacagcatgaagagcaccccagccccagctgagcggcccctgcccaaccctgagggcctggacagcgacttcctggccgtgctgagtgactaccccagcccagacatcagcccccccatcttccggcggggggagaagctgcgggtcatcagtgatgagggcggctggtggaaggccatcagcctgagcacaggccgggagagctacatccctggcatctgtgtggcccgggtgtaccacggctggctgtttgagggcctgggccgggacaaggccgaggagctgctgcagctgcctgacaccaaggtgggcagcttcatgatccgggagagcgagaccaagaagggcttctacagcctgtctgtgcgccaccggcaggtgaagcactaccgcatcttccggctgcccaacaactggtactacatcagcccccggctgaccttccagtgcctggaggacctggtgaaccactacagcgaggtggctgatggcctgtgctgcgtgctgaccaccccctgcctgacccagagcacagctgccccagctgtgcgggccagcagcagccctgtgaccctgcggcagaagacagtggactggaggagagtgtcccggctgcaggaggaccctgagggcacagagaaccccctgggcgtggatgagagcctcttctcctatggcctgcgggagagcatcgccagctacctgagcctgaccagcgaggacaacaccagctttgacaggaagaagaagagcatcagcctgatgtatggaggcagcaagaggaagagcagcttcttcagcagccccccctactttgaagattag

SEQ ID NO: 171589 - DNA, 882 bp, synthetic construct
  misc_feature 1..882: note = Description of Artificial Sequence: Synthetic coding sequence
  source 1..882: mol_type = other DNA
atgctgcaccggctgtgggccagccctgctgcccctgggaagaagaaggagatgggcaacagcatgaagagcaccccagccccagctgagcggcccctgcccaaccctgagggcctggacagcgacttcctggccgtgctgagtgactaccccagcccagacatcagcccccccatcttcagaagaggagagaagctgcgggtcatcagtgatgaaggaggctggtggaaggccatcagcctgagcacaggccgggagagctacatccctggcatctgtgtggcccgggtgtaccacggctggctgtttgagggcctgggccgggacaaggccgaggagctgctgcagctgcctgacaccaaggtgggcagcttcatgatccgggagagcgagaccaagaagggcttctacagcctgtctgtgcgccaccggcaggtgaagcactaccgcatcttccggctgcccaacaactggtactacatcagcccccggctgaccttccagtgcctggaggacctggtgaaccactacagcgaggtggctgatggcctgtgctgcgtgctgaccaccccctgcctgacccagagcacagctgccccagctgtgcgggccagcagcagccctgtgaccctgcggcagaagacagtggactggaggagagtgtcccggctgcaggaggaccctgagggcacagagaaccccctgggcgtggatgagagcctcttctcctatggcctgcgggagagcatcgccagctacctgagcctgaccagcgaggacaacaccagctttgacaggaagaagaagagcatcagcctgatgtatggaggcagcaagaggaagagcagcttcttcagcagccccccctactttgaggactag

SEQ ID NO: 171590 - DNA, 951 bp, synthetic construct
  misc_feature 1..951: note = Description of Artificial Sequence: Synthetic coding sequence
  source 1..951: mol_type = other DNA
atgctgagcaagctgggccacagccccctgggcggcctgcgggcccggctgaccttccctgtgtgcctgctgtaccaccggctgtgggccagccctgctgcccctgggaagaagaaggagatgggcaacagcatgaagagcaccccagccccagctgagcggcccctgcccaaccctgagggcctggacagcgacttcctggccgtgctgagtgactaccccagcccagacatcagcccccccatcttccggcggggggagaagctgcgggtcatcagtgatgagggcggctggtggaaggccatcagcctgagcacaggccgggagagctacatccctggcatctgtgtggcccgggtgtaccacggctggctgtttgagggcctgggccgggacaaggccgaggagctgctgcagctgcctgacaccaaggtgggcagcttcatgatccgggagagcgagaccaagaagggcttctacagcctgtctgtgcgccaccggcaggtgaagcactaccgcatcttccggctgcccaacaactggtactacatcagcccccggctgaccttccagtgcctggaggacctggtgaaccactacagcgaggtggctgatggcctgtgctgcgtgctgaccaccccctgcctgacccagagcacagctgccccagctgtgcgggccagcagcagccctgtgaccctgcggcagaagacagtggactggaggagagtgtcccggctgcaggaggaccctgagggcacagagaaccccctgggcgtggatgagagcctcttctcctatggcctgcgggagagcatcgccagctacctgagcctgaccagcgaggacaacaccagctttgacaggaagaagaagagcatcagcctgatgtatggaggcagcaagaggaagagcagcttcttcagcagccccccctactttgaagattag

SEQ ID NO: 171591 - DNA, 276 bp, synthetic construct
  misc_feature 1..276: note = Description of Artificial Sequence: Synthetic coding sequence
  source 1..276: mol_type = other DNA
atgggcaacagcatgaagagcaccccagccccagctgagcggcccctgcccaaccctgagggcctggacagcgacttcctggccgtgctgagtgactaccccagcccagacatcagcccccccatcttccggcggggggagaagctgcgggtcatcagtgatgagggcggctggtggaaggccatcagcctgagcacaggccgggagagctacatccctggcatctgtgtggcccgggtgtaccacggctggctgtttgagggcctgggccgctag

SEQ ID NO: 171592 - DNA, 45 bp, synthetic construct
  misc_feature 1..45: note = Description of Artificial Sequence: Synthetic coding sequence
  source 1..45: mol_type = other DNA
atgggcaacagcatgaagagcaccccagccccagctgagaggtag

SEQ ID NO: 171593 - DNA, 150 bp, synthetic construct
  misc_feature 1..150: note = Description of Artificial Sequence: Synthetic coding sequence
  source 1..150: mol_type = other DNA
atgggcaacagcatgaagagcaccccagccccagctgagcggcccctgcccaaccctgagggcctggacagcgacttcctggccgtgctgagtgactaccccagcccagacatcagcccccccatcttccggcggggggagaagctgtag

SEQ ID NO: 171594 - DNA, 477 bp, synthetic construct
  misc_feature 1..477: note = Description of Artificial Sequence: Synthetic coding sequence
  source 1..477: mol_type = other DNA
atgggcaacagcatgaagagcaccccagccccagctgagcggcccctgcccaaccctgagggcctggacagcgacttcctggccgtgctgagtgactaccccagcccagacatcagcccccccatcttccggcggggggagaagctgcgggtcatcagtgatgagggcggctggtggaaggccatcagcctgagcacaggccgggagagctacatccctggcatctgtgtggcccgggtgtaccacggctggctgtttgagggcctgggccgggacaaggccgaggagctgctgcagctgcctgacaccaaggtgggcagcttcatgatccgggagagcgagaccaagaagggcttctacagcctgtctgtgcgccaccggcaggtgaagcactaccgcatcttccggctgcccaacaactggtactacatcagcccccggctgaccttccagtgcctggaggacctggtgaactag

SEQ ID NO: 171595 - DNA, 123 bp, synthetic construct
  misc_feature 1..123: note = Description of Artificial Sequence: Synthetic coding sequence
  source 1..123: mol_type = other DNA
atgggcaacagcatgaagagcaccccagccccagctgagcggcccctgcccaaccctgagggcctggacagcgacttcctggccgtgctgagtgactaccccagcccagacatcagcccctag

SEQ ID NO: 171596 - DNA, 786 bp, synthetic construct
  misc_feature 1..786: note = Description of Artificial Sequence: Synthetic coding sequence
  source 1..786: mol_type = other DNA
atgggcagcctgcccagcaggaggaagagcctgcccagccccagcctgagcagctctgtgcagggccagggccctgtgaccatggaggccgagaggagcaaggccacagctgtggccctgggcagcttccctgctgggggccctgctgagctgagcctgcggctgggggagcccctgaccatcgtgtctgaagatggagactggtggacagtgctgtctgaggtgtctggccgggagtacaacatccccagcgtgcacgtggccaaggtgagccacggctggctgtatgagggcctgagccgggagaaggccgaggagctgctgctgctgcccggcaaccctgggggcgccttcctgatccgggagagccagacccggcggggcagctacagcctgtctgtgcggctgagcaggcctgcctcctgggaccgcatccgccactaccgcatccactgcctggacaatggctggctgtacatcagcccccggctgaccttccccagcctgcaggccctggtggaccactacagcgagctggctgatgacatctgctgcctgctgaaggagccctgtgtgctgcagagagctggccccctgcccgggaaggacatccccctgcctgtgacagtgcagaggacccccctgaactggaaggagctggacagcagcctgctcttcagcgaggccgccactggagaggagagcctgctgtctgagggcctgcgggagagcctgtccttctacatcagcctgaatgatgaagctgtgtccctggatgatgcctag

SEQ ID NO: 171597 - DNA, 633 bp, synthetic construct
  misc_feature 1..633: note = Description of Artificial Sequence: Synthetic coding sequence
  source 1..633: mol_type = other DNA
atgggcagcctgcccagcaggaggaagagcctgcccagccccagcctgagcagctctgtgcagggccagggccctgtgaccatggaggccgagaggagcaaggccacagctgtggccctgggcagcttccctgctgggggccctgctgagctgagcctgcggctgggggagcccctgaccatcgtgtctgaagatggagactggtggacagtgctgtctgaggtgtctggccgggagtacaacatccccagcgtgcacgtggccaaggtgagccacggctggctgtatgagggcctgagccgggagaaggccgaggagctgctgctgctgcccggcaaccctgggggcgccttcctgatccgggagagccagacccggcggggcagctacagcctgtctgtgcggctgagcaggcctgcctcctgggaccgcatccgccactaccgcatccactgcctggacaatggctggctgtacatcagcccccggctgaccttccccagcctgcaggccctggtggaccactacagcgagggctggccagccccctggcagggctacacccccacctgtgactgtgccgaggacaccacccagctggagagagctggccagctgccccctgtgttctag

SEQ ID NO: 171598 - DNA, 3840 bp, synthetic construct
  misc_feature 1..3840: note = Description of Artificial Sequence: Synthetic coding sequence
  source 1..3840: mol_type = other DNA
atgaccctgacagagcggctgcgggagaagatcagccgggccttctacaaccacggcctgctgtgtgccagctaccccatccccatcatcctcttcaccggcttctgcatcctggcctgctgctaccccctgctgaagctgcccctgcccggcaccggccctgtggagttcaccacccctgtgaaggactacagccccccacctgtggacagcgacaggaagcagggcgagcccacagagcagcctgagtggtacgtgggcgcccctgtggcctacgtgcagcagatctttgtgaagagctctgtgttcccctggcacaagaacctgctggccgtggatgtgttccgcagccccctgagccgggccttccagctggtggaggagatccggaaccacgtgctgcgggacagcagcggcatccgcagcctggaggagctgtgcctgcaggtgacagacctgctgcccggcctgaggaagctgaggaacctgctgcctgagcacggctgcctgctgctgagccctggcaacttctggcagaatgactgggagcgcttccacgccgaccctgacatcatcggcaccatccaccagcacgagcccaagaccctgcagaccagcgccaccctgaaggacctgctgtttggagtgcctgggaagtacagcggcgtgtccctgtacaccaggaagaggatggtgtcctacaccatcaccctggtgttccagcactaccacgccaagttcctgggcagcctgcgggcccggctgatgctgctgcaccccagccccaactgcagcctgcgggcagagagcctggtgcacgtgcacttcaaggaggagattggagtggccgagctgatccccctggtgaccacctacatcatcctgtttgcctacatctacttcagcaccaggaagattgacatggtgaagagcaagtggggcctggccctggccgctgtggtgacagtgctgagcagcctgctgatgtctgtgggcctgtgcaccctgtttggcctgacccccaccctgaatggaggagagatcttcccctacctggtggtggtgattggcctggagaatgtgctggtgctgaccaagtctgtggtgtccacccctgtggacctggaggtgaagctgagaattgcccagggcctgagcagcgagagctggagcatcatgaagaacatggccacagagctgggcatcatcctgattggctacttcaccctggtgcctgccatccaggagttctgcctgtttgctgtggtgggcctggtgtctgacttcttcctgcagatgctgttcttcaccaccgtgctgagcattgacatccggaggatggagctggccgacctgaacaagaggctgcccccagaggcctgcctgcccagcgccaagcctgtgggccagcccaccaggtatgaaaggcagctggccgtgcggcccagcaccccccacaccatcaccctgcagcccagcagcttcaggaacctgcggctgcccaagaggctgcgggtggtgtacttcctggcccggacccggctggcccagaggctcatcatggccggcaccgtggtgtggattggcatcctggtgtacacagatcctgctggcctgaggaactacctggccgcccaggtgacagagcagagccccctgggggagggcgccctggcccccatgcctgtgcccagcggcatgctgccccccagccacccagaccctgccttcagcatcttccccccagatgcccccaagctgcctgagaaccagaccagccctggagagagccctgagcggggcggccctgctgaggtggtgcatgacagccctgtgcctgaggtgacctggggcccagaagatgaggagctgtggaggaagctgtccttccgccactggcccaccctcttctcctactacaacatcaccctggccaagcgctacatcagcctgctgcctgtgattcctgtgaccctgcggctgaacccccgggaggccctggagggccgccacccccaggacggccgcagcgcctggcccccacctggccccatcccagctggccactgggaggccggccccaagggccctggaggagtgcaggcccatggagatgtgaccctgtacaaggtggccgccctgggcctggccaccggcatcgtgctggtgctgctgctgctgtgcctgtacagagtgctgtgccccaggaactacggccagctgggcggcggccctggaagaagaagaagaggagagctgccctgtgatgattatggctacgcccctcctgagacagaaattgtgcccctggtgctgcggggccacctgatggacatcgagtgcctggccagtgatggcatgctgctggtgtcctgctgcctggccggccacgtgtgtgtgtgggatgcccagacaggagactgcctgacccgcatccccaggcctggccggcagaggcgggacagcggcgtgggcagcggcctggaggcccaggagagctgggagcggctgagtgatggcggcaaggccggccctgaggagcccggggacagcccccccctgcggcaccggccccggggccccccaccacccagcctgtttggagaccagcctgacctgacctgcctgattgacaccaacttcagcgcccagcccaggagcagccagcccacccagcctgagcccaggcacagagctgtgtgtggccgcagccgggacagccctggctatgacttcagctgcctggtgcagagggtgtaccaggaggagggcctggccgctgtgtgcaccccagccctgcggccccccagccctggccctgtgctgagccaggccccagaagatgagggcggcagccctgagaagggcagccccagcctggcctgggcccccagcgctgagggcagcatctggagcctggagctgcagggcaacctgattgtggtgggccgcagcagcggccgcctggaggtgtgggatgccattgaaggagtgctgtgctgcagcagcgaggaggtgagcagcggcatcacagccctggtgttcctggacaagagaattgtggccgcccggctgaatggcagcctggacttcttcagcctggagacccacacagccctgagccccctgcagttccggggcaccccaggccggggcagcagccctgccagccctgtgtacagcagcagtgacacagtggcctgccacctgacccacacagtgccctgtgcccaccagaagcccatcacagccctgaaggctgctgctggccgcctggtgacaggcagccaggaccacaccctgcgggtcttccggctggaggacagctgctgcctcttcaccctgcagggccacagcggggccatcaccaccgtgtacatcgaccagaccatggtgctggccagcggcggccaggatggagccatctgcctgtgggatgtgctgaccggcagccgggtgagccacgtgtttgcccacagaggagatgtgaccagcctgacctgcaccaccagctgtgtgatcagcagcggcctggatgacctgatcagcatctgggacaggagcacaggcatcaagttctacagcatccagcaggacctgggctgtggggccagcctgggcgtcatcagtgacaacctgctggtgactggaggccagggctgtgtgtccttctgggacctgaactatggagacctgctgcagacagtgtacctgggcaagaacagcgaggcccagcctgcccggcagatcctggtgctggacaatgctgccatcgtgtgcaactttggcagcgagctgagcctggtgtatgtgcccagcgtgctggagaagctggactag

SEQ ID NO: 171599 - DNA, 2316 bp, synthetic construct
  misc_feature 1..2316: note = Description of Artificial Sequence: Synthetic coding sequence
  source 1..2316: mol_type = other DNA
atgaccctgacagagcggctgcgggagaagatcagccgggccttctacaaccacggcctgctgtgtgccagctaccccatccccatcatcctcttcaccggcttctgcatcctggcctgctgctaccccctgctgaagctgcccctgcccggcaccggccctgtggagttcaccacccctgtgaaggactacagccccccacctgtggacagcgacaggaagcagggcgagcccacagagcagcctgagtggtacgtgggcgcccctgtggcctacgtgcagcagatctttgtgaagagctctgtgttcccctggcacaagaacctgctggccgtggatgtgttccgcagccccctgagccgggccttccagctggtggaggagatccggaaccacgtgctgcgggacagcagcggcatccgcagcctggaggagctgtgcctgcaggtgacagacctgctgcccggcctgaggaagctgaggaacctgctgcctgagcacggctgcctgctgctgagccctggcaacttctggcagaatgactgggagcgcttccacgccgaccctgacatcatcggcaccatccaccagcacgagcccaagaccctgcagaccagcgccaccctgaaggacctgctgtttggagtgcctgggaagtacagcggcgtgtccctgtacaccaggaagaggatggtgtcctacaccatcaccctggtgttccagcactaccacgccaagttcctgggcagcctgcgggcccggctgatgctgctgcaccccagccccaactgcagcctgcgggcagagagcctggtgcacgtgcacttcaaggaggagattggagtggccgagctgatccccctggtgaccacctacatcatcctgtttgcctacatctacttcagcaccaggaagattgacatggtgaagagcaagtggggcctggccctggccgctgtggtgacagtgctgagcagcctgctgatgtctgtgggcctgtgcaccctgtttggcctgacccccaccctgaatggaggagagatcttcccctacctggtggtggtgattggcctggagaatgtgctggtgctgaccaagtctgtggtgtccacccctgtggacctggaggtgaagctgagaattgcccagggcctgagcagcgagagctggagcatcatgaagaacatggccacagagctgggcatcatcctgattggctacttcaccctggtgcctgccatccaggagttctgcctgtttgctgtggtgggcctggtgtctgacttcttcctgcagatgctgttcttcaccaccgtgctgagcattgacatccggaggatggagctggccgacctgaacaagaggctgcccccagaggcctgcctgcccagcgccaagcctgtgggccagcccaccaggtatgaaagaagcagcggccgcctggaggtgtgggatgccattgaaggagtgctgtgctgcagcagcgaggaggtgagcagcggcatcacagccctggtgttcctggacaagagaattgtggccgcccggctgaatggcagcctggacttcttcagcctggagacccacacagccctgagccccctgcagttccggggcaccccaggccggggcagcagccctgccagccctgtgtacagcagcagtgacacagtggcctgccacctgacccacacagtgccctgtgcccaccagaagcccatcacagccctgaaggctgctgctggccgcctggtgacaggcagccaggaccacaccctgcgggtcttccggctggaggacagctgctgcctcttcaccctgcagggccacagcggggccatcaccaccgtgtacatcgaccagaccatggtgctggccagcggcggccaggatggagccatctgcctgtgggatgtgctgaccggcagccgggtgagccacgtgtttgcccacagaggagatgtgaccagcctgacctgcaccaccagctgtgtgatcagcagcggcctggatgacctgatcagcatctgggacaggagcacaggcatcaagttctacagcatccagcaggacctgggctgtggggccagcctgggcgtcatcagtgacaacctgctggtgactggaggccagggctgtgtgtccttctgggacctgaactatggagacctgctgcagacagtgtacctgggcaagaacagcgaggcccagcctgcccggcagatcctggtgctggacaatgctgccatcgtgtgcaactttggcagcgagctgagcctggtgtatgtgcccagcgtgctggagaagctggactag

SEQ ID NO: 171600 - DNA, 2718 bp, synthetic construct
  misc_feature 1..2718: note = Description of Artificial Sequence: Synthetic coding sequence
  source 1..2718: mol_type = other DNA
atgaccctgacagagcggctgcgggagaagatcagccgggccttctacaaccacggcctgctgtgtgccagctaccccatccccatcatcctgattggctacttcaccctggtgcctgccatccaggagttctgcctgtttgctgtggtgggcctggtgtctgacttcttcctgcagatgctgttcttcaccaccgtgctgagcattgacatccggaggatggagctggccgacctgaacaagaggctgcccccagaggcctgcctgcccagcgccaagcctgtgggccagcccaccaggtatgagcggcagctggccgtgcggcccagcaccccccacaccatcaccctgcagcccagcagcttcaggaacctgcggctgcccaagaggctgcgggtggtgtacttcctggcccggacccggctggcccagaggctcatcatggccggcaccgtggtgtggattggcatcctggtgtacacagatcctgctggcctgaggaactacctggccgcccaggtgacagagcagagccccctgggggagggcgccctggcccccatgcctgtgcccagcggcatgctgccccccagccacccagaccctgccttcagcatcttccccccagatgcccccaagctgcctgagaaccagaccagccctggagagagccctgagcggggcggccctgctgaggtggtgcatgacagccctgtgcctgaggtgacctggggcccagaagatgaggagctgtggaggaagctgtccttccgccactggcccaccctcttctcctactacaacatcaccctggccaagcgctacatcagcctgctgcccgtcatccctgtgaccctgcggctgaacccccgggaggccctggagggccgccacccccaggacggccgcagcgcctggcccccacctggccccatcccagctggccactgggaggccggccccaagggccctgggggcgtgcaggcccatggagatgtgaccctgtacaaggtggccgccctgggcctggccactggaattgtgctggtgctgctgctgctgtgcctgtacagagtgctgtgccccagaaattatggccagctgggcggcggccctggaagaagaagaagaggagagctgccctgtgatgattatggctacgcccctcctgagacagagatcgtgcccctggtgctgcggggccacctgatggacattgaatgtctggccagtgatggcatgctgctggtgtcctgctgcctggccggccacgtgtgtgtgtgggatgcccagacaggagactgcctgacccgcatcccccggcccggccagaggcgggacagcggcgtgggcagcggcctggaggcccaggagagctgggagcggctgagtgatggcggcaaggccggccctgaggagcccggggacagcccccccctgcggcaccggccccggggccccccaccacccagcctgtttggagaccagcctgacctgacctgcctgattgacaccaacttcagcgcccagcccaggagcagccagcccacccagcctgagcccaggcacagagctgtgtgtggccgcagccgggacagccctggctatgacttcagctgcctggtgcagagggtgtaccaggaggagggcctggccgctgtgtgcaccccagccctgcggccccccagccctggccctgtgctgagccaggccccagaagatgagggcggcagccctgagaagggcagccccagcctggcctgggcccccagcgctgagggcagcatctggagcctggagctgcagggcaacctgattgtggtgggccgcagcagcggccgcctggaggtgtgggatgccattgaaggagtgctgtgctgcagcagcgaggaggtgagcagcggcatcacagccctggtgttcctggacaagagaattgtggccgcccggctgaatggcagcctggacttcttcagcctggagacccacacagccctgagccccctgcagttccggggcaccccaggccggggcagcagccctgccagccctgtgtacagcagcagtgacacagtggcctgccacctgacccacacagtgccctgtgcccaccagaagcccatcacagccctgaaggctgctgctggccgcctggtgacaggcagccaggaccacaccctgcgggtcttccggctggaggacagctgctgcctcttcaccctgcagggccacagcggggccatcaccaccgtgtacatcgaccagaccatggtgctggccagcggcggccaggatggagccatctgcctgtgggatgtgctgaccggcagccgggtgagccacgtgtttgcccacagaggagatgtgaccagcctgacctgcaccaccagctgtgtgatcagcagcggcctggatgacctgatcagcatctgggacaggagcacaggcatcaagttctacagcatccagcaggacctgggctgtggggccagcctgggcgtcatcagtgacaacctgctggtgactggaggccagggctgtgtgtccttctgggacctgaactatggagacctgctgcagacagtgtacctgggcaagaacagcgaggcccagcctgcccggcagatcctggtgctggacaatgctgccatcgtgtgcaactttggcagcgagctgagcctggtgtatgtgcccagcgtgctggagaagctggactag

SEQ ID NO: 171601 - DNA, 1059 bp, synthetic construct
  misc_feature 1..1059: note = Description of Artificial Sequence: Synthetic coding sequence
  source 1..1059: mol_type = other DNA
atggtgaagagcaagtggggcctggccctggccgctgtggtgacagtgctgagcagcctgctgatgtctgtgggcctgtgcaccctgtttggcctgacccccaccctgaatggaggagagatcttcccctacctggtggtggtgattggcctggagaatgtgctggtgctgaccaagtctgtggtgtccacccctgtggacctggaggtgaagctgcgcatcgcccagggcctgagcagcgagagctggagcatcatgaagaacatggccacagagctgggcatcatcctgattggctacttcaccctggtgcctgccatccaggagttctgcctgtttgctgtggtgggcctggtgtctgacttcttcctgcagatgctgttcttcaccaccgtgctgagcattgacatccggaggatggagctggccgacctgaacaagaggctgcccccagaggcctgcctgcccagcgccaagcctgtgggccagcccaccaggtatgagcggcagctggccgtgcggcccagcaccccccacaccatcaccctgcagcccagcagcttcaggaacctgcggctgcccaagaggctgcgggtggtgtacttcctggcccccaccggggcccacacctgctgggccctgggcagcaggacccagggcccccgctggggcgccggcccctggaggagacatgctgtgcagggcggcggggccggccctggccaccgccaccggctgggcgctgctgctgccctgcccctgccccgggccatgcctgcccagctgcgggctgctggctggtgggcccgggctgctgaggcccggggagctgccctgcggcggctgcggctgtgtgccaccagagatggagacagagctgcctgtgccgcccggccccctcatggccaccgggtgcccggccagaggagacatgctgctggggagctgctgcccggccggccccggctgcgggtgggccgggctgaccggggcctgcccaatgcccacagcgccccccggcaggccgcccctggccagtggaggggccagagggcctag

SEQ ID NO: 171602 - DNA, 411 bp, synthetic construct
  misc_feature 1..411: note = Description of Artificial Sequence: Synthetic coding sequence
  source 1..411: mol_type = other DNA
atgaccctgacagagcggctgcgggagaagatcagccgggccttctacaaccacggcctgctgtgtgccagctaccccatccccatcatcctcttcaccggcttctgcatcctggcctgctgctaccccctgctgaagctgcccctgcccggcaccggccctgtggagttcaccacccctgtgaaggactacagccccccacctgtggacagcgacaggaagcagggcgagcccacagagcagcctgagtggtacgtgggcgcccctgtggcctacgtgcagcagatctttgtgaagagctctgtgttcccctggcacaagaacctgctggccgtggatgtgttccgcagccccctgagccgggccttccagctggtggaggagatccggaaccacgtgctgcgggactag

SEQ ID NO: 171603 - DNA, 3072 bp, synthetic construct
  misc_feature 1..3072: note = Description of Artificial Sequence: Synthetic coding sequence
  source 1..3072: mol_type = other DNA
atgctgctgcaccccagccccaactgcagcctgcgggcagagagcctggtgcacgtgcacttcaaggaggagattggagtggccgagctgatccccctggtgaccacctacatcatcctgtttgcctacatctacttcagcaccaggaagattgacatggtgaagagcaagtggggcctggccctggccgctgtggtgacagtgctgagcagcctgctgatgtctgtgggcctgtgcaccctgtttggcctgacccccaccctgaatggaggagagatcttcccctacctggtggtggtgattggcctggagaatgtgctggtgctgaccaagtctgtggtgtccacccctgtggacctggaggtgaagctgcgcatcgcccagggcctgagcagcgagagctggagcatcatgaagaacatggccacagagctgggcatcatcctgattggctacttcaccctggtgcctgccatccaggagttctgcctgtttgctgtggtgggcctggtgtctgacttcttcctgcagatgctgttcttcaccaccgtgctgagcattgacatccggaggatggagctggccgacctgaacaagaggctgcccccagaggcctgcctgcccagcgccaagcctgtgggccagcccaccaggtatgagcggcagctggccgtgcggcccagcaccccccacaccatcaccctgcagcccagcagcttcaggaacctgcggctgcccaagaggctgcgggtggtgtacttcctggcccggacccggctggcccagaggctcatcatggccggcaccgtggtgtggattggcatcctggtgtacacagatcctgctggcctgaggaactacctggccgcccaggtgacagagcagagccccctgggggagggcgccctggcccccatgcctgtgcccagcggcatgctgccccccagccacccagaccctgccttcagcatcttccccccagatgcccccaagctgcctgagaaccagaccagccctggagagagccctgagcggggcggccctgctgaggtggtgcatgacagccctgtgcctgaggtgacctggggcccagaagatgaggagctgtggaggaagctgtccttccgccactggcccaccctcttctcctactacaacatcaccctggccaagcgctacatcagcctgctgcccgtcatccctgtgaccctgcggctgaacccccgggaggccctggagggccgccacccccaggacggccgcagcgcctggcccccacctggccccatcccagctggccactgggaggccggccccaagggccctgggggcgtgcaggcccatggagatgtgaccctgtacaaggtggccgccctgggcctggccactggaattgtgctggtgctgctgctgctgtgcctgtacagagtgctgtgccccagaaattatggccagctgggcggcggccctggaagaagaagaagaggagagctgccctgtgatgattatggctacgcccctcctgagacagagatcgtgcccctggtgctgcggggccacctgatggacattgaatgtctggccagtgatggcatgctgctggtgtcctgctgcctggccggccacgtgtgtgtgtgggatgcccagacaggagactgcctgacccgcatcccccggcccggccagaggcgggacagcggcgtgggcagcggcctggaggcccaggagagctgggagcggctgagtgatggcggcaaggccggccctgaggagcccggggacagcccccccctgcggcaccggccccggggccccccaccacccagcctgtttggagaccagcctgacctgacctgcctgattgacaccaacttcagcgcccagcccaggagcagccagcccacccagcctgagcccaggcacagagctgtgtgtggccgcagccgggacagccctggctatgacttcagctgcctggtgcagagggtgtaccaggaggagggcctggccgctgtgtgcaccccagccctgcggccccccagccctggccctgtgctgagccaggccccagaagatgagggcggcagccctgagaagggcagccccagcctggcctgggcccccagcgctgagggcagcatctggagcctggagctgcagggcaacctgattgtggtgggccgcagcagcggccgcctggaggtgtgggatgccattgaaggagtgctgtgctgcagcagcgaggaggtgagcagcggcatcacagccctggtgttcctggacaagagaattgtggccgcccggctgaatggcagcctggacttcttcagcctggagacccacacagccctgagccccctgcagttccggggcaccccaggccggggcagcagccctgccagccctgtgtacagcagcagtgacacagtggcctgccacctgacccacacagtgccctgtgcccaccagaagcccatcacagccctgaaggctgctgctggccgcctggtgacaggcagccaggaccacaccctgcgggtcttccggctggaggacagctgctgcctcttcaccctgcagggccacagcggggccatcaccaccgtgtacatcgaccagaccatggtgctggccagcggcggccaggatggagccatctgcctgtgggatgtgctgaccggcagccgggtgagccacgtgtttgcccacagaggagatgtgaccagcctgacctgcaccaccagctgtgtgatcagcagcggcctggatgacctgatcagcatctgggacaggagcacaggcatcaagttctacagcatccagcaggacctgggctgtggggccagcctgggcgtcatcagtgacaacctgctggtgactggaggccagggctgtgtgtccttctgggacctgaactatggagacctgctgcagacagtgtacctgggcaagaacagcgaggcccagcctgcccggcagatcctggtgctggacaatgctgccatcgtgtgcaactttggcagcgagctgagcctggtgtatgtgcccagcgtgctggagaagctggactag

SEQ ID NO: 171604 - DNA, 267 bp, synthetic construct
  misc_feature 1..267: note = Description of Artificial Sequence: Synthetic coding sequence
  source 1..267: mol_type = other DNA
atgaccctgacagagcggctgcgggagaagatcagccgggccttctacaaccacggcctgctgtgtgccagctaccccatccccatcatcctcttcaccggcttctgcatcctggcctgctgctaccccctgctgaagctgcccctgcccggcaccggccctgtggagttcaccacccctgtgaaggactacagccccccacctgtggacagcgacaggaagcagggcgagcccacagagcagcctgagtgggtgggcaccaggtag

SEQ ID NO: 171605 - DNA, 399 bp, synthetic construct
  misc_feature 1..399: note = Description of Artificial Sequence: Synthetic coding sequence
  source 1..399: mol_type = other DNA
atgaccctgacagagcggctgcgggagaagatcagccgggccttctacaaccacggcctgctgtgtgccagctaccccatccccatcatcctcttcaccggcttctgcatcctggcctgctgctaccccctgctgaagctgcccctgcccggcaccggccctgtggagttcaccacccctgtgaaggactacagccccccacctgtggacagcgacaggaagcagggcgagcccacagagcagcctgagtggtacgtgggcgcccctgtggcctacgtgcagcagatctttgtgaagagctctgtgttcccctggcacaagaacctgctggccgtggatgtgttccgcagccccctgagccgggccttccagctggtggaggagatccggaaccactag

SEQ ID NO: 171606 - DNA, 2661 bp, synthetic construct
  misc_feature 1..2661: note = Description of Artificial Sequence: Synthetic coding sequence
  source 1..2661: mol_type = other DNA
atgaagaacatggccacagagctgggcatcatcctgattggctacttcaccctggtgcctgccatccaggagttctgcctgtttgctgtggtgggcctggtgtctgacttcttcctgcagatgctgttcttcaccaccgtgctgagcattgacatccggaggatggagctggccgacctgaacaagaggctgcccccagaggcctgcctgcccagcgccaagcctgtgggccagcccaccaggtatgaaaggcagctggccgtgcggcccagcaccccccacaccatcaccctgcagcccagcagcttcaggaacctgcggctgcccaagaggctgcgggtggtgtacttcctggcccggacccggctggcccagaggctcatcatggccggcaccgtggtgtggattggcatcctggtgtacacagatcctgctggcctgaggaactacctggccgcccaggtgacagagcagagccccctgggggagggcgccctggcccccatgcctgtgcccagcggcatgctgccccccagccacccagaccctgccttcagcatcttccccccagatgcccccaagctgcctgagaaccagaccagccctggagagagccctgagcggggcggccctgctgaggtggtgcatgacagccctgtgcctgaggtgacctggggcccagaagatgaggagctgtggaggaagctgtccttccgccactggcccaccctcttctcctactacaacatcaccctggccaagcgctacatcagcctgctgcctgtgattcctgtgaccctgcggctgaacccccgggaggccctggagggccgccacccccaggacggccgcagcgcctggcccccacctggccccatcccagctggccactgggaggccggccccaagggccctggaggagtgcaggcccatggagatgtgaccctgtacaaggtggccgccctgggcctggccaccggcatcgtgctggtgctgctgctgctgtgcctgtacagagtgctgtgccccaggaactacggccagctgggcggcggccctggaagaagaagaagaggagagctgccctgtgatgattatggctacgcccctcctgagacagaaattgtgcccctggtgctgcggggccacctgatggacatcgagtgcctggccagtgatggcatgctgctggtgtcctgctgcctggccggccacgtgtgtgtgtgggatgcccagacaggagactgcctgacccgcatccccaggcctggccagaggcgggacagcggcgtgggcagcggcctggaggcccaggagagctgggagcggctgagtgatggcggcaaggccggccctgaggagcccggggacagcccccccctgcggcaccggccccggggccccccaccacccagcctgtttggagaccagcctgacctgacctgcctgattgacaccaacttcagcgcccagcccaggagcagccagcccacccagcctgagcccaggcacagagctgtgtgtggccgcagccgggacagccctggctatgacttcagctgcctggtgcagagggtgtaccaggaggagggcctggccgctgtgtgcaccccagccctgcggccccccagccctggccctgtgctgagccaggccccagaagatgaaggaggcagccctgagaagggcagccccagcctggcctgggcccccagcgctgagggcagcatctggagcctggagctgcagggcaacctgattgtggtgggccgcagcagcggccgcctggaggtgtgggatgccatcgagggcgtgctgtgctgcagcagcgaggaggtgagcagcggcatcacagccctggtgttcctggacaagagaattgtggccgcccggctgaatggcagcctggacttcttcagcctggagacccacacagccctgagccccctgcagttccggggcaccccaggccggggcagcagccctgccagccctgtgtacagcagcagtgacacagtggcctgccacctgacccacacagtgccctgtgcccaccagaagcccatcacagccctgaaggctgctgctggccgcctggtgacaggcagccaggaccacaccctgcgggtcttccggctggaggacagctgctgcctcttcaccctgcagggccacagcggggccatcaccaccgtgtacatcgaccagaccatggtgctggccagcggcggccaggatggagccatctgcctgtgggatgtgctgaccggcagccgggtgagccacgtgtttgcccacagaggagatgtgaccagcctgacctgcaccaccagctgtgtgatcagcagcggcctggatgacctgatcagcatctgggacaggagcacaggcatcaagttctacagcatccagcaggacctgggctgtggggccagcctgggcgtcatcagtgacaacctgctggtgactggaggccagggctgtgtgtccttctgggacctgaactacggggacctgctgcagacagtgtacctgggcaagaacagcgaggcccagcctgcccggcagatcctggtgctggacaatgctgccatcgtgtgcaactttggaagtgagctgagcctggtgtatgtgcccagcgtgctggagaagctggactag

SEQ ID NO: 171607 - DNA, 792 bp, synthetic construct
  misc_feature 1..792: note = Description of Artificial Sequence: Synthetic coding sequence
  source 1..792: mol_type = other DNA
atgctgctggcctgggtgcaggccttcctggtgagcaacatgctgctggccgaggcctacggcagcggcggctgcttctgggacaatggccacctgtaccgggaggaccagaccagccctgcccctggcctgcgctgcctgaactggctggatgcccagagcggcctggccagcgcccctgtgtctggggccggcaaccacagctactgcagaaatccagatgaggacccccggggcccctggtgctacgtgtctggagaggccggcgtgcctgagaagaggccctgtgaggacctgcgctgcccagagaccaccagccaggccctgcctgccttcaccacagagatccaggaggccagcgagggccctggagcagatgaggtgcaggtgtttgccccagccaatgccctgcctgcccggtctgaggccgctgctgtgcagcccgtcatcggcatcagccagagggtgaggatgaacagcaaggagaagaaggacctgggcaccctgggctacgtgctgggcatcaccatgatggtgatcatcatcgccatcggggccggcatcatcctgggctacagctacaagaggggcaaggacctgaaggagcagcacgaccagaaggtgtgtgagcgggagatgcagaggatcaccctgcccctgagcgccttcaccaaccccacctgtgagatcgtggatgagaagacagtggtggtgcacaccagccagacccctgtggacccccaggagggcaccacccccctgatgggccaggccggcacccctggggcctag

SEQ ID NO: 171608 - DNA, 1176 bp, synthetic construct
  misc_feature 1..1176: note = Description of Artificial Sequence: Synthetic coding sequence
  source 1..1176: mol_type = other DNA
atgtacagcatgatgatggagacagacctgcacagccctggaggagcccaggcccccaccaacctgagcggccctgctggggccggcggcggcggcggcggcggcggcggcggcggcggcggcggcggggccaaggccaaccaggacagagtgaagaggcccatgaatgccttcatggtgtggagccggggccagaggaggaagatggcccaggagaaccccaagatgcacaacagcgagatcagcaagaggctgggcgctgagtggaaggtgatgtctgaggccgagaagaggcccttcattgatgaggccaagaggctgcgggccctgcacatgaaggagcacccagactacaagtaccggcccaggaggaagaccaagaccctgctgaagaaggacaagtacagcctggccggcggcctgctggccgccggggccggcggcggcggcgctgctgtggccatgggcgtgggcgtgggcgtgggcgctgctgctgtgggccagaggctggagagccctggaggagctgctgggggcggctacgcccacgtgaatggctgggccaatggagcctacccaggctctgtggccgctgctgctgctgctgctgccatgatgcaggaggcccagctggcctacggccagcaccctggagctggaggagcccacccccacgcccacccagcccacccccacccccaccacccccacgcccacccccacaacccccagcccatgcacagatatgacatgggcgccctgcagtacagccccatcagcaacagccagggctacatgtctgccagccccagcggctatggaggcctgccctacggggctgctgctgctgctgctgctgctgctgggggcgcccaccagaacagcgctgtggccgctgctgctgctgctgctgctgccagcagcggggccctgggcgccctgggcagcctggtgaagtctgagcccagcggcagccccccagccccagcccacagccgggccccctgccctggggacctgcgggagatgatctccatgtacctgcctgctggggagggcggggaccctgctgctgctgctgctgctgctgcccagagccggctgcacagcctgccccagcactaccagggcgctggggccggcgtgaatggaacagtgcccctgacccacatctag

SEQ ID NO: 171609 - DNA, 1326 bp, synthetic construct
  misc_feature 1..1326: note = Description of Artificial Sequence: Synthetic coding sequence
  source 1..1326: mol_type = other DNA
atggtgcagcaggccgagagcctggaggccgagagcaacctgccccgggaggccctggacacagaggagggggagttcatggcctgcagccctgtggccctggatgaaagtgaccctgactggtgcaagacagccagcggccacatcaagaggcccatgaatgccttcatggtgtggagcaagattgaaagaaggaagatcatggagcagagcccagacatgcacaatgctgagatcagcaagaggctgggcaagcgctggaagatgctgaaggacagcgagaagatccccttcatccgggaggccgagcggctgcggctgaagcacatggctgactacccagactacaagtaccggcccaggaagaagcccaagatggaccccagcgccaagcccagcgccagccagagccctgagaagtctgctgctgggggcggcggcggcagcgctgggggcggggccggcggggccaagaccagcaagggcagcagcaagaagtgtgggaagctgaaggccccagctgctgctggggccaaggccggggccggcaaggccgcccagagcggggactatggaggagctggagatgattatgtgctgggcagcctgcgggtgtctggcagcggcggcggcggggccggcaagacagtgaagtgtgtgttcctggatgaagatgatgatgatgatgatgatgatgatgagctgcagctgcagatcaagcaggagccagatgaggaggatgaggagcccccccaccagcagctgctgcagcccccaggccagcagcccagccagctgctgcggcgctacaacgtggccaaggtgcctgccagccccaccctgagcagcagcgctgagagccctgagggcgccagcctgtatgatgaggtgcgggccggggccaccagcggggccggcggcggcagccggctgtactacagcttcaagaacatcaccaagcagcaccccccacccctggcccagcctgccctgagccctgccagcagccgctctgtgtccaccagcagcagcagcagcagcggcagcagcagcggcagcagcggggaggatgctgatgacctgatgtttgacctgagcctgaacttcagccagagcgcccacagcgccagcgagcagcagctgggcggcggcgctgctgctggcaacctgagcctgagcctggtggacaaggacctggacagcttcagcgagggcagcctgggcagccactttgagttcccagactactgcaccccagagctgtctgagatgattgctggggactggctggaggccaacttcagtgacctggtgttcacctactag

SEQ ID NO: 171610 - DNA, 948 bp, synthetic construct
  misc_feature 1..948: note = Description of Artificial Sequence: Synthetic coding sequence
  source 1..948: mol_type = other DNA
atggtgcagcagagaggagcccgggccaagagagatggcggccccccacctcctggccctggccctgctgaggagggcgcccgggagcccggctggtgcaagaccccatctggccacatcaagaggcccatgaatgccttcatggtgtggagccagcatgaaagaaggaagatcatggaccagtggccagacatgcacaatgctgagatcagcaagaggctgggccgccgctggcagctgctgcaggacagcgagaagatcccctttgtgcgggaggccgagcggctgcggctgaagcacatggctgactacccagactacaagtaccggcccaggaagaagagcaagggggccccagccaaggcccggccccggcccccaggcggcagcggcggcggcagccggctgaagccaggcccccagctgcccggccggggcggccggcgggctgctgggggccccctgggcggcggggccgccgccccagaagatgatgatgaagatgatgatgaggagctgctggaggtgcggctggtggagaccccaggccgggagctgtggaggatggtgcctgctggccgggccgcccggggccaggccgagcgggcccagggccccagcggggagggcgctgctgctgctgctgctgccagccccacccccagtgaagatgaggagcctgaggaggaggaggaggaggccgctgctgctgaggagggggaggaggagaccgtggccagcggggaggagagcctgggcttcctgagccggctgcccccaggccctgctggcctggactgcagcgccctggaccgggaccctgacctgcagccccccagcggcaccagccactttgagttcccagactactgcaccccagaggtgacagagatgattgctggggactggaggcccagcagcattgctgacctggtgttcacctactag

SEQ ID NO: 171611 - DNA, 948 bp, synthetic construct; identical to SEQ ID NO: 171610
  misc_feature 1..948: note = Description of Artificial Sequence: Synthetic coding sequence
  source 1..948: mol_type = other DNA

SEQ ID NO: 171612 - DNA, 1869 bp, synthetic construct
  misc_feature 1..1869: note = Description of Artificial Sequence: Synthetic coding sequence
  source 1..1869: mol_type = other DNA
atgtccatgaggagccccatcagcgcccagctggccctggatggagtgggcaccatggtgaactgcaccatcaagtctgaggagaagaaggagccctgccacgaggccccccagggcagcgccacagctgctgagccccagcccggggaccctgcccgggccagccaggacagcgctgacccccaggccccagcccagggcaacttccggggctcctgggactgcagcagccctgagggcaatggcagccctgagcccaagaggcctggggtgtctgaggccgccagcggcagccaggagaagctggacttcaacagaaacctgaaggaggtggtgcctgccatcgagaagctgctgagcagtgactggaaggagcgcttcctgggcaggaacagcatggaggccaaggatgtgaagggcacccaggagagcctggccgagaaggagctgcagctgctggtgatgatccaccagctgagcaccctgcgggaccagctgctgacagcccacagcgagcagaagaacatggccgccatgctgtttgagaagcagcagcagcagatggagctggcccggcagcagcaggagcagatcgccaagcagcagcagcagctgatccagcagcagcacaagatcaacctgctgcagcagcagatccagcaggtgaacatgccctacgtgatgatcccagccttcccccccagccaccagcccctgcctgtgaccccagacagccagctggccctgcccatccagcccatcccctgcaagcctgtggagtaccccctgcagctgctgcacagccccccagcccctgtggtgaagaggcctggggccatggccacccaccaccccctgcaggagcccagccagcccctgaacctgacagccaagcccaaggcccctgagctgcccaacaccagcagcagccccagcctgaagatgagcagctgtgtgccccggccccccagccatggaggccccacccgggacctgcagagcagcccccccagcctgcccctgggcttcctgggggagggagatgctgtgaccaaggccatccaggatgcccggcagctgctgcacagccacagcggggccctggatggcagccccaacacccccttcaggaaggacctgatcagcctggacagcagccctgccaaggagcggctggaggatggctgtgtgcaccccctggaggaggccatgctgagctgtgacatggatggcagccgccacttccctgagagcaggaacagcagccacatcaagaggcccatgaatgccttcatggtgtgggccaaggatgaaagaaggaagatcctgcaggccttcccagacatgcacaacagcagcatcagcaagatcctgggcagccgctggaagtccatgaccaaccaggagaagcagccctactatgaggagcaggcccggctgagccggcagcacctggagaagtacccagactacaagtacaagccccggcccaagaggacctgcatcgtggagggcaagaggctgcgggtgggggagtacaaggccctgatgaggacccggcggcaggatgcccggcagagctatgtgattcctccccaggccggccaggtgcagatgagcagcagtgatgtgctgtaccccagggctgctggcatgcccctggcccagcccctggtggagcactacgtgcccaggagcctggaccccaacatgcctgtgattgtgaacacctgcagcctgcgggaggagggggagggcacagatgacagacacagcgtggctgatggagagatgtaccgctacagtgaagatgaagattctgagggggaggagaagagtgatggagagctggtggtgctgacagactag

SEQ ID NO: 171613 - DNA, 174 bp, synthetic construct
  misc_feature 1..174: note = Description of Artificial Sequence: Synthetic coding sequence
  source 1..174: mol_type = other DNA
atgtccatgaggagccccatcagcgcccagctggccctggatggagtgggcaccatggtgaactgcaccatcaagtctgaggagaagaaggagccctgccacgaggccccccagggcagcgccacagctgctgagccccagcccggggaccctgcccgggccagccaggactag

SEQ ID NO: 171614 - DNA, 543 bp, synthetic construct
  misc_feature 1..543: note = Description of Artificial Sequence: Synthetic coding sequence
  source 1..543: mol_type = other DNA
atgtccatgaggagccccatcagcgcccagctggccctggatggagtgggcaccatggtgaactgcaccatcaagtctgaggagaagaaggagccctgccacgaggccccccagggcagcgccacagctgctgagccccagcccggggaccctgcccgggccagccaggacagcgctgacccccaggccccagcccagggcaacttccggggctcctgggactgcagcagccctgagggcaatggcagccctgagcccaagaggcctggggtgtctgaggccgccagcggcagccaggagaagctggacttcaacagaaacctgaaggaggtggtgcctgccatcgagaagctgctgagcagtgactggaaggagcgcttcctgggcaggaacagcatggaggccaaggatgtgaagggcacccaggagagcctggccgagaaggagctgcagctgctggtgatgatccaccagctgagcaccctgcgggaccagctgctgacagcccacagcgagcagaagaacatggccgccatgctgtag

SEQ ID NO: 171615 - DNA, 723 bp, synthetic construct
  misc_feature 1..723: note = Description of Artificial Sequence: Synthetic coding sequence
  source 1..723: mol_type = other DNA
atgagcaagcccagcgaccacatcaagaggcccatgaatgccttcatggtgtggagccggggccagaggaggaagatggcccaggagaaccccaagatgcacaacagcgagatcagcaagaggctgggcgctgagtggaagctgctgtctgaggccgagaagaggccctacattgatgaggccaagaggctgcgggcccagcacatgaaggagcacccagactacaagtaccggcccaggaggaagcccaagaacctgctgaagaaggaccgctacgtgttccccctgccctacctgggggacacagaccccctgaaggccgccggcctgcctgtgggcgccagtgatggcctgctgagcgcccctgagaaggcccgggccttcctgcccccagccagcgccccctacagcctgctggaccctgcccagttcagcagcagcgccatccagaagatgggagaggtgccccacaccctggccactggagccctgccctatgccagcaccctgggctaccagaatggagccttcggcagcctgagctgccccagccagcacacccacacccaccccagccccaccaaccctggctacgtggtgccctgcaactgcacagcctggagcgccagcaccctgcagccccctgtggcctacatcctcttccctggcatgaccaagacaggaattgacccctacagcagcgcccacgccacagccatgtag

SEQ ID NO: 171616 - DNA, 702 bp, synthetic construct
  misc_feature 1..702: note = Description of Artificial Sequence: Synthetic coding sequence
  source 1..702: mol_type = other DNA
atggccctgcccggcagcagccaggaccaggcctggagcctggagcccccagctgccacagctgctgccagcagcagcagcggcccccaggagcgggagggcgccggcagccctgctgcccctggcaccctgcccctggagaaggtgaagaggcccatgaatgccttcatggtgtggagcagcgcccagaggcggcagatggcccagcagaaccccaagatgcacaacagcgagatcagcaagaggctgggcgcccagtggaagctgctggatgaagatgagaagaggccctttgtggaggaggccaagaggctgcgggcccggcacctgcgggactacccagactacaagtaccggcccaggaggaaggccaagagcagtggagctggccccagccgctgtggccagggccggggcaacctggccagcggcggccccctgtggggccctggctacgccaccacccagcccagccggggcttcggctacagacctccttcctacagcacagcctacctgcccggcagctatggcagcagccactgcaagctggaggcccccagcccctgcagcctgccccagagcgacccccggctgcagggcgagctgctgcccacctacacccactacctgcccccaggcagccccaccccctacaacccccccctggccggggcccccatgcccctgacccacctgtag

SEQ ID NO: 171617 - DNA, 702 bp, synthetic construct; identical to SEQ ID NO: 171616
  misc_feature 1..702: note = Description of Artificial Sequence: Synthetic coding sequence
  source 1..702: mol_type = other DNA

SEQ ID NO: 171618 - DNA, 1245 bp, synthetic construct
  misc_feature 1..1245: note = Description of Artificial Sequence: Synthetic coding sequence
  source 1..1245: mol_type = other DNA
atgagcagcccagatgctggctacgccagtgatgaccagagccagacccagagcgccctgcctgctgtgatggccggcctgggcccctgcccctgggccgagagcctgagccccatcggggacatgaaggtgaagggggaggccccagccaacagcggggccccagctggagctgctggccgggccaagggggagagccgcatcagaagacccatgaatgccttcatggtgtgggccaaggatgagaggaagaggctggcccagcagaacccagacctgcacaatgctgagctgagcaagatgctgggcaagtcctggaaggccctgaccctggccgagaagaggccctttgtggaggaggccgagcggctgcgggtgcagcacatgcaggaccaccccaactacaagtaccggcccaggaggaggaagcaggtgaagaggctgaagagggtggagggcggcttcctgcacggcctggccgagccccaggccgccgccctgggccctgagggcggccgggtggccatggatggcctgggcctgcagtttcctgagcagggcttccctgctggcccccccctgctgcccccccacatgggcggccactacagagactgccagagcctgggcgccccacccctggatggctaccccctgcccaccccagacaccagccccctggatggagtggaccctgaccctgccttctttgctgcccccatgcctggggactgcccagctgctggcacctacagctatgcccaggtgtctgactatgccggccccccagagcccccagctggccccatgcacccccggctgggccctgagcctgctggccccagcatccctggcctgctggcccctccttctgccctgcacgtgtactatggagccatgggcagccctggagctgggggcggccggggcttccagatgcagccccagcaccagcaccagcaccagcaccagcaccaccccccaggccctggccagcccagccccccacctgaggccctgccctgcagagatggaacagaccccagccagcctgctgagctgctgggggaggtggacagaacagaatttgagcagtacctgcactttgtgtgcaagccagagatgggcctgccctaccagggccatgacagcggcgtgaacctgcctgacagccacggggccatcagctctgtggtgtctgatgccagcagcgctgtgtactactgcaactacccagatgtgtag

SEQ ID NO: 171619 - DNA, 1155 bp, synthetic construct
  misc_feature 1..1155: note = Description of Artificial Sequence: Synthetic coding sequence
  source 1..1155: mol_type = other DNA
atgcagaggagccccccaggctacggggcccaggatgaccccccagcccggcgggactgtgcctgggcccctggccacggggctgctgctgacacccggggcctggccgccggccctgctgccctggccgccccagctgccccagccagcccccccagcccccagaggagcccccccaggagccctgagcccggccgctatggcctgagccctgctggccgcggggagcggcaggccgcagatgagagccgcatccggcggcccatgaatgccttcatggtgtgggccaaggatgagaggaagaggctggcccagcagaacccagacctgcacaatgctgtgctgagcaagatgctgggcaaggcctggaaggagctgaatgctgctgagaagaggccctttgtggaggaggccgagcggctgcgggtgcagcacctgcgggaccaccccaactacaagtaccggcccaggaggaagaagcaggccaggaaggcccggcggctggagcccggcctgctgctgcccggcctggccccaccccagcccccacctgagcccttccctgctgccagcggcagcgcccgggccttccgggagctgccccccctgggcgctgagtttgatggcctgggcctgcccaccccagagaggagccccctggatggcctggagcctggagaggccgccttcttccccccacctgctgcccctgaggactgtgccctgcggcccttccgggccccctatgcccccacagagctgagccgggaccccggcggctgctacggggcccccctggccgaggccctgaggacagcccccccagctgcccccctggccggcctgtactacggcaccctgggcaccccaggcccctacccaggccccctgagccccccacctgaggccccacccctggagagcgctgagcccctgggccctgctgctgacctgtgggcagatgtggacctgacagaatttgaccagtacctgaactgcagcaggaccaggccagatgcccctggcctgccctaccacgtggccctggccaagctgggcccccgggccatgagctgcccagaggagagcagcctcatcagcgccctgagtgatgccagcagcgctgtgtactacagcgcctgcatctctggatag

SEQ ID NO: 171620 - DNA, 831 bp, synthetic construct
  misc_feature 1..831: note = Description of Artificial Sequence: Synthetic coding sequence
  source 1..831: mol_type = other DNA
atgagcaagcctgtggaccacgtgaagaggcccatgaatgccttcatggtgtggagccgggcccagaggaggaagatggcccaggagaaccccaagatgcacaacagcgagatcagcaagaggctgggcgctgagtggaagctgctgacagagagcgagaagaggcccttcattgatgaggccaagaggctgcgggccatgcacatgaaggagcacccagactacaagtaccggcccaggaggaagcccaagaccctgctgaagaaggacaagtttgccttccctgtgccctacggcctgggcggcgtggctgatgctgagcacccagccctgaaggccggggccggcctgcatgctggagctgggggcggcctggtgcctgagagcctgctggccaaccctgagaaggctgctgctgctgctgctgctgctgctgcccgggtcttcttcccccagagcgctgctgctgctgctgctgctgctgctgctgctgctgctggcagcccctacagcctgctggacctgggcagcaagatggccgagatcagcagcagcagcagcggcctgccctatgccagcagcctgggctaccccacagctggggccggggccttccacggggctgctgctgctgctgctgctgctgctgctgctgctgggggccacacccacagccaccccagccctggcaaccctggctacatgatcccctgcaactgcagcgcctggcccagccctggcctgcagccccccctggcctacatcctgctgcccggcatgggcaagccccagctggacccctacccagctgcctatgctgctgccctgtag

SEQ ID NO: 171621 - DNA, 1341 bp, synthetic construct
  misc_feature 1..1341: note = Description of Artificial Sequence: Synthetic coding sequence
  source 1..1341: mol_type = other DNA
atgaggcctgtgcgggagaacagcagcggggcccggagcccccgggtgcctgctgacctggcccggagcatcctgatcagcctgcccttccccccagacagcctggcccacaggcctcccagcagcgcccccacagagagccagggcctcttcaccgtggccgccccagcccctggggcccccagccccccagccaccctggcccacctgctgcctgccccagccatgtacagcctgctggagacagagctgaagaaccctgtgggcacccccacccaggccgccggcactggaggccctgctgcccctggaggagctgggaagagcagcgccaatgctgctgggggcgccaacagcggcggcggcagcagcggcggggccagcggcggcggcggcggcacagaccaggacagagtgaagaggcccatgaatgccttcatggtgtggagccggggccagaggaggaagatggccctggagaaccccaagatgcacaacagcgagatcagcaagaggctgggcgctgactggaagctgctgacagatgctgagaagaggcccttcattgatgaggccaagaggctgcgggctgtgcacatgaaggagtacccagactacaagtaccggcccaggaggaagaccaagaccctgctgaagaaggacaagtacagcctgcccagcggcctgctgcccccaggagctgctgctgctgctgctgctgctgctgctgctgctgctgctgccagcagccctgtgggcgtgggccagaggctggacacctacacccacgtgaatggctgggccaatggagcctacagcctggtgcaggagcagctgggctacgcccagccccccagcatgagcagccccccacctcctccagccctgccccccatgcacagatatgacatggccggcctgcagtacagccccatgatgcctcctggggcccagagctacatgaatgtggccgctgctgctgctgctgccagcggctatggaggcatggcccccagcgccacagctgctgctgctgctgcctacggccagcagcctgccacagctgctgctgctgctgctgctgctgctgccatgagcctgggccccatgggctctgtggtgaagtctgagcccagcagccccccaccagccatcgccagccacagccagagggcctgcctgggggacctgcgggacatgatctccatgtacctgcccccaggaggagatgctgctgatgctgccagccccctgcccggcggccgcctgcacggcgtgcaccagcactaccagggcgccggcacagctgtgaatggcaccgtgcccctgacccacatctag

SEQ ID NO: 171622 - DNA, 2253 bp, synthetic construct
  misc_feature 1..2253: note = Description of Artificial Sequence: Synthetic coding sequence
  source 1..2253: mol_type = other DNA
atgagcagcaagaggcctgccagcccctacggggaggctgatggagaggtggccatggtgaccagccggcagaaggtggaggaggaggagagtgatggcctgcctgccttccacctgcccctgcacgtgtccttccccaacaagccccacagcgaggagttccagcctgtgtccctgctgacccaggagacctgtggccacaggacccccaccagccagcacaacaccatggaggtggatggcaacaaggtgatgagcagctttgccccccacaacagcagcaccagcccccagaaggccgaggagggcggccggcagagcggggagagcctgagcagcacagccctgggcaccccagagaggaggaagggcagcctggctgatgtggtggacaccctgaagcagaggaagatggaggagctgatcaagaatgaacctgaggagacccccagcattgagaagctgctgagcaaggactggaaggacaagctgctggccatgggcagcggcaactttggagagatcaagggcaccccagagagcctggccgagaaggagcggcagctgatgggcatgatcaaccagctgaccagcctgcgggagcagctgctggccgcccatgatgagcagaagaagctggccgccagccagatcgagaagcagaggcagcagatggagctggccaagcagcagcaggagcagatcgcccggcagcagcagcagctgctgcagcagcagcacaagatcaacctgctgcagcagcagatccaggtgcagggccagctgccccccctgatgatccctgtgtttcctccagaccagaggaccctggccgccgccgcccagcagggcttcctgctgcccccaggcttctcctacaaggccggctgcagcgacccctaccctgtgcagctgatccccaccaccatggctgctgctgctgctgccaccccaggcctgggccccctgcagctgcagcagctgtatgctgcccagctggccgccatgcaggtgtcccctgggggcaagctgcccggcatcccccagggcaacctgggcgctgctgtgagccccaccagcatccacacagacaagagcaccaacagccccccacccaagagcaaggatgaggtggcccagcccctgaacctgagcgccaagcccaagaccagtgatggcaagagccccaccagccccaccagcccccacatgcctgccctgcgcatcaacagcggggccggccccctgaaggcctctgtgcctgctgccctggccagccccagcgcccgggtgtccaccatcggctacctgaatgaccatgatgctgtgaccaaggccatccaggaggcccggcagatgaaggagcagctgcggcgggagcagcaggtgctggatggcaaggtggccgtggtgaacagcctgggcctgaacaactgcaggacagagaaggagaagaccaccctggagagcctgacccagcagctggccgtgaagcagaatgaggagggcaagttcagccacgccatgatggacttcaacctgagcggggacagtgatggcagcgctggggtgtctgagagccgcatctaccgggagagccggggccggggcagcaatgagccccacatcaagaggcccatgaatgccttcatggtgtgggccaaggatgagaggaggaagatcctgcaggccttcccagacatgcacaacagcaacatcagcaagatcctgggcagccgctggaaggccatgaccaacctggagaagcagccctactatgaggagcaggcccggctgagcaagcagcacctggagaagtacccagactacaagtacaagccccggcccaagaggacctgcctggtggatggcaagaagctgagaattggagagtacaaggccatcatgaggaacagacggcaggagatgaggcagtacttcaacgtgggccagcaggcccagatccccatcgccacagctggggtggtgtacccaggggccatcgccatggccggcatgcccagcccccacctgcccagcgagcacagctctgtgagcagcagccctgagcccggcatgcctgtgatccagagcacctacggcgtgaagggggaggagccccacatcaaggaggagatccaggccgaggacatcaatggagagatctatgatgaatatgatgaggaggaggatgatcctgatgtggactatggcagtgacagcgagaaccacatcgccggccaggccaactag

SEQ ID NO: 171623 - DNA, 1929 bp, synthetic construct
  misc_feature 1..1929: note = Description of Artificial Sequence: Synthetic coding sequence
  source 1..1929: mol_type = other DNA
atgagcagcaagaggcctgccagcccctacggggaggctgatggagaggtggccatggtgaccagccggcagaaggtggaggaggaggagagtgatggcctgcctgccttccacctgcccctgcacgtgtccttccccaacaagccccacagcgaggagttccagcctgtgtccctgctgacccaggagacctgtggccacaggacccccaccagccagcacaacaccatggaggtggatggcaacaaggtgatgagcagctttgccccccacaacagcagcaccagcccccagaaggccgaggagggcggccggcagagcggggagagcctgagcagcacagccctgggcaccccagagaggaggaagggcagcctggctgatgtggtggacaccctgaagcagaggaagatggaggagctgatcaagaatgaacctgaggagacccccagcattgagaagctgctgagcaaggactggaaggacaagctgctggccatgggcagcggcaactttggagagatcaagggcaccccagagagcctggccgagaaggagcggcagctgatgggcatgatcaaccagctgaccagcctgcgggagcagctgctggccgcccatgatgagcagaagaagctggccgccagccagatcgagaagcagaggcagcagatggagctggccaagcagcagcaggagcagatcgcccggcagcagcagcagctgctgcagcagcagcacaagatcaacctgctgcagcagcagatccaggtgcagggccagctgccccccctgatgatccctgtgtttcctccagaccagaggaccctggccgccgccgcccagcagggcttcctgctgcccccaggcttctcctacaaggccggctgcagcgacccctaccctgtgcagctgatccccaccaccatggctgctgctgctgctgccaccccaggcctgggccccctgcagctgcagcagctgtatgctgcccagctggccgccatgcaggtgtcccctgggggcaagctgcccggcatcccccagggcaacctgggcgctgctgtgagccccaccagcatccacacagacaagagcaccaacagccccccacccaagagcaaggagaagaccaccctggagagcctgacccagcagctggccgtgaagcagaatgaggagggcaagttcagccacgccatgatggacttcaacctgagcggggacagtgatggcagcgctggggtgtctgagagccgcatctaccgggagagccggggccggggcagcaatgagccccacatcaagaggcccatgaatgccttcatggtgtgggccaaggatgagaggaggaagatcctgcaggccttcccagacatgcacaacagcaacatcagcaagatcctgggcagccgctggaaggccatgaccaacctggagaagcagccctactatgaggagcaggcccggctgagcaagcagcacctggagaagtacccagactacaagtacaagccccggcccaagaggacctgcctggtggatggcaagaagctgagaattggagagtacaaggccatcatgaggaacagacggcaggagatgaggcagtacttcaacgtgggccagcaggcccagatccccatcgccacagctggggtggtgtacccaggggccatcgccatggccggcatgcccagcccccacctgcccagcgagcacagctctgtgagcagcagccctgagcccggcatgcctgtgatccagagcacctacggcgtgaagggggaggagccccacatcaaggaggagatccaggccgaggacatcaatggagagatctatgatgaatatgatgaggaggaggatgatcctgatgtggactatggcagtgacagcgagaaccacatcgccggccaggccaactag

SEQ ID NO: 171624 - DNA, 1134 bp, synthetic construct
  misc_feature 1..1134: note = Description of Artificial Sequence: Synthetic coding sequence
  source 1..1134: mol_type = other DNA
atgcatgatgaggtggcccagcccctgaacctgagcgccaagcccaagaccagtgatggcaagagccccaccagccccaccagcccccacatgcctgccctgcgcatcaacagcggggccggccccctgaaggcctctgtgcctgctgccctggccagccccagcgcccgggtgtccaccatcggctacctgaatgaccatgatgctgtgaccaaggccatccaggaggcccggcagatgaaggagcagctgcggcgggagcagcaggtgctggatggcaaggtggccgtggtgaacagcctgggcctgaacaactgcaggacagagaaggagaagaccaccctggagagcctgacccagcagctggccgtgaagcagaatgaggagggcaagttcagccacgccatgatggacttcaacctgagcggggacagtgatggcagcgctggggtgtctgagagccgcatctaccgggagagccggggccggggcagcaatgagccccacatcaagaggcccatgaatgccttcatggtgtgggccaaggatgaaagaaggaagatcctgcaggccttcccagacatgcacaacagcaacatcagcaagatcctgggcagccgctggaaggccatgaccaacctggagaagcagccctactatgaggagcaggcccggctgagcaagcagcacctggagaagtacccagactacaagtacaagccccggcccaagaggacctgcctggtggatggcaagaagctgcgcatcggggagtacaaggccatcatgaggaacagacggcaggagatgaggcagtacttcaacgtgggccagcaggcccagatccccatcgccacagctggggtggtgtacccaggggccatcgccatggccggcatgcccagcccccacctgcccagcgagcacagctctgtgagcagcagccctgagcccggcatgcctgtgatccagagcacctatggagtgaagggggaggagccccacatcaaggaggagatccaggccgaggacatcaacggggagatctatgatgaatatgatgaggaggaggatgatcctgatgtggactatggcagtgacagcgagaaccacatcgccggccaggccaactag

SEQ ID NO: 171625 - DNA, 1764 bp, synthetic construct
  misc_feature 1..1764: note = Description of Artificial Sequence: Synthetic coding sequence
  source 1..1764: mol_type = other DNA
atgagcagcaagaggcctgccagcccctacggggaggctgatggagaggtggccatggtgaccagccggcagaaggtggaggaggaggagagtgatggcctgcctgccttccacctgcccctgcacgaggtggatggcaacaaggtgatgagcagctttgccccccacaacagcagcaccagcccccagaaggccgaggagggcggccggcagagcggggagagcctgagcagcacagccctgggcaccccagagaggaggaagggcagcctggctgatgtggtggacaccctgaagcagaggaagatggaggagctgatcaagaatgaacctgaggagacccccagcattgagaagctgctgagcaaggactggaaggacaagctgctggccatgggcagcggcaactttggagagatcaagggcaccccagagagcctggccgagaaggagcggcagctgatgggcatgatcaaccagctgaccagcctgcgggagcagctgctggccgcccatgatgagcagaagaagctggccgccagccagatcgagaagcagaggcagcagatggagctggccaagcagcagcaggagcagatcgcccggcagcagcagcagctgctgcagcagcagcacaagatcaacctgctgcagcagcagatccaggtgcagggccagctgccccccctgatgatccctgtgttccccccagaccagaggaccctggccgctgctgcccagcagggcttcctgctgcccccaggcttctcctacaaggccggctgcagcgacccctaccctgtgcagctgatccccaccaccatggctgctgctgctgctgccaccccaggcctgggccccctgcagctgcagcagctgtatgctgcccagctggccgccatgcaggtgtccccaggcggcaagctgcccggcatcccccagggcaacctgggcgctgctgtgagccccaccagcatccacacagacaagagcaccaacagccccccacccaagagcaaggatgaggtggcccagcccctgaacctgagcgccaagcccaagaccagtgatggcaagagccccaccagccccaccagcccccacatgcctgccctgcgcatcaacagcggggccggccccctgaaggcctctgtgcctgctgccctggccagccccagcgcccgggtgtccaccatcggctacctgaatgaccatgatgctgtgaccaaggccatccaggaggcccggcagatgaaggagcagctgcggcgggagcagcaggtgctggatggcaaggtggccgtggtgaacagcctgggcctgaacaactgcaggacagagaaggagaagaccaccctggagagcctgacccagcagctggccgtgaagcagaatgaggagggcaagttcagccacgccatgatggacttcaacctgagcggggacagtgatggcagcgctggggtgtctgagagccgcatctaccgggagagccggggccggggcagcaatgagccccacatcaagaggcccatgaatgccttcatggtgtgggccaaggatgaaagaaggaagatcctgcaggccttcccagacctgggcttcctgtgtgtgtgcatgtatgtgatcatggtgctgatcatcggcatcaccctggaccactgtgagctgaacccccacctgggcatgaagagccacatcctgcccagcgactggagcaggaacaacctggacctggactttgccctgcagatgaccacctag

SEQ ID NO: 171626 - DNA, 2292 bp, synthetic construct
  misc_feature 1..2292: note = Description of Artificial Sequence: Synthetic coding sequence
  source 1..2292: mol_type = other DNA
atgctgacagatcctgacctgccccaggagtttgagaggatgagcagcaagaggcctgccagcccctatggagaggctgatggagaggtggccatggtgaccagccggcagaaggtggaggaggaggagagtgatggcctgcctgccttccacctgcccctgcacgtgtccttccccaacaagccccacagcgaggagttccagcctgtgtccctgctgacccaggagacctgtggccacaggacccccaccagccagcacaacaccatggaggtggatggcaacaaggtgatgagcagctttgccccccacaacagcagcaccagcccccagaaggccgaggagggcggccggcagagcggggagagcctgagcagcacagccctgggcaccccagagaggaggaagggcagcctggctgatgtggtggacaccctgaagcagaggaagatggaggagctgatcaagaatgaacctgaggagacccccagcattgagaagctgctgagcaaggactggaaggacaagctgctggccatgggcagcggcaactttggagagatcaagggcaccccagagagcctggccgagaaggagcggcagctgatgggcatgatcaaccagctgaccagcctgcgggagcagctgctggccgcccatgatgagcagaagaagctggccgccagccagatcgagaagcagaggcagcagatggagctggccaagcagcagcaggagcagatcgcccggcagcagcagcagctgctgcagcagcagcacaagatcaacctgctgcagcagcagatccaggtgcagggccagctgccccccctgatgatccctgtgttccccccagaccagaggaccctggccgctgctgcccagcagggcttcctgctgcccccaggcttctcctacaaggccggctgcagcgacccctaccctgtgcagctgatccccaccaccatggctgctgctgctgctgccaccccaggcctgggccccctgcagctgcagcagctgtatgctgcccagctggccgccatgcaggtgtccccaggcggcaagctgcccggcatcccccagggcaacctgggcgctgctgtgagccccaccagcatccacacagacaagagcaccaacagccccccacccaagagcaaggatgaggtggcccagcccctgaacctgagcgccaagcccaagaccagtgatggcaagagccccaccagccccaccagcccccacatgcctgccctgcgcatcaacagcggggccggccccctgaaggcctctgtgcctgctgccctggccagccccagcgcccgggtgtccaccatcggctacctgaatgaccatgatgctgtgaccaaggccatccaggaggcccggcagatgaaggagcagctgcggcgggagcagcaggtgctggatggcaaggtggccgtggtgaacagcctgggcctgaacaactgcaggacagagaaggagaagaccaccctggagagcctgacccagcagctggccgtgaagcagaatgaggagggcaagttcagccacgccatgatggacttcaacctgagcggggacagtgatggcagcgctggggtgtctgagagccgcatctaccgggagagccggggccggggcagcaatgagccccacatcaagaggcccatgaatgccttcatggtgtgggccaaggatgaaagaaggaagatcctgcaggccttcccagacatgcacaacagcaacatcagcaagatcctgggcagccgctggaaggccatgaccaacctggagaagcagccctactatgaggagcaggcccggctgagcaagcagcacctggagaagtacccagactacaagtacaagccccggcccaagaggacctgcctggtggatggcaagaagctgcgcatcggggagtacaaggccatcatgaggaacagacggcaggagatgaggcagtacttcaacgtgggccagcaggcccagatccccatcgccacagctggggtggtgtacccaggggccatcgccatggccggcatgcccagcccccacctgcccagcgagcacagctctgtgagcagcagccctgagcccggcatgcctgtgatccagagcacctatggagtgaagggggaggagccccacatcaaggaggagatccaggccgaggacatcaacggggagatctatgatgaatatgatgaggaggaggatgatcctgatgtggactatggcagtgacagcgagaaccacatcgccggccaggccaactag

SEQ ID NO: 171627 - DNA, 1929 bp, synthetic construct; identical to SEQ ID NO: 171623
  misc_feature 1..1929: note = Description of Artificial Sequence: Synthetic coding sequence
  source 1..1929: mol_type = other DNA

SEQ ID NO: 171628 - DNA, 2253 bp, synthetic construct; identical to SEQ ID NO: 171622
  misc_feature 1..2253: note = Description of Artificial Sequence: Synthetic coding sequence
  source 1..2253: mol_type = other DNA

SEQ ID NO: 171629 - DNA, 2427 bp, synthetic construct
  misc_feature 1..2427: note = Description of Artificial Sequence: Synthetic coding sequence
  source 1..2427: mol_type = other DNA
atgagcagcaagcaggccaccagcccctttgcctgtgccgcagatggagaagatgccatgacccaggacctgaccagccgggagaaggaggagggcagtgaccagcacgtggccagccacctgcccctgcaccccatcatgcacaacaagccccacagcgaggagctgcccaccctggtgtccaccatccagcaggatgctgactgggacagcgtgctgagcagccagcagaggatggagagcgagaacaacaagctgtgcagcctgtacagcttcaggaacaccagcaccagcccccacaagccagatgagggcagccgggaccgggagatcatgacctctgtgaccttcggcaccccagagaggaggaagggcagcctggctgatgtggtggacaccctgaagcagaagaagctggaggagatgaccaggacagagcaggaggacagcagctgcatggagaagctgctgagcaaggactggaaggagaagatggagcggctgaacaccagcgagctgctgggggagatcaagggcaccccagagagcctggccgagaaggagcggcagctgagcaccatgatcacccagctgatcagcctgcgggagcagctgctggccgcccatgatgagcagaagaagctggccgccagccagatcgagaagcagaggcagcagatggacctggcccggcagcagcaggagcagatcgcccggcagcagcagcagctgctgcagcagcagcacaagatcaacctgctgcagcagcagatccaggtgcagggccacatgccacccctgatgatccccatcttcccccatgaccagaggaccctggccgctgctgctgctgcccagcagggcttcctgttccccccaggcatcacctacaagccaggggacaactaccctgtgcagttcatccccagcaccatggctgctgctgctgccagcggcctgagccccctgcagctgcagaagggccacgtgagccacccccagatcaaccagaggctgaagggcctgagtgaccgcttcggcaggaacctggacacctttgaacatggaggcggccacagctacaaccacaagcagatcgagcagctgtatgctgcccagctggcctccatgcaggtgtcccctggggccaagatgcccagcaccccccagccccccaacacagctggcaccgtgagccccaccggcatcaagaatgagaagaggggcaccagccctgtgacccaggtgaaggatgaggccgccgcccagcccctgaacctgagcagccggcccaagacagctgagcctgtgaagagccccaccagccccacccagaacctcttccctgccagcaagaccagccctgtgaacctgcccaacaagagcagcatccccagccccatcggcggcagcctgggccggggcagcagcctggacatcctgagcagcctgaacagccctgccctgtttggagaccaggacacagtgatgaaggccatccaggaggccaggaagatgagggagcagatccagcgggagcagcagcagcagcagccccacggcgtggatggcaagctgagcagcatcaacaacatgggcctgaacagctgcagaaatgagaaggagaggaccaggtttgagaacctgggcccccagctgaccgggaagagcaatgaagatggcaagctgggccctggggtcatcgacctgaccaggccagaagatgctgagggcggggccaccgtggccgaggcccgggtgtacagagatgcccggggccgggccagcagcgagccccacatcaagaggcccatgaatgccttcatggtgtgggccaaggatgagaggaggaagatcctgcaggccttcccagacatgcacaacagcaacatcagcaagatcctgggcagccgctggaagtccatgagcaaccaggagaagcagccctactatgaggagcaggcccggctgagcaagatccacctggagaagtaccccaactacaagtacaagccccggcccaagaggacctgcatcgtggatggcaagaagctgagaattggagagtacaagcagctgatgaggagccggcggcaggagatgaggcagttcttcaccgtgggccagcagccccagatccccatcaccactggaactggagtggtgtacccaggggccatcaccatggccaccaccacccccagcccccagatgaccagtgactgcagcagcaccagcgccagccctgagcccagcctgcccgtcatccagagcacctacggcatgaagacagatggcggcagcctggccggaaatgagatgatcaacggggaggatgagatggagatgtatgatgattatgaagatgaccccaagagtgactacagcagtgaaaatgaggcccctgaggccgtgtctgccaactag

SEQ ID NO: 171630 - DNA, 2487 bp, synthetic construct
  misc_feature 1..2487: note = Description of Artificial Sequence: Synthetic coding sequence
  source 1..2487: mol_type = other DNA
atgagcagcaagcaggccaccagcccctttgcctgtgccgcagatggagaagatgccatgacccaggacctgaccagccgggagaaggaggagggcagtgaccagcacgtggccagccacctgcccctgcaccccatcatgcacaacaagccccacagcgaggagctgcccaccctggtgtccaccatccagcaggatgctgactgggacagcgtgctgagcagccagcagaggatggagagcgagaacaacaagctgtgcagcctgtacagcttcaggaacaccagcaccagcccccacaagccagatgagggcagccgggaccgggagatcatgacctctgtgaccttcggcaccccagagaggaggaagggcagcctggctgatgtggtggacaccctgaagcagaagaagctggaggagatgaccaggacagagcaggaggacagcagctgcatggagaagctgctgagcaaggactggaaggagaagatggagcggctgaacaccagcgagctgctgggggagatcaagggcaccccagagagcctggccgagaaggagcggcagctgagcaccatgatcacccagctgatcagcctgcgggagcagctgctggccgcccatgatgagcagaagaagctggccgccagccagatcgagaagcagaggcagcagatggacctggcccggcagcagcaggagcagatcgcccggcagcagcagcagctgctgcagcagcagcacaagatcaacctgctgcagcagcagatccaggtgcagggccacatgccacccctgatgatccccatcttcccccatgaccagaggaccctggccgctgctgctgctgcccagcagggcttcctgttccccccaggcatcacctacaagccaggggacaactaccctgtgcagttcatccccagcaccatggctgctgctgctgccagcggcctgagccccctgcagctgcagaagggccacgtgagccacccccagatcaaccagaggctgaagggcctgagtgaccgcttcggcaggaacctggacacctttgaacatggaggcggccacagctacaaccacaagcagatcgagcagctgtatgctgcccagctggcctccatgcaggtgtcccctggggccaagatgcccagcaccccccagccccccaacacagctggcaccgtgagccccaccggcatcaagaatgagaagaggggcaccagccctgtgacccaggtgaaggatgaggccgccgcccagcccctgaacctgagcagccggcccaagacagctgagcctgtgaagagccccaccagccccacccagaacctcttccctgccagcaagaccagccctgtgaacctgcccaacaagagcagcatccccagccccatcggcggcagcctgggccggggcagcagcctggacatcctgagcagcctgaacagccctgccctgtttggagaccaggacacagtgatgaaggccatccaggaggccaggaagatgagggagcagatccagcgggagcagcagcagcagcagccccacggcgtggatggcaagctgagcagcatcaacaacatgggcctgaacagctgcagaaatgagaaggagaggaccaggtttgagaacctgggcccccagctgaccgggaagagcaatgaagatggcaagctgggccctggggtcatcgacctgaccaggccagaagatgctgagggcagcaaggccatgaatggatctgctgccaagctgcagcagtactactgctggcccactggaggagccaccgtggccgaggcccgggtgtacagagatgcccggggccgggccagcagcgagccccacatcaagaggcccatgaatgccttcatggtgtgggccaaggatgagaggaggaagatcctgcaggccttcccagacatgcacaacagcaacatcagcaagatcctgggcagccgctggaagtccatgagcaaccaggagaagcagccctactatgaggagcaggcccggctgagcaagatccacctggagaagtaccccaactacaagtacaagccccggcccaagaggacctgcatcgtggatggcaagaagctgagaattggagagtacaagcagctgatgaggagccggcggcaggagatgaggcagttcttcaccgtgggccagcagccccagatccccatcaccactggaactggagtggtgtacccaggggccatcaccatggccaccaccacccccagcccccagatgaccagtgactgcagcagcaccagcgccagccctgagcccagcctgcccgtcatccagagcacctacggcatgaagacagatggcggcagcctggccggaaatgagatgatcaacggggaggatgagatggagatgtatgatgattatgaagatgaccccaagagtgactacagcagtgaaaatgaggcccctgaggccgtgtctgccaactag

SEQ ID NO: 171631 - DNA, 2427 bp, synthetic construct; identical to SEQ ID NO: 171629
  misc_feature 1..2427: note = Description of Artificial Sequence: Synthetic coding sequence
  source 1..2427: mol_type = other DNA

SEQ ID NO: 171632 - DNA, 420 bp, synthetic construct
  misc_feature 1..420: note = Description of Artificial Sequence: Synthetic coding sequence
  source 1..420: mol_type = other DNA
atgagcagcaagcaggccaccagcccctttgcctgtgccgcagatggagaagatgccatgacccaggacctgaccagccgggagaaggaggagggcagtgaccagcacgtggccagccacctgcccctgcaccccatcatgcacaacaagccccacagcgaggagctgcccaccctggtgtccaccatccagcaggatgctgactgggacagcgtgctgagcagccagcagaggatggagagcgagaacaacaagctgtgcagcctgtacagcttcaggaacaccagcaccagcccccacaagccagatgagggcagccgggaccgggagatcatgacctctgtgaccttcggcaccccagagaggaggaagggcagcctggctgatgtggtggacaccctgaagcagaagaagctgtag

SEQ ID NO: 171633 - DNA, 2406 bp, synthetic construct
  misc_feature 1..2406: note = Description of Artificial Sequence: Synthetic coding sequence
  source 1..2406: mol_type = other DNA
atgagcagcaagcaggccaccagcccctttgcctgtgccgcagatggagaagatgccatgacccaggacctgaccagccgggagaaggaggagggcagtgaccagcacgtggccagccacctgcccctgcaccccatcatgcacaacaagccccacagcgaggagctgcccaccctggtgtccaccatccagcaggatgctgactgggacagcgtgctgagcagccagcagaggatggagagcgagaacaacaagctgtgcagcctgtacagcttcaggaacaccagcaccagcccccacaagccagatgagggcagccgggaccgggagatcatgacctctgtgaccttcggcaccccagagaggaggaagggcagcctggctgatgtggtggacaccctgaagcagaagaagctggaggagatgaccaggacagagcaggaggacagcagctgcatggagaagctgctgagcaaggactggaaggagaagatggagcggctgaacaccagcgagctgctgggggagatcaagggcaccccagagagcctggccgagaaggagcggcagctgagcaccatgatcacccagctgatcagcctgcgggagcagctgctggccgcccatgatgagcagaagaagctggccgccagccagatcgagaagcagaggcagcagatggacctggcccggcagcagcaggagcagatcgcccggcagcagcagcagctgctgcagcagcagcacaagatcaacctgctgcagcagcagatccaggtgcagggccacatgccacccctgatgatccccatcttcccccatgaccagaggaccctggccgctgctgctgctgcccagcagggcttcctgttccccccaggcatcacctacaagccaggggacaactaccctgtgcagttcatccccagcaccatggctgctgctgctgccagcggcctgagccccctgcagctgcagcagctgtatgctgcccagctggcctccatgcaggtgtcccctggggccaagatgcccagcaccccccagccccccaacacagctggcaccgtgagccccaccggcatcaagaatgagaagaggggcaccagccctgtgacccaggtgaaggatgaagctgctgcccagcccctgaacctgagcagccggcccaagacagctgagcctgtgaagagccccaccagccccacccagaacctcttccctgccagcaagaccagccctgtgaacctgcccaacaagagcagcatccccagccccatcggcggcagcctgggccggggcagcagcctgggcaagtggaagagccagcaccaggaggagacctatgagctggacatcctgagcagcctgaacagccctgccctgtttggagaccaggacacagtgatgaaggccatccaggaggccaggaagatgagggagcagatccagcgggagcagcagcagcagcagccccatggagtggatggcaagctgagcagcatcaacaacatgggcctgaacagctgcagaaatgagaaggagaggaccaggtttgagaacctgggcccccagctgaccgggaagagcaatgaagatggcaagctgggccctggggtgattgacctgaccaggccagaagatgctgagggcagcaaggccatgaatggcagcgctgccaagctgcagcagtactactgctggcccaccggcggggccaccgtggccgaggcccgggtgtacagagatgcccggggccgggccagcagcgagccccacatcaagaggcccatgaatgccttcatggtgtgggccaaggatgaaagaaggaagatcctgcaggccttcccagacatgcacaacagcaacatcagcaagatcctgggcagccgctggaagtccatgagcaaccaggagaagcagccctactatgaggagcaggcccggctgagcaagatccacctggagaagtaccccaactacaagtacaagccccggcccaagaggacctgcatcgtggatggcaagaagctgcgcatcggggagtacaagcagctgatgaggagccggcggcaggagatgaggcagttcttcaccgtgggccagcagccccagatccccatcaccaccggcaccggggtggtgtacccaggggccatcaccatggccaccaccacccccagcccccagatgaccagtgactgcagcagcaccagcgccagccctgagcccagcctgcctgtgatccagagcacctacggcatgaagacagatggcggcagcctggccggaaatgagatgatcaatggagaagatgagatggagatgtatgatgattatgaagatgaccccaagagtgactacagcagtgaaaatgaggcccctgaggccgtgtctgccaactag

SEQ ID NO: 171634 - DNA, 2487 bp, synthetic construct; identical to SEQ ID NO: 171630
  misc_feature 1..2487: note = Description of Artificial Sequence: Synthetic coding sequence
  source 1..2487: mol_type = other DNA

SEQ ID NO: 171635 - DNA, 240 bp, synthetic construct
  misc_feature 1..240: note = Description of Artificial Sequence: Synthetic coding sequence
  source 1..240: mol_type = other DNA
atgagcagcaagcaggccaccagcccctttgcctgtgccgcagatggagaagatgccatgacccaggacctgaccagccgggagaaggaggagggcagtgaccagcacgtggccagccacctgcccctgcaccccatcatgcacaacaagccccacagcgaggagctgcccaccctggtgtccaccatccagcaggatgctgactgggacagcgtgctgagcagccagcagaggatgtag

SEQ ID NO: 171636 - DNA, 480 bp, synthetic construct
  misc_feature 1..480: note = Description of Artificial Sequence: Synthetic coding sequence
  source 1..480: mol_type = other DNA
atgagcagcaagcaggccaccagcccctttgcctgtgccgcagatggagaagatgccatgacccaggacctgaccagccgggagaaggaggagggcagtgaccagcacgtggccagccacctgcccctgcaccccatcatgcacaacaagccccacagcgaggagctgcccaccctggtgtccaccatccagcaggatgctgactgggacagcgtgctgagcagccagcagaggatggagagcgagaacaacaagctgtgcagcctgtacagcttcaggaacaccagcaccagcccccacaagccagatgagggcagccgggaccgggagatcatgacctctgtgaccttcggcaccccagagaggaggaagggcagcctggctgatgtggtggacaccctgaagcagaagaagctggaggagatgaccaggacagagcaggaggacagcagctgcatggagaagctgctgagcaagtag

SEQ ID NO: 171637 - DNA, 2415 bp, synthetic construct
  misc_feature 1..2415: note = Description of Artificial Sequence: Synthetic coding sequence
  source 1..2415: mol_type = other DNA
atgggccgcatgagcagcaagcaggccaccagcccctttgcctgtgccgcagatggagaagatgccatgacccaggacctgaccagccgggagaaggaggagggcagtgaccagcacgtggccagccacctgcccctgcaccccatcatgcacaacaagccccacagcgaggagctgcccaccctggtgtccaccatccagcaggatgctgactgggacagcgtgctgagcagccagcagaggatggagagcgagaacaacaagctgtgcagcctgtacagcttcaggaacaccagcaccagcccccacaagccagatgagggcagccgggaccgggagatcatgacctctgtgaccttcggcaccccagagaggaggaagggcagcctggctgatgtggtggacaccctgaagcagaagaagctggaggagatgaccaggacagagcaggaggacagcagctgcatggagaagctgctgagcaaggactggaaggagaagatggagcggctgaacaccagcgagctgctgggggagatcaagggcaccccagagagcctggccgagaaggagcggcagctgagcaccatgatcacccagctgatcagcctgcgggagcagctgctggccgcccatgatgagcagaagaagctggccgccagccagatcgagaagcagaggcagcagatggacctggcccggcagcagcaggagcagatcgcccggcagcagcagcagctgctgcagcagcagcacaagatcaacctgctgcagcagcagatccaggtgcagggccacatgccacccctgatgatccccatcttcccccatgaccagaggaccctggccgctgctgctgctgcccagcagggcttcctgtttcctcctggcatcacctacaagccaggggacaactaccctgtgcagttcatccccagcaccatggctgctgctgctgccagcggcctgagccccctgcagctgcagcagctgtatgctgcccagctggcctccatgcaggtgtcccctggggccaagatgcccagcaccccccagccccccaacacagctggcaccgtgagccccaccggcatcaagaatgagaagaggggcaccagccctgtgacccaggtgaaggatgaggccgccgcccagcccctgaacctgagcagccggcccaagacagctgagcctgtgaagagccccaccagccccacccagaacctcttccctgccagcaagaccagccctgtgaacctgcccaacaagagcagcatccccagccccatcggcggcagcctgggccggggcagcagcctgggcaagtggaagagccagcaccaggaggagacctatgagctggacatcctgagcagcctgaacagccctgccctgtttggagaccaggacacagtgatgaaggccatccaggaggccaggaagatgagggagcagatccagcgggagcagcagcagcagcagccccacggcgtggatggcaagctgagcagcatcaacaacatgggcctgaacagctgcagaaatgagaaggagaggaccaggtttgagaacctgggcccccagctgaccgggaagagcaatgaagatggcaagctgggccctggggtcatcgacctgaccaggccagaagatgctgagggcagcaaggccatgaatggatctgctgccaagctgcagcagtactactgctggcccactggaggagccaccgtggccgaggcccgggtgtacagagatgcccggggccgggccagcagcgagccccacatcaagaggcccatgaatgccttcatggtgtgggccaaggatgagaggaggaagatcctgcaggccttcccagacatgcacaacagcaacatcagcaagatcctgggcagccgctggaagtccatgagcaaccaggagaagcagccctactatgaggagcaggcccggctgagcaagatccacctggagaagtaccccaactacaagtacaagccccggcccaagaggacctgcatcgtggatggcaagaagctgagaattggagagtacaagcagctgatgaggagccggcggcaggagatgaggcagttcttcaccgtgggccagcagccccagatccccatcaccactggaactggagtggtgtacccaggggccatcaccatggccaccaccacccccagcccccagatgaccagtgactgcagcagcaccagcgccagccctgagcccagcctgcccgtcatccagagcacctacggcatgaagacagatggcggcagcctggccggaaatgagatgatcaacggggaggatgagatggagatgtatgatgattatgaagatgaccccaagagtgactacagcagtgaaaatgaggcccctgaggccgtgtctgccaactag

SEQ ID NO: 171638 - DNA, 1167 bp, synthetic construct
  misc_feature 1..1167: note = Description of Artificial Sequence: Synthetic coding sequence
  source 1..1167: mol_type = other DNA
atggccagcctgctgggcgcctacccctggccagagggcctggagtgcccagccctggatgctgagctgagtgatggccagagccccccagctgtgcccaggcctcctggggacaagggcagcgagagccgcatccggcggcccatgaatgccttcatggtgtgggccaaggatgagaggaagaggctggccgtgcagaacccagacctgcacaatgctgagctgagcaagatgctgggcaagtcctggaaggccctgaccctgagccagaagaggccctacgtggatgaggccgagcggctgcggctgcagcacatgcaggactaccccaactacaagtaccggcccaggaggaagaagcaggccaagaggctgtgcaagagggtggaccccggcttcctgctgagcagcctgagccgggaccagaatgccctgcctgagaagaggagcggcagcagaggagccctgggggagaaggaggacagaggagagtacagccctggaacagccctgcccagcctgcggggctgctaccacgagggccctgctgggggcggcggcggcggcacccccagctctgtggacacctacccctacggcctgcccaccccacctgagatgagccccctggatgtgctggagcctgagcagaccttcttcagcagcccctgccaggaggagcacggccacccccggcgcatcccccacctgcccggccacccctacagcccagaatatgcccccagccccctgcactgcagccaccccctgggcagcctggccctgggccagagccctggggtgtccatgatgagccctgtgcccggctgcccccccagccctgcctactacagccctgccacctaccaccccctgcacagcaacctgcaggcccacctgggccagctgagccccccacctgagcaccctggctttgatgccctggaccagctgagccaggtggagctgctgggggacatggacagaaatgaatttgaccagtacctgaacaccccaggccacccagacagcgccaccggggccatggccctgagcggccacgtgcctgtgtcccaggtgacccccaccggccccacagagaccagcctcatctctgtgctggctgatgccacagccacctactacaacagctacagcgtgtcctag

SEQ ID NO: 171639 - DNA, 1323 bp, synthetic construct
  misc_feature 1..1323: note = Description of Artificial Sequence: Synthetic coding sequence
  source 1..1323: mol_type = other DNA
atgtccatgctggccgagaggaggaggaagcagaagtgggccgtggacccccagaacacagcctggagcaatgatgacagcaagtttggccagaggatgctggagaagatgggctggagcaagggcaagggcctgggcgcccaggagcagggcgccacagaccacatcaaggtgcaggtgaagaacaaccacctgggcctgggcgccaccatcaacaatgaagacaactggatcgcccaccaggatgacttcaaccagctgctggccgagctgaacacctgccacggccaggagaccacagacagcagtgacaagaaggagaagaagagcttcagcctggaggagaagagcaagatcagcaagaacagagtgcactacatgaagttcaccaagggcaagtcctggaaggccctgaccctgagccagaagaggccctacgtggatgaggccgagcggctgcggctgcagcacatgcaggactaccccaactacaagtaccggcccaggaggaagaagcaggccaagaggctgtgcaagagggtggaccccggcttcctgctgagcagcctgagccgggaccagaatgccctgcctgagaagaggagcggcagcagaggagccctgggggagaaggaggacagaggagagtacagccctggaacagccctgcccagcctgcggggctgctaccacgagggccctgctgggggcggcggcggcggcacccccagctctgtggacacctacccctacggcctgcccaccccacctgagatgagccccctggatgtgctggagcctgagcagaccttcttcagcagcccctgccaggaggagcacggccacccccggcgcatcccccacctgcccggccacccctacagcccagaatatgcccccagccccctgcactgcagccaccccctgggcagcctggccctgggccagagccctggggtgtccatgatgagccctgtgcccggctgcccccccagccctgcctactacagccctgccacctaccaccccctgcacagcaacctgcaggcccacctgggccagctgagccccccacctgagcaccctggctttgatgccctggaccagctgagccaggtggagctgctgggggacatggacagaaatgaatttgaccagtacctgaacaccccaggccacccagacagcgccaccggggccatggccctgagcggccacgtgcctgtgtcccaggtgacccccaccggccccacagagaccagcctcatctctgtgctggctgatgccacagccacctactacaacagctacagcgtgtcctag

SEQ ID NO: 171640 - DNA, 1341 bp, synthetic construct
  misc_feature 1..1341: note = Description of Artificial Sequence: Synthetic coding sequence
  source 1..1341: mol_type = other DNA
atgctggacatgtctgaggcccggagccagcccccctgcagccccagcggcacagccagctccatgagccacgtggaggacagcgacagtgatgccccacccagccctgctggcagcgagggcctgggccgggccggcgtggccgtgggcggggcccggggggaccctgctgaggccgcagatgagcgcttccctgcctgcatcagagatgctgtgtcccaggtgctgaagggctatgactggagcctggtgcccatgcctgtgcggggcggcggcggcggggccctgaaggccaagccccacgtgaagaggcccatgaatgccttcatggtgtgggcccaggccgcccggaggaagctggccgaccagtacccccacctgcacaatgctgagctgagcaagaccctgggcaagctgtggaggctgctgtctgagagcgagaagaggccctttgtggaggaggccgagcggctgcgggtgcagcacaagaaggaccacccagactacaagtaccagcccaggaggaggaagagcgccaaggccggccacagcgacagcgacagcggggctgagctgggcccccaccctgggggcggcgctgtgtacaaggccgaggccggcctgggagatggccaccaccacggggaccacacaggccagacccacggcccccccaccccacccaccacccccaagacagagctgcagcaggccggggccaagccagagctgaagctggagggcagaagacctgtggacagcggccggcagaacatcgacttcagcaatgtggacatcagcgagctgagcagcgaggtgatgggcaccatggatgcctttgatgtgcatgaatttgaccagtacctgcccctgggcggccctgcccctcctgagcccggccaggcctatggaggagcctacttccacgccggggccagccctgtgtgggcccacaagagcgcccccagcgccagcgccagccccacagaaacaggccccccccggccccacatcaagacagagcagcccagccctggccactacggggaccagccccggggcagcccagactatggcagctgcagcggccagagcagcgccaccccagctgccccagctggcccctttgctggcagccagggcgactatggagacctgcaggccagcagctactacggggcctacccaggctacgcccctggcctgtaccagtacccctgcttccacagcccccggcggccctatgccagccccctgctgaatggcctggccctgcccccagcccacagccccaccagccactgggaccagcctgtgtacaccaccctgacccggccctag

SEQ ID NO: 171641 - DNA, 1530 bp, synthetic construct
  misc_feature 1..1530: note = Description of Artificial Sequence: Synthetic coding sequence
  source 1..1530: mol_type = other DNA
atgaacctgctggaccccttcatgaagatgacagatgagcaggagaagggcctgagcggggcccccagccccaccatgtctgaggacagcgctggcagcccctgccccagcggcagcggcagtgacacagagaacacccggccccaggagaacaccttccccaagggggagccagacctgaagaaggagagcgaggaggacaagtttcctgtgtgcatccgggaggccgtgtcccaggtgctgaagggctatgactggaccctggtgcccatgcctgtgcgggtgaatggcagcagcaagaacaagccccacgtgaagaggcccatgaatgccttcatggtgtgggcccaggccgcccggaggaagctggccgaccagtacccccacctgcacaatgctgagctgagcaagaccctgggcaagctgtggaggctgctgaatgaaagtgagaagaggccctttgtggaggaggccgagcggctgcgggtgcagcacaagaaggaccacccagactacaagtaccagcccaggaggaggaagtctgtgaagaatggccaggccgaggccgaggaggccacagagcagacccacatcagccccaatgccatcttcaaggccctgcaggccgacagcccccacagcagcagcggcatgtctgaggtgcacagccctggagagcacagcggccagagccagggcccccccaccccacccaccacccccaagacagatgtgcagcccgggaaggctgacctgaagcgggagggccggcccctgcctgagggcggccggcagccccccatcgacttcagagatgtggacattggagagctgagcagtgatgtgatcagcaacatcgagacctttgatgtgaatgaatttgaccagtacctgcccccaaatggccaccctggggtgcctgccacccacggccaggtgacctacacaggcagctatggcatcagcagcacagctgccaccccagccagcgctggccacgtgtggatgagcaagcagcaggcccctcctcctccaccccagcagcccccccaggcccccccagccccccaggccccaccccagccccaggccgccccaccccagcagcctgctgccccaccccagcagccccaggcccacaccctgaccaccctgagcagcgagcccggccagagccagaggacccacatcaagacagagcagctgagccccagccactacagcgagcagcagcagcacagcccccagcagatcgcctacagccccttcaacctgccccactacagccccagctacccacccatcaccaggagccagtatgactacacagaccaccagaacagcagcagctactacagccatgctgctggccagggcaccggcctgtacagcaccttcacctacatgaacccagcccagaggcccatgtacacccccatcgctgacaccagcggcgtgcccagcatcccccagacccacagcccccagcactgggagcagcctgtgtacacccagctgacccggccctag

SEQ ID NO: 171642 - DNA, 1338 bp, synthetic construct
  misc_feature 1..1338: note = Description of Artificial Sequence: Synthetic coding sequence
  source 1..1338: mol_type = other DNA
atgaacctgctggaccccttcatgaagatgacagatgagcaggagaagggcctgagcggggcccccagccccaccatgtctgaggacagcgctggcagcccctgccccagcggcagcggcagtgacacagagaacacccggccccaggagaacaccttccccaagggggagccagacctgaagaaggagagcgaggaggacaagtttcctgtgtgcatccgggaggccgtgtcccaggtgctgaagggctatgactggaccctggtgcccatgcctgtgcgggtgaatggcagcagcaagaacaagccccacgtgaagaggcccatgaatgccttcatggtgtgggcccaggccgcccggaggaagctggccgaccagtacccccacctgcacaatgctgagctgagcaagaccctgggcaagctgtggaggctgctgaatgaaagtgagaagaggccctttgtggaggaggccgagcggctgcgggtgcagcacaagaaggaccacccagactacaagtaccagcccaggaggaggaagtctgtgaagaatggccaggccgaggccgaggaggccacagagcagacccacatcagccccaatgccatcttcaaggccctgcaggccgacagcccccacagcagcagcggcatgtctgaggtgcacagccctggagagcacagcggccagagccagggcccccccaccccacccaccacccccaagacagatgtgcagcccgggaaggctgacctgaagcgggagggccggcccctgcctgagggcggccggcagccccccatcgacttcagagatgtggacattggagagctgagcagtgatgtgatcagcaacatcgagacctttgatgtgaatgaatttgaccagtacctgcccccaaatggccaccctggggtgcctgccacccacggccaggtgacctacacaggcagctatggcatcagcagcacagctgccaccccagccagcgctggccacgtgtggatgagcaagcagcaggcccctcctcctccaccccagcagcacagcccccagcagatcgcctacagccccttcaacctgccccactacagccccagctacccacccatcaccaggagccagtatgactacacagaccaccagaacagcagcagctactacagccatgctgctggccagggcaccggcctgtacagcaccttcacctacatgaacccagcccagaggcccatgtacacccccatcgctgacaccagcggcgtgcccagcatcccccagacccacagcccccagcactgggagcagcctgtgtacacccagctgacccggccctag

SEQ ID NO: 171643 - DNA, 273 bp, synthetic construct
  misc_feature 1..273: note = Description of Artificial Sequence: Synthetic coding sequence
  source 1..273: mol_type = other DNA
atgaggggctacctggtggccatcttcctgtctgctgtgttcctgtactacgtgctgcactgcatcctgtggggcaccaacgtgtactgggtggcccctgtggagatgaagagaagaaacaagatccagccctgcctgagcaagccagcctttgccagcctgctgagccagagcagcgcctacatcctgaggaaaggaattgaggagctgaaccagaccagcatcctcttcacccaggtgtcctctgtgagccccttctctgtgtgtggctag

SEQ ID NO: 171644 - DNA, 273 bp, synthetic construct; identical to SEQ ID NO: 171643
  misc_feature 1..273: note = Description of Artificial Sequence: Synthetic coding sequence
  source 1..273: mol_type = other DNA

SEQ ID NO: 171645 - DNA, 1335 bp, synthetic construct
  misc_feature 1..1335: note = Description of Artificial Sequence: Synthetic coding sequence
  source 1..1335: mol_type = other DNA
atgggcctgctggtgtttgtgaggaacctgctgctggccctgtgcctcttcctggtgctgggcttcctgtactacagcgcctggaagctgcacctgctgcagtgggaggaggacagcagcaagtacagccacagcagcagcccccaggagaagcctgtggccgacagcgtggtgctgagctttgattctgctggccagaccctgggctctgaatatgaccggctgggcttcctgctgaacctggacagcaagctgagccccaggaccctgtgcaccgtggtgtttggcctggactgcatcctggagagccctggagagcccaagaagctgctgatgcctgccagccaccccctggagatcctgaagagcctgtctgaggacacagcctttgccctgggcttcctgaagctgcccaggcctgctgagctggccaccaagtatgccaacttcagcgagggcgcctgcaagccaggctacgccagcgccctgatgacagccatcttcccccgcttcagcaagccagcccccatgttcctggatgacagcttcaggaagtgggcccgcatccgggagtttgtgccccccttcggcatcaagggccaggacaacctgatcaaggccatcctgtctgtgaccaaggagtaccgcctgaccccagccctggacagcctgcgctgccgccgctgcatcatcgtgggcaatggaggagtgctggccaacaagagcctgggcagcagaattgatgattatgacatcgtggtgcggctgaacagcgcccctgtgaagggctttgagaaggatgtgggcagcaagaccaccctgcgcatcacctacccagagggcgccatgcagaggcctgagcagtatgagcgggacagcctgtttgtgctggccggcttcaagtggcaggacttcaagtggctgaagtacatcgtgtacaaggagcgggtgtctgccagtgatggcttctggaagtctgtggccaccagggtgcccaaggagcccccagagatccgcatcctgaacccctacttcatccaggaggccgccttcaccctcatcggcctgcccttcaacaacggcctgatgggccggggcaacatccccaccctgggctctgtggccgtgaccatggccctgcacggctgtgatgaggtggccgtggccggcttcggctatgacatgagcaccccaaatgcccccctgcactactatgaaacagtgaggatggccgccatcaaggagagctggacccacaacatccagcgggagaaggagttcctgaggaagctggtgaaggcccgggtcatcacagacctgagcagcggcatctag

SEQ ID NO: 171646 - DNA, 468 bp, synthetic construct
  misc_feature 1..468: note = Description of Artificial Sequence: Synthetic coding sequence
  source 1..468: mol_type = other DNA
atgggcctgctggtgtttgtgaggaacctgctgctggccctgtgcctcttcctggtgctgggcttcctgtactacagcgcctggaagctgcacctgctgcagtgggaggaggacagcaacagcgtggtgctgagctttgacagcgctggccagaccctgggctctgaatatgaccggctgggcttcctgctgaacctggacagcaagctgcctgctgagctggccaccaagtatgccaacttcagcgagggcgcctgcaagccaggctacgccagcgccctgatgacagccatcttcccccgcttcagcaagccagcccccatgttcctggatgacagcttcaggaagtgggcccgcatccgggagtttgtgcccccatttggcatcaagggccaggtgctggatgcccagtacccagcccgggagcgggtgtctgctgaggccggggagagcagccgccaccactag

SEQ ID NO: 171647 - DNA, 1035 bp, synthetic construct
  misc_feature 1..1035: note = Description of Artificial Sequence: Synthetic coding sequence
  source 1..1035: mol_type = other DNA
atgggcctgctggtgtttgtgaggaacctgctgctggccctgtgcctcttcctggtgctgggcttcctgtactacagcgcctggaagctgcacctgctgcagtgggaggaggacagcaacagcgtggtgctgagctttgacagcgctggccagaccctgggctctgaatatgaccggctgggcttcctgctgaacctggacagcaagctgttcagcaagccagcccccatgttcctggatgacagcttcaggaagtgggcccgcatccgggagtttgtgccccccttcggcatcaagggccaggacaacctgatcaaggccatcctgtctgtgaccaaggagtaccgcctgaccccagccctggacagcctgcgctgccgccgctgcatcatcgtgggcaatggaggagtgctggccaacaagagcctgggcagcagaattgatgattatgacatcgtggtgcggctgaacagcgcccctgtgaagggctttgagaaggatgtgggcagcaagaccaccctgcgcatcacctacccagagggcgccatgcagaggcctgagcagtatgagcgggacagcctgtttgtgctggccggcttcaagtggcaggacttcaagtggctgaagtacatcgtgtacaaggagcgggtgtctgccagtgatggcttctggaagtctgtggccaccagggtgcccaaggagcccccagagatccgcatcctgaacccctacttcatccaggaggccgccttcaccctcatcggcctgcccttcaacaacggcctgatgggccggggcaacatccccaccctgggctctgtggccgtgaccatggccctgcacggctgtgatgaggtggccgtggccggcttcggctatgacatgagcaccccaaatgcccccctgcactactatgaaacagtgaggatggccgccatcaaggagagctggacccacaacatccagcgggagaaggagttcctgaggaagctggtgaaggcccgggtcatcacagacctgagcagcggcatctag

SEQ ID NO: 171648 - DNA, 687 bp, synthetic construct
  misc_feature 1..687: note = Description of Artificial Sequence: Synthetic coding sequence
  source 1..687: mol_type = other DNA
atgggcctgctggtgtttgtgaggaacctgctgctggccctgtgcctcttcctggtgctgggcttcctgtactacagcgcctggaagctgcacctgctgcagtgggaggaggacagcaaatatgaccggctgggcttcctgctgaacctggacagcaagctgcctgctgagctggccaccaagtatgccaacttcagcgagggcgcctgcaagccaggctacgccagcgccctgatgacagccatcttcccccgcttcagcaagccagcccccatgttcctggatgacagcttcaggaagtgggcccgcatccgggagtttgtgcccccatttggcatcaagggccaggacaacctgatcaaggccatcctgtctgtgaccaaggagtaccgcctgaccccagccctggacagcctgcgctgccgccgctgcatcatcgtgggcaatggaggagtgctggccaacaagagcctgggcagcagaattgatgattatgacatcgtggtgcgggtgcacaggatggccagcggcaacctgtggcccctggagtgccccaggagccccctgcgctttgagagcagcacccacatcagcagccggcggccccccagccccagcctggcctgccccagcaccatggcctcctgggccggcggcaccagcctgcccctggccgtgtggcagtag

SEQ ID NO: 171649 - DNA, 1173 bp, synthetic construct
  misc_feature 1..1173: note = Description of Artificial Sequence: Synthetic coding sequence
  source 1..1173: mol_type = other DNA
atgggcctgctggtgtttgtgaggaacctgctgctggccctgtgcctcttcctggtgctgggcttcctgtactacagcgcctggaagctgcacctgctgcagtgggaggaggacagcagcaagtacagccacagcagcagcccccaggagaagcctgtggccgacagcgtggtgctgagctttgattctgctggccagaccctgggctctgaatatgaccggctgggcttcctgctgaacctggacagcaagctgcctgctgagctggccaccaagtatgccaacttcagcgagggcgcctgcaagccaggctacgccagcgccctgatgacagccatcttcccccgcttcagcaagccagcccccatgttcctggatgacagcttcaggaagtgggcccgcatccgggagtttgtgccccccttcggcatcaagggccaggacaacctgatcaaggccatcctgtctgtgaccaaggagtaccgcctgaccccagccctggacagcctgcgctgccgccgctgcatcatcgtgggcaatggaggagtgctggccaacaagagcctgggcagcagaattgatgattatgacatcgtggtgcggctgaacagcgcccctgtgaagggctttgagaaggatgtgggcagcaagaccaccctgcgcatcacctacccagagggcgccatgcagaggcctgagcagtatgagcgggacagcctgtttgtgctggccggcttcaagtggcaggacttcaagtggctgaagtacatcgtgtacaaggagcgggtgtctgccagtgatggcttctggaagtctgtggccaccagggtgcccaaggagcccccagagatccgcatcctgaacccctacttcatccaggaggccgccttcaccctcatcggcctgcccttcaacaacggcctgatgggccggggcaacatccccaccctgggctctgtggccgtgaccatggccctgcacggctgtgatgaggtggccgtggccggcttcggctatgacatgagcaccccaaatgcccccctgcactactatgaaacagtgaggatggccgccatcaaggagagctggacccacaacatccagcgggagaaggagttcctgaggaagctggtgaaggcccgggtcatcacagacctgagcagcggcatctag

SEQ ID NO: 171650 - DNA, 1242 bp, synthetic construct
  misc_feature 1..1242: note = Description of Artificial Sequence: Synthetic coding sequence
  source 1..1242: mol_type = other DNA
atgggcctgctggtgtttgtgaggaacctgctgctggccctgtgcctcttcctggtgctgggcttcctgtactacagcgcctggaagctgcacctgctgcagtgggaggaggacagcaaatatgaccggctgggcttcctgctgaacctggacagcaagctgagccccaggaccctgtgcaccgtggtgtttggcctggactgcatcctggagagccctggagagcccaagaagctgctgatgcctgccagccaccccctggagatcctgaagagcctgtctgaggacacagcctttgccctgggcttcctgaagctgcccaggcctgctgagctggccaccaagtatgccaacttcagcgagggcgcctgcaagccaggctacgccagcgccctgatgacagccatcttcccccgcttcagcaagccagcccccatgttcctggatgacagcttcaggaagtgggcccgcatccgggagtttgtgcccccatttggcatcaagggccaggacaacctgatcaaggccatcctgtctgtgaccaaggagtaccgcctgaccccagccctggacagcctgcgctgccgccgctgcatcatcgtgggcaatggaggagtgctggccaacaagagcctgggcagcagaattgatgattatgacatcgtggtgcggctgaacagcgcccctgtgaagggctttgagaaggatgtgggcagcaagaccaccctgcgcatcacctacccagagggcgccatgcagaggcctgagcagtatgaaagagacagcctgtttgtgctggccggcttcaagtggcaggacttcaagtggctgaagtacatcgtgtacaaggagcgggtgtctgccagtgatggcttctggaagtctgtggccaccagggtgcccaaggagcccccagagatccgcatcctgaacccctacttcatccaggaggccgccttcaccctgattggcctgcccttcaacaacggcctgatgggccggggcaacatccccaccctgggctctgtggccgtgaccatggccctgcacggctgtgatgaggtggccgtggccggcttcggctatgacatgagcaccccaaatgcccccctgcactactatgagaccgtgaggatggccgccatcaaggagagctggacccacaacatccagcgggagaaggagttcctgaggaagctggtgaaggcccgggtcatcacagacctgagcagcggcatctag

SEQ ID NO: 171651 - DNA, 834 bp, synthetic construct
  misc_feature 1..834: note = Description of Artificial Sequence: Synthetic coding sequence
  source 1..834: mol_type = other DNA
atgggcctgctggtgtttgtgaggaacctgctgctggccctgtgcctcttcctggtgctgggcttcctgtactacagcgcctggaagctgcacctgctgcagtgggaggaggacagcaacagcgtggtgctgagctttgacagcgctggccagaccctgggctctgaatatgaccggctgggcttcctgctgaacctggacagcaagctgcctgctgagctggccaccaagtatgccaacttcagcgagggcgcctgcaagccaggctacgccagcgccctgatgacagccatcttcccccgcttcagcaagccagcccccatgttcctggatgacagcttcaggaagtgggcccgcatccgggagtttgtgcccccatttggcatcaagggccaggacaacctgatcaaggccatcctgtctgtgaccaaggagtaccgcctgaccccagccctggacagcctgcgctgccgccgctgcatcatcgtgggcaatggaggagtgctggccaacaagagcctgggcagcagaattgatgattatgacatcgtggtgcggctgaacagcgcccctgtgaagggctttgagaaggatgtgggcagcaagaccaccctgcgcatcacctacccagagggcgccatgcagaggcctgagcagtatgaaagagacagcctgtttgtgctggccggcttcaagtggcaggacttcaagtggctgaagtacatcgtgtacaaggagcgggtgtcctggacccacaacatccagcgggagaaggagttcctgaggaagctggtgaaggcccgggtcatcacagacctgagcagcggcatctag

SEQ ID NO: 171652 - DNA, 1128 bp, synthetic construct
  misc_feature 1..1128: note = Description of Artificial Sequence: Synthetic coding sequence
  source 1..1128: mol_type = other DNA
atgggcctgctggtgtttgtgaggaacctgctgctggccctgtgcctcttcctggtgctgggcttcctgtactacagcgcctggaagctgcacctgctgcagtgggaggaggacagcaacagcgtggtgctgagctttgacagcgctggccagaccctgggctctgaatatgaccggctgggcttcctgctgaacctggacagcaagctgcctgctgagctggccaccaagtatgccaacttcagcgagggcgcctgcaagccaggctacgccagcgccctgatgacagccatcttcccccgcttcagcaagccagcccccatgttcctggatgacagcttcaggaagtgggcccgcatccgggagtttgtgcccccatttggcatcaagggccaggacaacctgatcaaggccatcctgtctgtgaccaaggagtaccgcctgaccccagccctggacagcctgcgctgccgccgctgcatcatcgtgggcaatggaggagtgctggccaacaagagcctgggcagcagaattgatgattatgacatcgtggtgcggctgaacagcgcccctgtgaagggctttgagaaggatgtgggcagcaagaccaccctgcgcatcacctacccagagggcgccatgcagaggcctgagcagtatgaaagagacagcctgtttgtgctggccggcttcaagtggcaggacttcaagtggctgaagtacatcgtgtacaaggagcgggtgtctgccagtgatggcttctggaagtctgtggccaccagggtgcccaaggagcccccagagatccgcatcctgaacccctacttcatccaggaggccgccttcaccctgattggcctgcccttcaacaacggcctgatgggccggggcaacatccccaccctgggctctgtggccgtgaccatggccctgcacggctgtgatgaggtggccgtggccggcttcggctatgacatgagcaccccaaatgcccccctgcactactatgagaccgtgaggatggccgccatcaaggagagctggacccacaacatccagcgggagaaggagttcctgaggaagctggtgaaggcccgggtcatcacagacctgagcagcggcatctag

SEQ ID NO: 171653 - DNA, 1080 bp, synthetic construct
  misc_feature 1..1080: note = Description of Artificial Sequence: Synthetic coding sequence
  source 1..1080: mol_type = other DNA
atgggcctgctggtgtttgtgaggaacctgctgctggccctgtgcctcttcctggtgctgggcttcctgtactacagcgcctggaagctgcacctgctgcagtgggaggaggacagcaaatatgaccggctgggcttcctgctgaacctggacagcaagctgcctgctgagctggccaccaagtatgccaacttcagcgagggcgcctgcaagccaggctacgccagcgccctgatgacagccatcttcccccgcttcagcaagccagcccccatgttcctggatgacagcttcaggaagtgggcccgcatccgggagtttgtgcccccatttggcatcaagggccaggacaacctgatcaaggccatcctgtctgtgaccaaggagtaccgcctgaccccagccctggacagcctgcgctgccgccgctgcatcatcgtgggcaatggaggagtgctggccaacaagagcctgggcagcagaattgatgattatgacatcgtggtgcggctgaacagcgcccctgtgaagggctttgagaaggatgtgggcagcaagaccaccctgcgcatcacctacccagagggcgccatgcagaggcctgagcagtatgaaagagacagcctgtttgtgctggccggcttcaagtggcaggacttcaagtggctgaagtacatcgtgtacaaggagcgggtgtctgccagtgatggcttctggaagtctgtggccaccagggtgcccaaggagcccccagagatccgcatcctgaacccctacttcatccaggaggccgccttcaccctgattggcctgcccttcaacaacggcctgatgggccggggcaacatccccaccctgggctctgtggccgtgaccatggccctgcacggctgtgatgaggtggccgtggccggcttcggctatgacatgagcaccccaaatgcccccctgcactactatgagaccgtgaggatggccgccatcaaggagagctggacccacaacatccagcgggagaaggagttcctgaggaagctggtgaaggcccgggtcatcacagacctgagcagcggcatctag

SEQ ID NO: 171654 - DNA, 1335 bp, synthetic construct; identical to SEQ ID NO: 171645
  misc_feature 1..1335: note = Description of Artificial Sequence: Synthetic coding sequence
  source 1..1335: mol_type = other DNA

SEQ ID NO: 171655 - DNA, 513 bp, synthetic construct
  misc_feature 1..513: note = Description of Artificial Sequence: Synthetic coding sequence
  source 1..513: mol_type = other DNA
atgggcctgctggtgtttgtgaggaacctgctgctggccctgtgcctcttcctggtgctgggcttcctgtactacagcgcctggaagctgcacctgctgcagtgggaggaggacagcagcaagtacagccacagcagcagcccccaggagaagcctgtggccgacagcgtggtgctgagctttgattctgctggccagaccctgggctctgaatatgaccggctgggcttcctgctgaacctggacagcaagctgcctgctgagctggccaccaagtatgccaacttcagcgagggcgcctgcaagccaggctacgccagcgccctgatgacagccatcttcccccgcttcagcaagccagcccccatgttcctggatgacagcttcaggaagtgggcccgcatccgggagtttgtgccccccttcggcatcaagggccaggtgctggatgcccagtacccagcccgggagcgggtgtctgctgaggccggggagagcagccgccaccactag

SEQ ID NO: 171656 - DNA, 468 bp, synthetic construct; identical to SEQ ID NO: 171646
  misc_feature 1..468: note = Description of Artificial Sequence: Synthetic coding sequence
  source 1..468: mol_type = other DNA

SEQ ID NO: 171657 - DNA, 561 bp, synthetic construct
  misc_feature 1..561: note = Description of Artificial Sequence: Synthetic coding sequence
  source 1..561: mol_type = other DNA
atgggcctgctggtgtttgtgaggaacctgctgctggccctgtgcctcttcctggtgctgggcttcctgtactacagcgcctggaagctgcacctgctgcagtgggaggaggacagcaacagcgtggtgctgagctttgacagcgctggccagaccctgggctctgaatatgaccggctgggcttcctgctgaacctggacagcaagctgcctgctgagctggccaccaagtatgccaacttcagcgagggcgcctgcaagccaggctacgccagcgccctgatgacagccatcttcccccgcttcagcaagccagcccccatgttcctggatgacagcttcaggaagtgggcccgcatccgggagtttgtgcccccatttggcatcaagggccaggacaacctgatcaaggccatcctgtctgtgaccaaggagtaccgcctgaccccagccctggacagcctgcgctgccgccgctgcatcatcgtgggcaatggaggagtgctggccaacaagagcctgggcagcagaattgatgattatgacatcgtggtgaggtag

SEQ ID NO: 171658 - DNA, 558 bp, synthetic construct
  misc_feature 1..558: note = Description of Artificial Sequence: Synthetic coding sequence
  source 1..558: mol_type = other DNA
atgggcctgctggtgtttgtgaggaacctgctgctggccctgtgcctcttcctggtgctgggcttcctgtactacagcgcctggaagctgcacctgctgcagtgggaggaggacagcagcaagtacagccacagcagcagcccccaggagaagcctgtggccgagtatgaccggctgggcttcctgctgaacctggacagcaagctgcctgctgagctggccaccaagtatgccaacttcagcgagggcgcctgcaagccaggctacgccagcgccctgatgacagccatcttcccccgcttcagcaagccagcccccatgttcctggatgacagcttcaggaagtgggcccgcatccgggagtttgtgccccccttcggcatcaagggccaggacaacctgatcaaggccatcctgtctgtgaccaaggagtaccgcctgaccccagccctggacagcctgcgctgccgccgctgcatcatcgtgggcaatggaggagtgctggccaacaagagcctgggcagcagaattgatgattatgacatcgtggtgaggtag

SEQ ID NO: 171659 - DNA, 606 bp, synthetic construct
  misc_feature 1..606: note = Description of Artificial Sequence: Synthetic coding sequence
  source 1..606: mol_type = other DNA
atgggcctgctggtgtttgtgaggaacctgctgctggccctgtgcctcttcctggtgctgggcttcctgtactacagcgcctggaagctgcacctgctgcagtgggaggaggacagcagcaagtacagccacagcagcagcccccaggagaagcctgtggccgagtatgaccggctgggcttcctgctgaacctggacagcaagctgcctgctgagctggccaccaagtatgccaacttcagcgagggcgcctgcaagccaggctacgccagcgccctgatgacagccatcttcccccgcttcagcaagccagcccccatgttcctggatgacagcttcaggaagtgggcccgcatccgggagtttgtgccccccttcggcatcaagggccaggacaacctgatcaaggccatcctgtctgtgaccaaggagtaccgcctgaccccagccctggacagcctgcgctgccgccgctgcatcatcgtgggcaatggaggagtgctggccaacaagagcctgggcagcagaattgatgattatgacatcgtggtgtccccaggccgcaccatcagcagcgagaggaagagcttctgtggctcctggtag

SEQ ID NO: 171660 - DNA, 1290 bp, synthetic construct
  misc_feature 1..1290: note = Description of Artificial Sequence: Synthetic coding sequence
  source 1..1290: mol_type = other DNA
atgggcctgctggtgtttgtgaggaacctgctgctggccctgtgcctcttcctggtgctgggcttcctgtactacagcgcctggaagctgcacctgctgcagtgggaggaggacagcaacagcgtggtgctgagctttgacagcgctggccagaccctgggctctgaatatgaccggctgggcttcctgctgaacctggacagcaagctgagccccaggaccctgtgcaccgtggtgtttggcctggactgcatcctggagagccctggagagcccaagaagctgctgatgcctgccagccaccccctggagatcctgaagagcctgtctgaggacacagcctttgccctgggcttcctgaagctgcccaggcctgctgagctggccaccaagtatgccaacttcagcgagggcgcctgcaagccaggctacgccagcgccctgatgacagccatcttcccccgcttcagcaagccagcccccatgttcctggatgacagcttcaggaagtgggcccgcatccgggagtttgtgcccccatttggcatcaagggccaggacaacctgatcaaggccatcctgtctgtgaccaaggagtaccgcctgaccccagccctggacagcctgcgctgccgccgctgcatcatcgtgggcaatggaggagtgctggccaacaagagcctgggcagcagaattgatgattatgacatcgtggtgcggctgaacagcgcccctgtgaagggctttgagaaggatgtgggcagcaagaccaccctgcgcatcacctacccagagggcgccatgcagaggcctgagcagtatgaaagagacagcctgtttgtgctggccggcttcaagtggcaggacttcaagtggctgaagtacatcgtgtacaaggagcgggtgtctgccagtgatggcttctggaagtctgtggccaccagggtgcccaaggagcccccagagatccgcatcctgaacccctacttcatccaggaggccgccttcaccctgattggcctgcccttcaacaacggcctgatgggccggggcaacatccccaccctgggctctgtggccgtgaccatggccctgcacggctgtgatgaggtggccgtggccggcttcggctatgacatgagcaccccaaatgcccccctgcactactatgagaccgtgaggatggccgccatcaaggagagctggacccacaacatccagcgggagaaggagttcctgaggaagctggtgaaggcccgggtcatcacagacctgagcagcggcatctag

SEQ ID NO: 171661 - DNA, 1038 bp, synthetic construct
  misc_feature 1..1038: note = Description of Artificial Sequence: Synthetic coding sequence
  source 1..1038: mol_type = other DNA
atgggcctgctggtgtttgtgaggaacctgctgctggccctgtgcctcttcctggtgctgggcttcctgtactacagcgcctggaagctgcacctgctgcagtgggaggaggacagcaacagcgtggtgctgagctttgacagcgctggccagaccctgggctctgaatatgaccggctgggcttcctgctgaacctggacagcaagctgcctgctgagctggccaccaagtatgccaacttcagcgagggcgcctgcaagccaggctacgccagcgccctgatgacagccatcttcccccgcttcagcaagccagcccccatgttcctggatgacagcttcaggaagtgggcccgcatccgggagtttgtgcccccatttggcatcaagggccaggacaacctgatcaaggccatcctgtctgtgaccaaggagtaccgcctgaccccagccctggacagcctgcgctgccgccgctgcatcatcgtgggcaatggaggagtgctggccaacaagagcctgggcagcagaattgatgattatgacatcgtggtgcggctgaacagcgcccctgtgaagggctttgagaaggatgtgggcagcaagaccaccctgcgcatcacctacccagagggcgccatgcagaggcctgagcagtatgaaagagacagcctgtttgtgctggccggcttcaagtggcaggacttcaagtggctgaagtacatcgtgtacaaggagcgggtggaggccgccttcaccctgattggcctgcccttcaacaacggcctgatgggccggggcaacatccccaccctgggctctgtggccgtgaccatggccctgcacggctgtgatgaggtggccgtggccggcttcggctatgacatgagcaccccaaatgcccccctgcactactatgagaccgtgaggatggccgccatcaaggagagctggacccacaacatccagcgggagaaggagttcctgaggaagctggtgaaggcccgggtcatcacagacctgagcagcggcatctag

SEQ ID NO: 171662 - DNA, 1242 bp, synthetic construct; identical to SEQ ID NO: 171650
  misc_feature 1..1242: note = Description of Artificial Sequence: Synthetic coding sequence
  source 1..1242: mol_type = other DNA

SEQ ID NO: 171663 - DNA, 1035 bp, synthetic construct; identical to SEQ ID NO: 171647
  misc_feature 1..1035: note = Description of Artificial Sequence: Synthetic coding sequence
  source 1..1035: mol_type = other DNA

SEQ ID NO: 171664 - DNA, 1290 bp, synthetic construct; identical to SEQ ID NO: 171660
  misc_feature 1..1290: note = Description of Artificial Sequence: Synthetic coding sequence
  source 1..1290: mol_type = other DNA

SEQ ID NO: 171665 - DNA, 456 bp, synthetic construct
  misc_feature 1..456: note = Description of Artificial Sequence: Synthetic coding sequence
  source 1..456: mol_type = other DNA
atgggcctgctggtgtttgtgaggaacctgctgctggccctgtgcctcttcctggtgctgggcttcctgtactacagcgcctggaagctgcacctgctgcagtgggaggaggacagcaacagcgtggtgctgagctttgacagcgctggccagaccctgggctctgaatatgaccggctgggcttcctgctgaacctggacagcaagctgcctgctgagctggccaccaagtatgccaacttcagcgagggcgcctgcaagccaggctacgccagcgccctgatgacagccatcttcccccgcttcagcaagccagcccccatgttcctggatgacagcttcaggaagtgggcccgcatccgggagtttgtgcccccatttggcatcaagggccaggagtgcatcggctggctgctggagatctgtggccacagcagcgcccagggcgccccctag

SEQ ID NO: 171666 - DNA, 561 bp, synthetic construct
  misc_feature 1..561: note = Description of Artificial Sequence: Synthetic coding sequence
  source 1..561: mol_type = other DNA
atgggcctgctggtgtttgtgaggaacctgctgctggccctgtgcctcttcctggtgctgggcttcctgtactacagcgcctggaagctgcacctgctgcagtgggaggaggacagcaaatatgaccggctgggcttcctgctgaacctggacagcaagctgcctgctgagctggccaccaagtatgccaacttcagcgagggcgcctgcaagccaggctacgccagcgccctgatgacagccatcttcccccgcttcagcaagccagcccccatgttcctggatgacagcttcaggaagtgggcccgcatccgggagtttgtgcccccatttggcatcaagggccaggacaacctgatcaaggccatcctgtctgtgaccaaggagtaccgcctgaccccagccctggacagcctgcgctgccgccgctgcatcatcgtgggcaatggaggagtgctggccaacaagagcctgggcagcagaattgatgattatgacatcgtggtgtccccaggccgcaccatcagcagcgagaggaagagcttctgtggctcctggtag

SEQ ID NO: 171667 - DNA, 420 bp, synthetic construct
  misc_feature 1..420: note = Description of Artificial Sequence: Synthetic coding sequence
  source 1..420: mol_type = other DNA
atgggcctgctggtgtttgtgaggaacctgctgctggccctgtgcctcttcctggtgctgggcttcctgtactacagcgcctggaagctgcacctgctgcagtgggaggaggacagcaaatatgaccggctgggcttcctgctgaacctggacagcaagctgcctgctgagctggccaccaagtatgccaacttcagcgagggcgcctgcaagccaggctacgccagcgccctgatgacagccatcttcccccgcttcagcaagccagcccccatgttcctggatgacagcttcaggaagtgggcccgcatccgggagtttgtgcccccatttggcatcaagggccaggtgctggatgcccagtacccagcccgggagcgggtgtctgctgaggccggggagagcagccgccaccactag

SEQ ID NO: 171668 - DNA, 306 bp, synthetic construct
  misc_feature 1..306: note = Description of Artificial Sequence: Synthetic coding sequence
  source 1..306: mol_type = other DNA
atgggcctgctggtgtttgtgaggaacctgctgctggccctgtgcctcttcctggtgctgggcttcctgtactacagcgcctggaagctgcacctgctgcagtgggaggaggacagcaaatatgaccggctgggcttcctgctgaacctggacagcaagctgcctgctgagctggccaccaagtatgccaacttcagcgagggcgcctgcaagccaggctacgccagcgccctgatgacagccatcttcccccggcccggccgcaccatcagcagcgagaggaagagcttctgtggctcctggtag

SEQ ID NO: 171669 - DNA, 786 bp, synthetic construct
  misc_feature 1..786: note = Description of Artificial Sequence: Synthetic coding sequence
  source 1..786: mol_type = other DNA
atgggcctgctggtgtttgtgaggaacctgctgctggccctgtgcctcttcctggtgctgggcttcctgtactacagcgcctggaagctgcacctgctgcagtgggaggaggacagcaaatatgaccggctgggcttcctgctgaacctggacagcaagctgcctgctgagctggccaccaagtatgccaacttcagcgagggcgcctgcaagccaggctacgccagcgccctgatgacagccatcttcccccgcttcagcaagccagcccccatgttcctggatgacagcttcaggaagtgggcccgcatccgggagtttgtgcccccatttggcatcaagggccaggacaacctgatcaaggccatcctgtctgtgaccaaggagtaccgcctgaccccagccctggacagcctgcgctgccgccgctgcatcatcgtgggcaatggaggagtgctggccaacaagagcctgggcagcagaattgatgattatgacatcgtggtgcggctgaacagcgcccctgtgaagggctttgagaaggatgtgggcagcaagaccaccctgcgcatcacctacccagagggcgccatgcagaggcctgagcagtatgaaagagacagcctgtttgtgctggccggcttcaagtggcaggacttcaagtggctgaagtacatcgtgtacaaggagcgggtgtcctggacccacaacatccagcgggagaaggagttcctgaggaagctggtgaaggcccgggtcatcacagacctgagcagcggcatctag

SEQ ID NO: 171670 - DNA, 834 bp, synthetic construct; identical to SEQ ID NO: 171651
  misc_feature 1..834: note = Description of Artificial Sequence: Synthetic coding sequence
  source 1..834: mol_type = other DNA

SEQ ID NO: 171671 - DNA, 513 bp, synthetic construct; identical to SEQ ID NO: 171655
  misc_feature 1..513: note = Description of Artificial Sequence: Synthetic coding sequence
  source 1..513: mol_type = other DNA

SEQ ID NO: 171672 - DNA, 642 bp, synthetic construct
  misc_feature 1..642: note = Description of Artificial Sequence: Synthetic coding sequence
  source 1..642: mol_type = other DNA
atgaggaccagcgctgagtacttccggctggccctgagcaagctgcagagctgtgacctgtttgatgaatttgacaagatgaacaatggacctgtgctgggccacgaggaggaggtgggccgccgcaccaccttccgcctcttctacccagagagcgtcttcagtgaccccatccacaatgaccccaacaccaccgtcatcctgacagccttcaagccccatgacctgcgctggctgctggagctgctgatgggagacaagatcaacaccaacggcttctggaagaagccagccctgaacctgatctacaagccctaccagatccgcatcctggaccccttcatcatcagaacagctgcctatgagctgctgcacttccccaaggtgttccccaagaaccagaagcccaagcaccccaccaccggcatcatcgccatcaccctggccttctacatctgccacgaggtgcacctggccggcttcaagtacaacttcagtgacctgaagagccccctgcactactatggaaatgccaccatgagcctgatgaacaagaatgcctaccacaacgtgacagctgagcagctgttcctgaaggacatcatcgagaagaacctggtgatcaacctgacccaggactag

SEQ ID NO: 171673 - DNA, 996 bp, synthetic construct
  misc_feature 1..996: note = Description of Artificial Sequence: Synthetic coding sequence
  source 1..996: mol_type = other DNA
atgaggggctacctggtggccatcttcctgtctgctgtgttcctgtactacgtgctgcactgcatcctgtggggcaccaacgtgtactgggtggcccctgtggagatgaagagaagaaacaagatccagccctgcctgagcaagccagcctttgccagcctgctgcgcttccaccagttccaccccttcctgtgtgccgctgacttcaggaagatcgccagcctgtatggcagtgacaagtttgacctgccctacggcatgaggaccagcgctgagtacttccggctggccctgagcaagctgcagagctgtgacctgtttgatgaatttgacaacatcccctgcaagaagtgtgtggtggtgggcaatggaggagtgctgaagaacaagaccctgggggagaagattgacagctatgatgtgatcatccgcatgaacaatggacctgtgctgggccacgaggaggaggtgggccgccgcaccaccttccgcctcttctacccagagagcgtcttcagtgaccccatccacaatgaccccaacaccaccgtcatcctgacagccttcaagccccatgacctgcgctggctgctggagctgctgatgggagacaagatcaacaccaacggcttctggaagaagccagccctgaacctgatctacaagccctaccagatccgcatcctggaccccttcatcatcagaacagctgcctatgagctgctgcacttccccaaggtgttccccaagaaccagaagcccaagcaccccaccaccggcatcatcgccatcaccctggccttctacatctgccacgaggtgcacctggccggcttcaagtacaacttcagtgacctgaagagccccctgcactactatggaaatgccaccatgagcctgatgaacaagaatgcctaccacaacgtgacagctgagcagctgttcctgaaggacatcatcgagaagaacctggtgatcaacctgacccaggactag

SEQ ID NO: 171674 - DNA, 996 bp, synthetic construct; identical to SEQ ID NO: 171673
  misc_feature 1..996: note = Description of Artificial Sequence: Synthetic coding sequence
  source 1..996: mol_type = other DNA

SEQ ID NO: 171675 - DNA, 696 bp, synthetic construct
  misc_feature 1..696: note = Description of Artificial Sequence: Synthetic coding sequence
  source 1..696: mol_type = other DNA
atgaggggctacctggtggccatcttcctgtctgctgtgttcctgtactacgtgctgcactgcatcctgtggggcaccaacgtgtactgggtggcccctgtggagatgaagagaagaaacaagatccagccctgcctgagcaagccagcctttgccagcctgctgcgcttccaccagttccaccccttcctgtgtgccgctgacttcaggaagatcgccagcctgtatggcagtgacaagtttgacctgccctacggcatgaggaccagcgctgagtacttccggctggccctgagcaagctgcagagctgtgacctgtttgatgaatttgacaacatcccctgcaagaagtgtgtggtggtgggcaatggaggagtgctgaagaacaagaccctgggggagaagattgacagctatgatgtgatcatccgcatgaacaatggacctgtgctgggccacgaggaggaggtgggccgccgcaccaccttccgcctcttctacccagagagcgtcttcagtgaccccatccacaatgaccccaacaccaccgtcatcctgacagccttcaagccccatgacctgcgctggctgctggagctgctgatgggagacaagatcaacaccaacggcttctggaagaagccagccctgaacctgatctacaagccctaccagatccgcatcctggacccctag

SEQ ID NO: 171676 - DNA, 741 bp, synthetic construct
  misc_feature 1..741: note = Description of Artificial Sequence: Synthetic coding sequence
  source 1..741: mol_type = other DNA
atgcactgccgggactgtgccctggtgaccagcagcggccacctgctgcacagccggcagggcagccagattgaccagacagaatgtgtgatccgcatgaatgatgcccccacccggggctacggcagagatgtgggcaacagaaccagcctgcgggtcatcgcccacagcagcatccagaggatcctgaggaacagacatgacctgctgaatgtgtcccagggcaccgtcttcatcttctggggccccagcagctacatgagaagagatggcaagggccaggtgtacaacaacctgcacctgctgagccaggtgctgccccggctgaaggccttcatgatcaccaggcacaagatgctgcagtttgatgagctgttcaagcaggagaccgggaaggacaggaagatcagcaacacctggctgagcacaggctggttcaccatgaccatcgccctggagctgtgtgaccgcatcaacgtgtatggcatggtgcccccagacttctgccgggaccccaaccaccccagcgtgccctaccactactatgagccctttggaccagatgaatgtaccatgtacctgagccatgagcggggcaggaagggcagccaccaccgcttcatcacagagaagagggtcttcaagaactgggcccggaccttcaacatccacttcttccagcctgactggaagccagagagcctggccatcaaccaccctgagaacaagcctgtgttctag

SEQ ID NO: 171677 - DNA, 1011 bp, synthetic construct
  misc_feature 1..1011: note = Description of Artificial Sequence: Synthetic coding sequence
  source 1..1011: mol_type = other DNA
atgaagaccctgatgagacatggcctggccgtgtgcctggccctgaccaccatgtgcaccagcctgctgctggtgtacagcagcctgggcggccagaaggagcggcccccccagcagcagcagcagcagcagcagcagcagcagcaggccagcgccaccggcagcagccagcctgctgctgagagcagcacccagcagaggcctggggtgcctgctggcccccggcccctggatggctacctgggcgtggccgaccacaagcccctgaagatgcactgccgggactgtgccctggtgaccagcagcggccacctgctgcacagccggcagggcagccagattgaccagacagaatgtgtgatccgcatgaatgatgcccccacccggggctacggcagagatgtgggcaacagaaccagcctgcgggtcatcgcccacagcagcatccagaggatcctgaggaacagacatgacctgctgaatgtgtcccagggcaccgtcttcatcttctggggccccagcagctacatgagaagagatggcaagggccaggtgtacaacaacctgcacctgctgagccaggtgctgccccggctgaaggccttcatgatcaccaggcacaagatgctgcagtttgatgagctgttcaagcaggagaccgggaaggacaggaagatcagcaacacctggctgagcacaggctggttcaccatgaccatcgccctggagctgtgtgaccgcatcaacgtgtatggcatggtgcccccagacttctgccgggaccccaaccaccccagcgtgccctaccactactatgagccctttggaccagatgaatgtaccatgtacctgagccatgagcggggcaggaagggcagccaccaccgcttcatcacagagaagagggtcttcaagaactgggcccggaccttcaacatccacttcttccagcctgactggaagccagagagcctggccatcaaccaccctgagaacaagcctgtgttctag

SEQ ID NO: 171678 - DNA, 1275 bp, synthetic construct
  misc_feature 1..1275: note = Description of Artificial Sequence: Synthetic coding sequence
  source 1..1275: mol_type = other DNA
atgtctgaccatggagatgtgtccctgcccccagaggacagagtgcgggccctgagccagctgggcagcgctgtggaggtgaatgaagacatccccccccggcgctacttccgctctggagtggagatcatccgcatggccagcatctacagcgaggagggcaacatcgagcacgccttcatcctgtacaacaagtacatcaccctcttcatcgagaagctgcccaagcaccgggactacaagtctgctgtgattcctgagaagaaggacacagtgaagaagctgaaggagatcgccttccccaaggccgaggagctgaaggccgagctgctgaagcgctacaccaaggagtacacagagtacaatgaggagaagaagaaggaggccgaggagctggccaggaacatggccatccagcaggagctggagaaggagaagcagagggtggcccagcagaagcagcagcagctggagcaggagcagttccacgcctttgaggagatgatccggaaccaggagctggagaaggagcggctgaagatcgtgcaggagtttgggaaggtggaccccggcctgggcggccccctggtgcctgacctggagaagcccagcctggatgtgttccccaccctgactgtgagcagcatccagcccagcgactgccacaccaccgtgcggcctgccaagccccctgtggtggacaggagcctgaagccaggggccctgagcaacagcgagagcatccccaccattgatggcctgcggcacgtggtggtgcccggccgcctgtgcccccagttcctgcagctggccagcgccaacacagcccggggcgtggagacctgtggcatcctgtgtgggaagctgatgagaaatgagttcaccatcacccacgtgctgatccccaagcagagcgctggcagtgactactgcaacacagaaaatgaggaggagctgttcctgatccaggaccagcagggcctcatcaccctgggctggatccacacccaccccacccagacagccttcctgagctctgtggacctgcacacccactgcagctaccagatgatgctgcctgagagcgtggccatcgtgtgcagccccaagttccaggagaccggcttcttcaagctgacagaccacggcctggaggagatcagcagctgccggcagaagggcttccacccccacagcaaggaccccccactcttctgcagctgcagccacgtgacagtggtggacagagctgtgaccatcacagacctgaggtag

SEQ ID NO: 171679 - DNA, 1275 bp, synthetic construct; identical to SEQ ID NO: 171678
  misc_feature 1..1275: note = Description of Artificial Sequence: Synthetic coding sequence
  source 1..1275: mol_type = other DNA

SEQ ID NO: 171680 - DNA, 1275 bp, synthetic construct; identical to SEQ ID NO: 171678
  misc_feature 1..1275: note = Description of Artificial Sequence: Synthetic coding sequence
  source 1..1275: mol_type = other DNA

SEQ ID NO: 171681 - DNA, 1275 bp, synthetic construct; identical to SEQ ID NO: 171678
  misc_feature 1..1275: note = Description of Artificial Sequence: Synthetic coding sequence
  source 1..1275: mol_type = other DNA

SEQ ID NO: 171682 - DNA, 492 bp, synthetic construct
  misc_feature 1..492: note = Description of Artificial Sequence: Synthetic coding sequence
  source 1..492: mol_type = other DNA
atgtctgaccatggagatgtgtccctgcccccagaggacagagtgcgggccctgagccagctgggcagcgctgtggaggtgaatgaagacatccccccccggcgctacttccgctctggagtggagatcatccgcatggccagcatctacagcgaggagggcaacatcgagcacgccttcatcctgtacaacaagtacatcaccctcttcatcgagaagctgcccaagcaccgggactacaagtctgctgtgattcctgagaagaaggacacagtgaagaagctgaaggagatcgccttccccaaggccgaggagctgaaggccgagctgctgaagcgctacaccaaggagtacacagagtacaatgaggagaagaagaaggaggccgaggagctggccaggaacatggccatccagcaggagctggagaaggagaagcagagggtggcccagcagaagcagcagcagctggagcaggagcagttccactag

SEQ ID NO: 171683 - DNA, 957 bp, synthetic construct
  misc_feature 1..957: note = Description of Artificial Sequence: Synthetic coding sequence
  source 1..957: mol_type = other DNA
atgtctgaccatggagatgtgtccctgcccccagaggacagagtgcgggccctgagccagctgggcagcgctgtggaggtgaatgaagacatccccccccggcgctacttccgctctggagtggagatcatccgcatggccagcatctacagcgaggagggcaacatcgagcacgccttcatcctgtacaacaagtacatcaccctcttcatcgagaagctgcccaagcaccgggactacaagtctgctgtgattcctgagaagaaggacacagtgaagaagctgaaggagatcgccttccccaaggccgaggagctgaaggccgagctgctgaagcgctacaccaaggagtacacagagtacaatgaggagaagaagaaggaggccgaggagctggccaggaacatggccatccagcaggagctggagaaggagaagcagagggtggcccagcagaagcagcagcagctggagcaggagcagttccacgcctttgaggagatgatccggaaccaggagctggagaaggagcggctgaagatcgtgcaggagtttgggaaggtggaccccggcctgggcggccccctggtgcctgacctggagaagcccagcctggatgtgttccccaccctgactgtgagcagcatccagcccagcgactgccacaccaccgtgcggcctgccaagccccctgtggtggacaggagcctgaagccaggggccctgagcaacagcgagagcatccccaccattgatggcctgcggcacgtggtggtgcccggccgcctgtgcccccagttcctgcagctggccagcgccaacacagcccggggcgtggagacctgtggcatcctgtgtgggaagctgatgagaaatgagttcaccatcacccacgtgctgatccccaagcagagcgctggcagtgactactgcaacacagaaaatgaggaggagtag

SEQ ID NO: 171684 - DNA, 414 bp, synthetic construct
  misc_feature 1..414: note = Description of Artificial Sequence: Synthetic coding sequence
  source 1..414: mol_type = other DNA
atgtctgaccatggagatgtgtccctgcccccagaggacagagtgcgggccctgagccagctgggcagcgctgtggaggtgaatgaagacatccccccccggcgctacttccgctctggagtggagatcatccgcatggccagcatctacagcgaggagggcaacatcgagcacgccttcatcctgtacaacaagtacatcaccctcttcatcgagaagctgcccaagcaccgggactacaagtctgctgtgattcctgagaagaaggacacagtgaagaagctgaaggagatcgccttccccaaggccgaggagctgaaggccgagctgctgaagcgctacaccaaggagtacacagagtacaatgaggagaagaagaaggaggccgaggagctggccaggaacatggcctag

SEQ ID NO: 171685 - DNA, 1047 bp, synthetic construct
  misc_feature 1..1047: note = Description of Artificial Sequence: Synthetic coding sequence
  source 1..1047: mol_type = other DNA
atgtctgaccatggagatgtgtccctgcccccagaggacagagtgcgggccctgagccagctgggcagcgctgtggaggtgaatgaagacatccccccccggcgctacttccgctctggagtggagatcatccgcatggccagcatctacagcgaggagggcaacatcgagcacgccttcatcctgtacaacaagtacatcaccctcttcatcgagaagctgcccaagcaccgggactacaagtctgctgtgattcctgagaagaaggacacagtgaagaagctgaaggagatcgccttccccaaggccgaggagctgaaggccgagctgctgaagcgctacaccaaggagtacacagagtacaatgaggagaagaagaaggaggccgaggagctggccaggaacatggccatccagcaggagctggagaaggagaagcagagggtggcccagcagaagcagcagcagctggagcaggagcagttccacgcctttgaggagatgatccggaaccaggagctggagaaggagcggctgaagatcgtgcaggagtttgggaaggtggaccccggcctgggcggccccctggtgcctgacctggagaagcccagcctggatgtgttccccaccctgactgtgagcagcatccagcccagcgactgccacaccaccgtgcggcctgccaagccccctgtggtggacaggagcctgaagccaggggccctgagcaacagcgagagcatccccaccattgatggcctgcggcacgtggtggtgcccggccgcctgtgcccccagttcctgcagctggccagcgccaacacagcccggggcgtggagacctgtggcatcctgtgtgggaagctgatgagaaatgagttcaccatcacccacgtgctgatccccaagcagagcgctggcagtgactactgcaacacagaaaatgaggaggagctgttcctgatccaggaccagcagggcctcatcaccctgggctggattcatgtggagaccctgtggagcctgaagagcctgcacgccccctag

SEQ ID NO: 171686 - DNA, 813 bp, synthetic construct
  misc_feature 1..813: note = Description of Artificial Sequence: Synthetic coding sequence
  source 1..813: mol_type = other DNA
atgaggcagcagcagctggagagcgagcagttcctgttctttgaggaccagctgaagaagcaggagctggcccggggccagatgaggagccagcagaccagcggcctgtctgagcagattgatggcagcgccctgagctgcttcagcacccaccagaacaacagcctgctgaatgtgtttgctgaccagcccaacaagagtgatgccaccaactatgccagccacagcccccctgtgaacagagccctgaccccagctgccaccctgtctgctgtgcagaacctggtggtggagggcctgcgctgtgtggtgctgcctgaggacctgtgccacaagttcctgcagctggccgagagcaacacagtgcggggcatcgagacctgtggcatcctgtgtgggaagctgacccacaatgagttcaccatcacccacgtgattgtgcccaagcagagcgctggccctgactactgtgacatggagaatgtggaggagctgttcaacgtgcaggaccagcacgacctgctgaccctgggctggatccacacccaccccacccagacagccttcctgagctctgtggacctgcacacccactgcagctaccagctgatgctgcctgaggccatcgccatcgtgtgcagccccaagcacaaggacaccggcatcttccggctgaccaatgccggcatgctggaggtgtctgcctgcaagaagaagggcttccacccccacaccaaggagcccaggctcttcagcatctgcaagcacgtgctggtgaaggacatcaagatcatcgtgctggacctgaggtag

SEQ ID NO: 171687 - DNA, 1311 bp, synthetic construct
  misc_feature 1..1311: note = Description of Artificial Sequence: Synthetic coding sequence
  source 1..1311: mol_type = other DNA
atggaccagcccttcaccgtgaacagcctgaagaagctggccgccatgccagaccacacagatgtgtccctgagccctgaggagcgggtgcgggccctgagcaagctgggctgcaacatcaccatcagcgaggacatcaccccccggcgctacttccgcagcggcgtggagatggagaggatggcctctgtgtacctggaggagggcaacctggagaatgcctttgtgctgtacaacaagttcatcaccctgtttgtggagaagctgcccaaccaccgggactaccagcagtgtgctgtgcctgagaagcaggacatcatgaagaagctgaaggagatcgccttccccaggacagatgagctgaagaatgacctgctgaagaagtacaacgtggagtaccaggagtacctgcagagcaagaacaagtacaaggccgagatcctgaagaagctggagcaccagaggctgattgaagctgagaggaagagaattgcccagatgaggcagcagcagctggagagcgagcagttcctgttctttgaggaccagctgaagaagcaggagctggcccggggccagatgaggagccagcagaccagcggcctgtctgagcagattgatggcagcgccctgagctgcttcagcacccaccagaacaacagcctgctgaatgtgtttgctgaccagcccaacaagagtgatgccaccaactatgccagccacagcccccctgtgaacagagccctgaccccagctgccaccctgtctgctgtgcagaacctggtggtggagggcctgcgctgtgtggtgctgcctgaggacctgtgccacaagttcctgcagctggccgagagcaacacagtgcggggcatcgagacctgtggcatcctgtgtgggaagctgacccacaatgagttcaccatcacccacgtgattgtgcccaagcagagcgctggccctgactactgtgacatggagaatgtggaggagctgttcaacgtgcaggaccagcacgacctgctgaccctgggctggatccacacccaccccacccagacagccttcctgagctctgtggacctgcacacccactgcagctaccagctgatgctgcctgaggccatcgccatcgtgtgcagccccaagcacaaggacaccggcatcttccggctgaccaatgccggcatgctggaggtgtctgcctgcaagaagaagggcttccacccccacaccaaggagcccaggctcttcagcatctgcaagcacgtgctggtgaaggacatcaagatcatcgtgctggacctgaggtag

SEQ ID NO: 171688 - DNA, 1311 bp, synthetic construct; identical to SEQ ID NO: 171687
  misc_feature 1..1311: note = Description of Artificial Sequence: Synthetic coding sequence
  source 1..1311: mol_type = other DNA

SEQ ID NO: 171689 - DNA, 1386 bp, synthetic construct
  misc_feature 1..1386: note = Description of Artificial Sequence: Synthetic coding sequence
  source 1..1386: mol_type = other DNA
atggaccagcccttcaccgtgaacagcctgaagaagctggccgccatgccagaccacacagatgtgtccctgagccctgaggagcgggtgcgggccctgagcaagctgggctgcaacatcaccatcagcgaggacatcaccccccggcgctacttccgcagcggcgtggagatggagaggatggcctctgtgtacctggaggagggcaacctggagaatgcctttgtgctgtacaacaagttcatcaccctgtttgtggagaagctgcccaaccaccgggactaccagcagtgtgctgtgcctgagaagcaggacatcatgaagaagctgaaggagatcgccttccccaggacagatgagctgaagaatgacctgctgaagaagtacaacgtggagtaccaggagtacctgcagagcaagaacaagtacaaggccgagatcctgaagaagctggagcaccagaggctgattgaagctgagaggaagagaattgcccagatgaggcagcagcagctggagagcgagcagttcctgttctttgaggaccagctgaagaagcaggagctggcccggggccagatgaggagccagcagaccagcggcctgtctgagcagattgatggcagcgccctgagctgcttcagcacccaccagaacaacagcctgctgaatgtgtttgctgaccagcccaacaagagtgatgccaccaactatgccagccacagcccccctgtgaacagagccctgaccccagctgccaccctgtctgctgtgcagaacctggtggtggagggcctgcgctgtgtggtgctgcctgaggacctgtgccacaagttcctgcagctggccgagagcaacacagtgcggggcatcgagacctgtggcatcctgtgtgggaagctgacccacaatgagttcaccatcacccacgtgattgtgcccaagcagagcgctggccctgactactgtgacatggagaatgtggaggagctgttcaacgtgcaggaccagcacgacctgctgaccctgggctggatccacacccaccccacccagacagccttcctgagctctgtggacctgcacacccactgcagctaccagctgatgctgcctgaggccatcgccatcgtgtgcagccccaagcacaaggacaccggcatcttccggctgaccaatgccggcatgctggaggtgtctgcctgcaagaagaagggcttccacccccacaccaaggagcccaggctcttcagcatccagaagttcctgagcggcatcatcagcggcacagccctggagatggagcccctgaagattggctacggccccaacggcttccccctgctgggcatcagccgcagcagcagccccagcgagcagctgtag

SEQ ID NO: 171690 - DNA, 267 bp, synthetic construct
  misc_feature 1..267: note = Description of Artificial Sequence: Synthetic coding sequence
  source 1..267: mol_type = other DNA
atgagcatcatggaccacagccccaccaccggggtggtgaccgtcatcgtcatcctgattgccatcgccgccctgggcgccctgatcctgggctgctggtgctacctgcggctgcagaggatcagccagagtgaagatgaggagagcatcgtgggagatggagagaccaaggagcccttcctgctggtgcagtacagcgccaagggcccctgtgtggagaggaaggccaagctgatgacccccaacggccctgaggtgcatggatag

SEQ ID NO: 171691 - DNA, 744 bp, synthetic construct
  misc_feature 1..744: note = Description of Artificial Sequence: Synthetic coding sequence
  source 1..744: mol_type = other DNA
atgctgcagaacagcgctgtgctgctggtgctggtgatcagcgccagcgccacccatgaagctgagcagaatgacagcgtgagccccaggaagagccgggtggccgcccagaacagcgctgaggtggtgcgctgcctgaacagcgccctgcaggtgggctgtggggcctttgcctgcctggagaacagcacctgtgacacagatggcatgtatgacatctgcaagagcttcctgtacagcgctgccaagtttgacacccagggcaaggcctttgtgaaggagagcctgaagtgcatcgccaatggagtgaccagcaaggtgttcctggccatccgccgctgcagcaccttccagaggatgattgctgaggtgcaggaggagtgctacagcaagctgaatgtgtgcagcatcgccaagaggaaccctgaggccatcacagaggtggtgcagctgcccaaccacttcagcaaccgctactacaaccggctggtgcgcagcctgctggagtgtgatgaggacacagtgtccaccatccgggacagcctgatggagaagattggccccaacatggccagcctcttccacatcctgcagacagaccactgtgcccagacccaccccagggctgacttcaacagaagaaggaccaatgagccccagaagctgaaggtgctgctgaggaacctgcggggggaggaggacagccccagccacatcaagaggaccagccatgagagcgcctag

SEQ ID NO: 171692 - DNA, 537 bp, synthetic construct
  misc_feature 1..537: note = Description of Artificial Sequence: Synthetic coding sequence
  source 1..537: mol_type = other DNA
atgtatgacatctgcaagagcttcctgtacagcgctgccaagtttgacacccagggcaaggcctttgtgaaggagagcctgaagtgcatcgccaacggggtgaccagcaaggtgttcctggccatccgccgctgcagcaccttccagaggatgattgctgaggtgcaggaggagtgctacagcaagctgaatgtgtgcagcatcgccaagagaaatcctgaggccatcacagaggtggtgcagctgcccaaccacttcagcaaccgctactacaaccggctggtgcgcagcctgctggagtgtgatgaagatactgtgtccaccatccgggacagcctgatggagaagattggccccaacatggccagcctcttccacatcctgcagacagaccactgtgcccagacccaccccagggctgacttcaacagaagaaggaccaatgagccccagaagctgaaggtgctgctgaggaacctgcggggggaggaggacagccccagccacatcaagaggaccagccatgaaagtgcctag

SEQ ID NO: 171693 - DNA, 537 bp, synthetic construct; identical to SEQ ID NO: 171692
  misc_feature 1..537: note = Description of Artificial Sequence: Synthetic coding sequence
  source 1..537: mol_type = other DNA

SEQ ID NO: 171694 - DNA, 2733 bp, synthetic construct
  misc_feature 1..2733: note = Description of Artificial Sequence: Synthetic coding sequence
  source 1..2733: mol_type = other DNA
atggccagcagcgcccagagcggcggcagcagcggcggccctgctgtgcccaccgtgcagaggggcatcatcaagatggtgctgagcggctgtgccatcatcgtgcggggccagccccggggcggccccccacctgagcggcagatcaacctgagcaacatccgggccggcaacctggccaggagagctgctgccacccagccagatgccaaggacaccccagatgagccctgggccttccctgcccgggagttcctgaggaagaagctgattggcaaggaggtgtgcttcaccatcgagaacaagaccccccagggccgggagtatggcatgatctacctgggcaaggacaccaatggagaaaatattgctgagagcctggtggccgagggcctggccacccggcgggagggcatgagggccaacaaccctgagcagaaccggctgtctgaatgtgaggagcaggccaaggccgccaagaagggcatgtggagcgagggcaatggcagccacaccatccgggacctgaagtacaccatcgagaaccccaggcactttgtggacagccaccaccagaagcctgtgaatgccatcattgaacatgtgagagatggctctgtggtgcgggccctgctgctgcctgactactacctggtgacagtgatgctgagcggcatcaagtgccccaccttccggcgggaggctgatggcagcgagaccccagagccctttgctgctgaggccaagttcttcacagagagccggctgctgcagagagatgtgcagatcatcctggagagctgccacaaccagaacatcctgggcaccatcctgcaccccaatggaaacatcacagagctgctgctgaaggagggctttgcccgctgtgtggactggagcattgctgtgtacaccagaggagctgagaagctgcgggctgctgagagatttgccaaggagcggcggctgcgcatctggagggactatgtggcccccacagccaacctggaccagaaggacaagcagtttgtggccaaggtgatgcaggtgctgaatgctgatgccatcgtggtgaagctgaacagcggggactacaagaccatccacctgagcagcatccggcccccccggctggagggggagaacacccaggacaagaacaagaagctgcggcccctgtatgacatcccctacatgtttgaggcccgggagttcctgaggaagaagctgattggcaagaaggtgaatgtgacagtggactacatccggcctgccagccctgccacagaaacagtgcctgccttcagcgagaggacctgtgccaccgtgaccatcggcggcatcaacattgctgaggccctggtgtccaagggcctggccaccgtcatccgctaccggcaggatgatgaccagaggagcagccactatgatgagctgctggccgctgaggcccgggccatcaagaatggcaagggcctgcacagcaagaaggaggtgcccatccaccgggtggccgacatcagcggggacacccagaaggccaagcagttcctgcccttcctgcagagagctggccgctctgaggccgtggtggagtatgtgttcagcggcagccggctgaagctgtacctgcccaaggagacctgcctgatcaccttcctgctggccggcattgaatgtcccaggggggccaggaacctgcccggcctggtgcaggagggggagcccttcagcgaggaggccaccctcttcaccaaggagctggtgctgcagcgggaggtggaggtggaggtggagagcatggacaaggccggcaacttcatcggctggctgcacattgatggagccaacctgtctgtgctgctggtggagcacgccctgagcaaggtgcacttcaccgctgagaggagcagctactacaagagcctgctgtctgctgaggaggccgccaagcagaagaaggagaaggtgtgggcccactatgaggagcagcctgtggaggaggtgatgcctgtgctggaggagaaggagaggtctgccagctacaagcctgtgtttgtgacagagatcacagatgacctgcacttctacgtgcaggatgtggagaccggcacccagctggagaagctgatggagaacatgagaaatgacatcgccagccacccccctgtggagggcagctatgcccccaggagaggagagttctgcatcgccaagtttgtggatggagagtggtaccgggcccgggtggagaaggtggagagccctgccaagatccacgtgttctacatcgactatggcaaccgggaggtgctgcccagcacccggctgggcaccctgagccctgccttcagcaccagggtgctgcctgcccaggccacagaatatgcctttgccttcatccaggtgccccaggatgatgatgccaggacagatgctgtggacagcgtggtgcgggacatccagaacacccagtgcctgctgaatgtggagcacctgtctgctggctgcccccacgtgaccctgcagtttgctgacagcaaaggagatgtgggcctgggcctggtgaaggagggcctggtgatggtggaggtgaggaaggagaagcagttccagaaggtgatcacagagtacctgaatgcccaggagagcgccaagagcgcccggctgaacctgtggaggtatggagacttccgggcagatgatgctgatgaatttggctacagcaggtag

SEQ ID NO: 171695 - DNA, 2703 bp, synthetic construct
  misc_feature 1..2703: note = Description of Artificial Sequence: Synthetic coding sequence
  source 1..2703: mol_type = other DNA
atggccagcagcgctgtgcccaccgtgcagaggggcatcatcaagatggtgctgagcggctgtgccatcatcgtgcggggccagccccggggcggccccccacctgagcggcagatcaacctgagcaacatccgggccggcaacctggccaggagagctgctgccacccagccagatgccaaggacaccccagatgagccctgggccttccctgcccgggagttcctgaggaagaagctgattggcaaggaggtgtgcttcaccatcgagaacaagaccccccagggccgggagtatggcatgatctacctgggcaaggacaccaatggagaaaatattgctgagagcctggtggccgagggcctggccacccggcgggagggcatgagggccaacaaccctgagcagaaccggctgtctgaatgtgaggagcaggccaaggccgccaagaagggcatgtggagcgagggcaatggcagccacaccatccgggacctgaagtacaccatcgagaaccccaggcactttgtggacagccaccaccagaagcctgtgaatgccatcattgaacatgtgagagatggctctgtggtgcgggccctgctgctgcctgactactacctggtgacagtgatgctgagcggcatcaagtgccccaccttccggcgggaggctgatggcagcgagaccccagagccctttgctgctgaggccaagttcttcacagagagccggctgctgcagagagatgtgcagatcatcctggagagctgccacaaccagaacatcctgggcaccatcctgcaccccaatggaaacatcacagagctgctgctgaaggagggctttgcccgctgtgtggactggagcattgctgtgtacaccagaggagctgagaagctgcgggctgctgagagatttgccaaggagcggcggctgcgcatctggagggactatgtggcccccacagccaacctggaccagaaggacaagcagtttgtggccaaggtgatgcaggtgctgaatgctgatgccatcgtggtgaagctgaacagcggggactacaagaccatccacctgagcagcatccggcccccccggctggagggggagaacacccaggacaagaacaagaagctgcggcccctgtatgacatcccctacatgtttgaggcccgggagttcctgaggaagaagctgattggcaagaaggtgaatgtgacagtggactacatccggcctgccagccctgccacagaaacagtgcctgccttcagcgagaggacctgtgccaccgtgaccatcggcggcatcaacattgctgaggccctggtgtccaagggcctggccaccgtcatccgctaccggcaggatgatgaccagaggagcagccactatgatgagctgctggccgctgaggcccgggccatcaagaatggcaagggcctgcacagcaagaaggaggtgcccatccaccgggtggccgacatcagcggggacacccagaaggccaagcagttcctgcccttcctgcagagagctggccgctctgaggccgtggtggagtatgtgttcagcggcagccggctgaagctgtacctgcccaaggagacctgcctgatcaccttcctgctggccggcattgaatgtcccaggggggccaggaacctgcccggcctggtgcaggagggggagcccttcagcgaggaggccaccctcttcaccaaggagctggtgctgcagcgggaggtggaggtggaggtggagagcatggacaaggccggcaacttcatcggctggctgcacattgatggagccaacctgtctgtgctgctggtggagcacgccctgagcaaggtgcacttcaccgctgagaggagcagctactacaagagcctgctgtctgctgaggaggccgccaagcagaagaaggagaaggtgtgggcccactatgaggagcagcctgtggaggaggtgatgcctgtgctggaggagaaggagaggtctgccagctacaagcctgtgtttgtgacagagatcacagatgacctgcacttctacgtgcaggatgtggagaccggcacccagctggagaagctgatggagaacatgagaaatgacatcgccagccacccccctgtggagggcagctatgcccccaggagaggagagttctgcatcgccaagtttgtggatggagagtggtaccgggcccgggtggagaaggtggagagccctgccaagatccacgtgttctacatcgactatggcaaccgggaggtgctgcccagcacccggctgggcaccctgagccctgccttcagcaccagggtgctgcctgcccaggccacagaatatgcctttgccttcatccaggtgccccaggatgatgatgccaggacagatgctgtggacagcgtggtgcgggacatccagaacacccagtgcctgctgaatgtggagcacctgtctgctggctgcccccacgtgaccctgcagtttgctgacagcaaaggagatgtgggcctgggcctggtgaaggagggcctggtgatggtggaggtgaggaaggagaagcagttccagaaggtgatcacagagtacctgaatgcccaggagagcgccaagagcgcccggctgaacctgtggaggtatggagacttccgggcagatgatgctgatgaatttggctacagcaggtag

SEQ ID NO: 171696 - DNA, 705 bp, synthetic construct
  misc_feature 1..705: note = Description of Artificial Sequence: Synthetic coding sequence
  source 1..705: mol_type = other DNA
atgaaccacctgcctgaggacatggagaatgccctgaccggcagccagagcagccacgccagcctgaggaacatccacagcatcaaccccacccagctgatggccagaattgagagctatgagggccgggagaagaagggcatcagtgatgtgcggaggaccttctgcctgtttgtgacctttgacctgctgtttgtgaccctgctgtggatcatcgagctgaatgtgaatggaggcatcgagaacaccctggagaaggaggtgatgcagtatgactactacagcagctactttgacatcttcctgctggccgtgttccgcttcaaggtgctgatcctggcctatgctgtgtgccgcctgcggcactggtgggccatcgccctgaccacagctgtgaccagcgccttcctgctggccaaggtgatcctgagcaagctgttcagccagggcgccttcggctacgtgctgcccatcatctccttcatcctggcctggattgagacctggttcctggacttcaaggtgctgccccaggaggccgaggaggagaaccggctgctgattgtgcaggatgccagcgagcgggccgccctgatccctgggggcctgagtgatggccagttctacagccccccagagagcgaggccggcagcgaggaggccgaggagaagcaggacagcgagaagcccctgctggagctgtag

SEQ ID NO: 171697 - DNA, 705 bp, synthetic construct; identical to SEQ ID NO: 171696
  misc_feature 1..705: note = Description of Artificial Sequence: Synthetic coding sequence
  source 1..705: mol_type = other DNA

SEQ ID NO: 171698 - DNA, 621 bp, synthetic construct
  misc_feature 1..621: note = Description of Artificial Sequence: Synthetic coding sequence
  source 1..621: mol_type = other DNA
atgaaccacctgcctgaggacatggagaatgccctgaccggcagccagagcagccacgccagcctgaggaacatccacagcatcaaccccacccagctgatggccagaattgagagctatgagggccgggagaagaagggcatcagtgatgtgcggaggaccttctgcctgtttgtgacctttgacctgctgtttgtgaccctgctgtggatcatcgagctgaatgtgaatggaggcatcgagaacaccctggagaaggaggtgatgcagtatgactactacagcagctactttgacatcttcctgctggccgtgttccgcttcaaggtgctgatcctggcctatgctgtgtgccgcctgcggcactggtgggccatcgccctgaccacagctgtgaccagcgccttcctgctggccaaggtgatcctgagcaagctgttcagccagggcgccttcggctacgtgctgcccatcatctccttcatcctggcctggattgagacctggttcctggacttcaaggtgctgccccaggaggccgaggaggagaaccggctgctgattgtgcaggatgccagcgagcgggccgccctgatccctgggggcctgagtgatggatag

SEQ ID NO: 171699 - DNA, 555 bp, synthetic construct
  misc_feature 1..555: note = Description of Artificial Sequence: Synthetic coding sequence
  source 1..555: mol_type = other DNA
atgaaccacctgcctgaggacatggagaatgccctgaccggcagccagagcagccacgccagcctgaggaacatccacagcatcaaccccacccagctgatggccagaattgagagctatgagggccgggagaagaagggcatcagtgatgtgcggaggaccttctgcctgtttgtgacctttgacctgctgtttgtgaccctgctgtggatcatcgagctgaatgtgaatggaggcatcgagaacaccctggagaaggaggtgatgcagtatgactactacagcagctactttgacatcttcctgctggccgtgttccgcttcaaggtgctgatcctggcctatgctgtgtgccgcctgcggcactggtgggccatcgccctgaccacagctgtgaccagcgccttcctgctggccaaggtgatcctgagcaagctgttcagccagggcgccttcggctacgtgctgcccatcatctccttcatcctggcctggattgagacctggttcctggacttcaaggtgctgccccaggaggccgaggaggagaactag

SEQ ID NO: 171700 - DNA, 519 bp, synthetic construct
  misc_feature 1..519: note = Description of Artificial Sequence: Synthetic coding sequence
  source 1..519: mol_type = other DNA
atgaaccacctgcctgaggacatggagaatgccctgaccggcagccagagcagccacgccagcctgaggaacatccacagcatcaaccccacccagctgatggccagaattgagagctatgagggccgggagaagaagggcatcagtgatgtgcggaggaccttctgcctgtttgtgacctttgacctgctgtttgtgaccctgctgtggatcatcgagctgaatgtgaatggaggcatcgagaacaccctggagaaggaggtgatgcagtatgactactacagcagctactttgacatcttcctgctggccgtgttccgcttcaaggtgctgatcctggcctatgctgtgtgccgcctgcggcactggtgggccatcgccctgaccacagctgtgaccagcgccttcctgctggccaaggtgatcctgagcaagctgttcagccagggcgccttcggctacgtgctgcccatcatctccttcatcctggcctggattgagacctggttcctggactag

SEQ ID NO: 171701 - DNA, 684 bp, synthetic construct
  misc_feature 1..684: note = Description of Artificial Sequence: Synthetic coding sequence
  source 1..684: mol_type = other DNA
atggagaatgccctgaccggcagccagagcagccacgccagcctgaggaacatccacagcatcaaccccacccagctgatggcccgcatcgagagctatgagggccgggagaagaagggcatcagtgatgtgcggaggaccttctgcctgtttgtgacctttgacctgctgtttgtgaccctgctgtggatcatcgagctgaatgtgaatggaggcatcgagaacaccctggagaaggaggtgatgcagtatgactactacagcagctactttgacatcttcctgctggccgtgttccgcttcaaggtgctgatcctggcctatgctgtgtgccgcctgcggcactggtgggccatcgccctgaccacagctgtgaccagcgccttcctgctggccaaggtgatcctgagcaagctgttcagccagggcgccttcggctacgtgctgcccatcatctccttcatcctggcctggattgagacctggttcctggacttcaaggtgctgccccaggaggccgaggaggagaaccggctgctgattgtgcaggatgccagcgagagagctgccctgatccctgggggcctgagtgatggccagttctacagccccccagagagcgaggccggcagcgaggaggccgaggagaagcaggacagcgagaagcccctgctggagctgtag

SEQ ID NO: 171702 - DNA, 1338 bp, synthetic construct
  misc_feature 1..1338: note = Description of Artificial Sequence: Synthetic coding sequence
  source 1..1338: mol_type = other DNA
atgagcaagctgccccgggagctgacccgggacctggagaggagcctgcctgctgtggccagcctgggcagcagcctgagccacagccagagcctgagcagccacctgctgcccccacctgagaagagaagagccatcagtgatgtgcggaggaccttctgcctgtttgtgacctttgacctgctcttcatcagcctgctgtggatcatcgagctgaacaccaacacaggcatcaggaagaacctggagcaggagatcatccagtacaacttcaagaccagcttctttgacatctttgtgctggccttcttccgcttcagcggcctgctgctgggctatgctgtgctgcggctgcggcactggtgggtgattgctgtgaccaccctggtgagcagcgccttcctgattgtgaaggtgatcctgtctgagctgctgagcaaaggagccttcggctacctgctgcccatcgtgtcctttgtgctggcctggctggagacctggttcctggacttcaaggtgctgccccaggaggccgaggaggagcgctggtacctggccgcccaggtggccgtggcccggggccccctgctcttcagcggggccctgtctgagggccagttctacagccccccagagagctttgctggcagtgacaatgaaagtgatgaggaggtggccggcaagaagagcttcagcgcccaggagcgggagtacatccggcagggcaaggaggccacagctgtggtggaccagatcctggcccaggaggagaactggaagtttgagaagaacaatgaatatggagacacagtgtacaccatcgaggtgcccttccacggcaagaccttcatcctgaagaccttcctgccctgcccagctgagctggtgtaccaggaggtgatcctgcagcctgagaggatggtgctgtggaacaagacagtgacagcctgccagatcctgcagagggtggaggacaacaccctcatctcctatgatgtgtctgctggagctgctgggggcgtggtgagcccccgggactttgtgaatgtgagaagaattgaaagaagaagagaccgctacctgagcagcggcatcgccaccagccacagcgccaagccacccacccacaagtatgtgcggggggagaatggacctgggggcttcatcgtgctgaagagcgccagcaacccccgggtgtgcacctttgtgtggatcctgaacacagacctgaagggccgcctgccccgctacctgatccaccagagcctggccgccaccatgtttgaatttgccttccacctgcggcagaggatcagcgagctgggcgcccgggcctag

SEQ ID NO: 171703 - DNA, 1284 bp, synthetic construct
  misc_feature 1..1284: note = Description of Artificial Sequence: Synthetic coding sequence
  source 1..1284: mol_type = other DNA
atgagcaagctgccccgggagctgacccgggacctggagaggagcctgcctgctgtggccagcctgggcagcagcctgagccacagccagagcctgagcagccacctgctgcccccacctgagaagagaagagccatcagtgatgtgcggaggaccttctgcctgtttgtgacctttgacctgctcttcatcagcctgctgtggatcatcgagctgaacaccaacacaggcatcaggaagaacctggagcaggagatcatccagtacaacttcaagaccagcttctttgacatctttgtgctggccttcttccgcttcagcggcctgctgctgggctatgctgtgctgcggctgcggcactggtgggtgattgccctgctgagcaaaggagccttcggctacctgctgcccatcgtgtcctttgtgctggcctggctggagacctggttcctggacttcaaggtgctgccccaggaggccgaggaggagcgctggtacctggccgcccaggtggccgtggcccggggccccctgctcttcagcggggccctgtctgagggccagttctacagccccccagagagctttgctggcagtgacaatgaaagtgatgaggaggtggccggcaagaagagcttcagcgcccaggagcgggagtacatccggcagggcaaggaggccacagctgtggtggaccagatcctggcccaggaggagaactggaagtttgagaagaacaatgaatatggagacacagtgtacaccatcgaggtgcccttccacggcaagaccttcatcctgaagaccttcctgccctgcccagctgagctggtgtaccaggaggtgatcctgcagcctgagaggatggtgctgtggaacaagacagtgacagcctgccagatcctgcagagggtggaggacaacaccctcatctcctatgatgtgtctgctggagctgctgggggcgtggtgagcccccgggactttgtgaatgtgagaagaattgaaagaagaagagaccgctacctgagcagcggcatcgccaccagccacagcgccaagccacccacccacaagtatgtgcggggggagaatggacctgggggcttcatcgtgctgaagagcgccagcaacccccgggtgtgcacctttgtgtggatcctgaacacagacctgaagggccgcctgccccgctacctgatccaccagagcctggccgccaccatgtttgaatttgccttccacctgcggcagaggatcagcgagctgggcgcccgggcctag

SEQ ID NO: 171704 - DNA, 591 bp, synthetic construct
  misc_feature 1..591: note = Description of Artificial Sequence: Synthetic coding sequence
  source 1..591: mol_type = other DNA
atgagcaagctgccccgggagctgacccgggacctggagaggagcctgcctgctgtggccagcctgggcagcagcctgagccacagccagagcctgagcagccacctgctgcccccacctgagaagagaagagccatcagtgatgtgcggaggaccttctgcctgtttgtgacctttgacctgctcttcatcagcctgctgtggatcatcgagctgaacaccaacacaggcatcaggaagaacctggagcaggagatcatccagtacaacttcaagaccagcttctttgacatctttgtgctggccttcttccgcttcagcggcctgctgctgggctatgctgtgctgcggctgcggcactggtgggtgattgctgtgaccaccctggtgagcagcgccttcctgattgtgaaggtgatcctgtctgagctgctgagcaaaggagccttcggctacctgctgcccatcgtgtcctttgtgctggcctggctggagacctggttcctggacttcaaggtgctgccccaggaggccgaggaggagcgctggtacctggccgcccaggtggccgtggcccggggccccctgtag

SEQ ID NO: 171705 - DNA, 1338 bp, synthetic construct
  misc_feature 1..1338: note = Description of Artificial Sequence: Synthetic coding sequence
  source 1..1338: mol_type = other DNA
atgagcaagctgccccgggagctgacccgggacctggagaggagcctgcctgctgtggccagcctgggcagcagcctgagccacagccagagcctgagcagccacctgctgcccccacctgagaagagaagagccatcagtgatgtgcggaggaccttctgcctgtttgtgacctttgacctgctcttcatcagcctgctgtggatcatcgagctgaacaccaacacaggcatcaggaagaacctggagcaggagatcatccagtacaacttcaagaccagcttctttgacatctttgtgctggccttcttccgcttcagcggcctgctgctgggctatgctgtgctgcggctgcggcactggagccgccgctggtgccctgtgcacagcagcctgagccgcagcagcagcctgagctgcagcgccaagggccacctggccacctgcagccccagcagcctgctgagcagccctggctggaggcctggcagcctgaccagcaagagctaccccaggaagctgaagagaagtgacagcgcccctcctggctacctggccgcccaggtggccgtggcccggggccccctgctcttcagcggggccctgtctgagggccagttctacagccccccagagagctttgctggcagtgacaatgaaagtgatgaggaggtggccggcaagaagagcttcagcgcccaggagcgggagtacatccggcagggcaaggaggccacagctgtggtggaccagatcctggcccaggaggagaactggaagtttgagaagaacaatgaatatggagacacagtgtacaccatcgaggtgcccttccacggcaagaccttcatcctgaagaccttcctgccctgcccagctgagctggtgtaccaggaggtgatcctgcagcctgagaggatggtgctgtggaacaagacagtgacagcctgccagatcctgcagagggtggaggacaacaccctcatctcctatgatgtgtctgctggagctgctgggggcgtggtgagcccccgggactttgtgaatgtgagaagaattgaaagaagaagagaccgctacctgagcagcggcatcgccaccagccacagcgccaagccacccacccacaagtatgtgcggggggagaatggacctgggggcttcatcgtgctgaagagcgccagcaacccccgggtgtgcacctttgtgtggatcctgaacacagacctgaagggccgcctgccccgctacctgatccaccagagcctggccgccaccatgtttgaatttgccttccacctgcggcagaggatcagcgagctgggcgcccgggcctag

SEQ ID NO: 171706 - DNA, 618 bp, synthetic construct
  misc_feature 1..618: note = Description of Artificial Sequence: Synthetic coding sequence
  source 1..618: mol_type = other DNA
atggagggcctgagtgatgtggccagctttgccaccaagctgaagaacaccctcatccagtaccacagcattgaggaggacaagtggagggtggccaagaagaccaaggatgtgacagtgtggaggaagcccagcgaggagttcaacggctacctgtacaaggcccagggcgtgattgatgacctggtgtacagcatcatcgaccacatccggcccggcccctgccgcctggactgggacagcctgatgaccagcctggacatcctggagaactttgaggagaactgctgcgtgatgagatacaccacagctggccagctgtggaacatcatcagcccccgggagtttgtggacttctcctacacagtgggctacaaggagggcctgctgagctgtggcatcagcctggactgggatgagaagaggcctgagtttgtgcggggctacaaccacccctgtggctggttctgtgtgcccctgaaggacaaccccaaccagagcctgctgaccggctacatccagacagacctgcggggcatgatcccccagagcgctgtggacacagccatggccagcaccctgaccaacttctacggggacctgaggaaggccctgtag

SEQ ID NO: 171707 - DNA, 576 bp, synthetic construct
  misc_feature 1..576: note = Description of Artificial Sequence: Synthetic coding sequence
  source 1..576: mol_type = other DNA
atggagggcctgagtgatgtggccagctttgccaccaagctgaagaacaccctcatccagtaccacagcattgaggaggacaagtggagggtggccaagaagaccaaggatgtgacagtgtggaggaagcccagcgaggagttcaacggctacctgtacaaggcccagggcgtgattgatgacctggtgtacagcatcatcgaccacatccggcccggcccctgccgcctggactgggacagcctgatgaccagcctggacatcctggagaactttgaggagaactgctgcgtgatgagatacaccacagctggccagctgtggaacatcatcagcccccgggagtttgtggacttctcctacacagtgggctacaaggagggcctgctgagctgtggcatcagcctggactgggatgagaagaggcctgagtttgtgcggggctacaaccacccctgtggctggttctgtgtgcccctgaaggacaaccccaaccagagcctgctgaccggctacatccagacagacctgcggggcatgatcccccagagcgctgtggacacagccatggcctag

SEQ ID NO: 171708 - DNA, 642 bp, synthetic construct
  misc_feature 1..642: note = Description of Artificial Sequence: Synthetic coding sequence
  source 1..642: mol_type = other DNA
atggaccctgccctggccgcccagatgtctgaggccgtggccgagaagatgctgcagtacagaagagacacagctggctggaagatctgccgggagggcaatggagtgtctgtgtcctggaggccttctgtggagttccctggcaacctgtacagaggagagggcatcgtgtatggcaccctggaggaggtgtgggactgtgtgaagccagctgtgggcggcctgcgggtgaagtgggatgaaaatgtgacaggctttgagatcatccagagcatcacagacaccctgtgtgtgtccaggaccagcaccccatctgctgccatgaagctgatcagcccccgggactttgtggacctggtgctggtgaagagatatgaagatggcaccatcagcagcaatgccacccacgtggagcaccccctgtgcccccccaagccaggctttgtgcggggcttcaaccacccctgtggctgcttctgtgagcccctgcccggggagcccaccaagaccaacctggtgaccttcttccacacagacctgagcggctacctgccccagaatgtggtggacagcttcttccccaggtccatgacccgcttctacgccaacctgcagaaggctgtgaagcagttccacgagtag

SEQ ID NO: 171709 - DNA, 663 bp, synthetic construct
  misc_feature 1..663: note = Description of Artificial Sequence: Synthetic coding sequence
  source 1..663: mol_type = other DNA
atggacttcaaggccatcgcccagcagacagcccaggaggtgctgggctacaacagagacaccagcggctggaaggtggtgaagaccagcaagaagatcaccgtgagcagcaaggccagcaggaagttccacggcaacctgtacagagtggagggcatcatccctgagagccctgccaagctgagtgacttcctgtaccagacaggagaccgcatcacctgggacaagagcctgcaggtgtacaacatggtgcacagaattgacagcgacaccttcatctgccacaccatcacccagagctttgctgtgggcagcatcagcccccgggacttcatcgacctggtgtacatcaagagatatgagggcaacatgaacatcatcagcagcaagtctgtggacttccctgagtacccacccagcagcaactacatccggggctacaaccacccctgtggctttgtgtgcagccccatggaggagaacccagcctacagcaagctggtgatgtttgtgcagacagagatgaggggcaagctgagccccagcatcatcgagaagaccatgcccagcaacctggtgaacttcatcctgaatgccaaggatggcatcaaggcccacaggacccccagcagaagaggcttccaccacaacagccacagctag

SEQ ID NO: 171710 - DNA, 3072 bp, synthetic construct
  misc_feature 1..3072: note = Description of Artificial Sequence: Synthetic coding sequence
  source 1..3072: mol_type = other DNA
atgaccctgaacaactgtgcctccatgaagctggaggtgcacttccagagcaagcagaatgaagattctgaggaggaggagcagtgcaccatcagcagccactgggccttccagcaggagagcaagtgctggagccccatgggcagcagtgacctgctggccccacccagccctggcctgcctgccaccagcagctgtgagagcgtgctgacagagctgagcgccaccagcctgcctgtgatcaccgtgtccctgcccccagagcctgctgacctgcccctgcccggccgggcccccagcagcagtgaccggcccctgctgagccccacccagggccaggagggcccccaggacaaggccaagaagaggcacaggaacagaagcttcctgaagcacctggagagcctgcggaggaaggagaagagcggcagccagcaggccgagcccaagcacagccctgccaccagcgagaaggtgtccaaggccagcagcttccgcagctgccggggcttcctgtctgctggcttctaccgggccaagaactgggccgccaccagcgctgggggcagcggggccaacaccaggaaggcctgggaggcctggcctgtggccagcttccgccacccccagtggacccacagaggagactgcctggtgcacgtgcctggggaccacaagccaggcaccttccccaggagcctgagcattgagagcctgtgcccagaagatggccaccggctggccgactggcagcccggccgccgctggggctgtgagggcagaagaggcagctgtggcagcacaggcagccacgccagcacctatgacaacctgcctgagctgtacccagctgagcctgtgatggtgggcgctgaggccgaggatgaagatgatgaggagagcggcggcagctatgcccacctggatgacatcctgcagcacgtgtggggcctgcagcagagggtggagctgtggagccgggccatgtacccagacctgggccctggagatgaggaggaggaggaggccaccagctctgtggagatcgccaccgtggaggtgaagtgccaggccgaggccctgagccagatggaggtgcctgcccatggagagagccctgcctgggcccaggccgaggtgcagcctgctgtgctggccccagcccaggccccagctgaggccgagcctgtggcccaggaggaggccgaggccccagccccagccccagccccagccccagcccaggacagcgagcaggaggcccacagcggcggggagcccacctttgccagcagcctgtctgtggaggagggccacagcatcagtgacacagtggccagcagcagcgagctggacagcagcggcaacagcatgaatgaagctgaggccgccggccccctggccggcctgcaggcctccatgccccgggagcggcgggacagcggcgtgggcgccagcctgacccggccctgcaggaagctgcgctggcacagcttccagaacagccaccggcccagcctgaacagcgagagcctggagatcaaccggcagtttgctggccagatcaacctgctgcacaagggcagcctgctgcggctgacagccttcatggagaagtacacagtgccccacaagcagggctgggtgtggagcatgcccaagttcatgagaagaaacaagaccccagactaccggggccagcacgtgtttggagtgcccccactcatccacgtgcagaggacaggccagcccctgccccagagcatccagcaggccatgagatacctgcggagccagtgcctggaccaggtgggcatcttcaggaagagcggcgtgaagagccgcatccagaacctgcggcagatgaatgagaccagcccagacaacgtgtgctatgagggccagagcgcctatgatgtggccgacctgctgaagcagtacttccgggacctgcctgagcccatcttcaccagcaagctgaccaccaccttcctgcagatctaccagctgctgcccaaggaccagtggctggccgccgcccaggccgccaccctgctgctgcctgatgagaaccgggaggtgctgcagaccctgctgtacttcctgagtgacatcgccagcgctgaggagaaccagatgacagctggcaacctggccgtgtgcctggcccccagcatcttccacctgaatgtgtccaagaaggacagccccagcccccgcatcaagagcaagaggagcctcatcggccggcccggcccccgggacctgagtgacaacatggccgccacccagggcctgagccacatgatcagtgactgcaagaagctgttccaggtgccccaggacatggtgctgcagctgtgcagcagctacagcgctgctgagctgagccccccaggccctgccctggccgagctgcggcaggcccaggccgccggcgtgtccctgagcctgtacatggaggagaacatccaggacctgctgagagatgctgctgagcgcttcaagggctggatgtctgtgcccggcccccagcacacagagctggcctgcaggaaggccccagatggccaccccctgcggctgtggaaggccagcacagaggtggccgcccccccagctgtggtgctgcaccgggtgctgcgggagcgggccctgtgggatgaggacctgctgcgggcccaggtgctggaggccctgatgcctggggtggagctgtaccactacgtgacagacagcatggccccccacccctgccgggactttgtggtgctgaggatgtggaggagtgacctgccccggggcggctgcctgctggtgtcccagagcctggaccctgagcagcctgtgcctgagagcggcgtgcgggccctgatgctgaccagccagtacctgatggagccctgtggcctgggccgcagccggctgacccacatctgcagagctgacctgcggggccgcagcccagactggtacaacaaggtgtttggccacctgtgtgccatggaggtggccaagatccgggacagcttccccaccctgcaggccgccggccctgagaccaagctgtag

SEQ ID NO: 171711 - DNA, 3072 bp, synthetic construct; identical to SEQ ID NO: 171710
  misc_feature 1..3072: note = Description of Artificial Sequence: Synthetic coding sequence
  source 1..3072: mol_type = other DNA

SEQ ID NO: 171712 - DNA, 3312 bp, synthetic construct
  misc_feature 1..3312: note = Description of Artificial Sequence: Synthetic coding sequence
  source 1..3312: mol_type = other DNA
atgcccctgctggatgtgttctggagctgcttcaggaaggtgaagtgcttccccctgctgcaggtgaagaagaatgctgaggccgaggccaagagggcctgtgagtggctgcaggccaccggcttcccccagtatgtgcagctgtttgaggagggcagcttccccctggacatcggctctgtgaagaagaaccacggcttcctggatgaggacagcctgggcgccctgtgccggcggctgatgaccctgaacaactgtgcctccatgaagctggaggtgcacttccagagcaagcagaatgaagattctgaggaggaggagcagtgcaccatcagcagccactgggccttccagcaggagagcaagtgctggagccccatgggcagcagtgacctgctggccccacccagccctggcctgcctgccaccagcagctgtgagagcgtgctgacagagctgagcgccaccagcctgcctgtgatcaccgtgtccctgcccccagagcctgctgacctgcccctgcccggccgggcccccagcagcagtgaccggcccctgctgagccccacccagggccaggagggcccccaggacaaggccaagaagaggcacaggaacagaagcttcctgaagcacctggagagcctgcggaggaaggagaagagcggcagccagcaggccgagcccaagcacagccctgccaccagcgagaaggtgtccaaggccagcagcttccgcagctgccggggcttcctgtctgctggcttctaccgggccaagaactgggccgccaccagcgctgggggcagcggggccaacaccaggaaggcctgggaggcctggcctgtggccagcttccgccacccccagtggacccacagaggagactgcctggtgcacgtgcctggggaccacaagccaggcaccttccccaggagcctgagcattgagagcctgtgcccagaagatggccaccggctggccgactggcagcccggccgccgctggggctgtgagggcagaagaggcagctgtggcagcacaggcagccacgccagcacctatgacaacctgcctgagctgtacccagctgagcctgtgatggtgggcgctgaggccgaggatgaagatgatgaggagagcggcggcagctatgcccacctggatgacatcctgcagcacgtgtggggcctgcagcagagggtggagctgtggagccgggccatgtacccagacctgggccctggagatgaggaggaggaggaggccaccagctctgtggagatcgccaccgtggaggtgaagtgccaggccgaggccctgagccagatggaggtgcctgcccatggagagagccctgcctgggcccaggccgaggtgcagcctgctgtgctggccccagcccaggccccagctgaggccgagcctgtggcccaggaggaggccgaggccccagccccagccccagccccagccccagcccaggacagcgagcaggaggcccacagcggcggggagcccacctttgccagcagcctgtctgtggaggagggccacagcatcagtgacacagtggccagcagcagcgagctggacagcagcggcaacagcatgaatgaagctgaggccgccggccccctggccggcctgcaggcctccatgccccgggagcggcgggacagcggcgtgggcgccagcctgacccggccctgcaggaagctgcgctggcacagcttccagaacagccaccggcccagcctgaacagcgagagcctggagatcaaccggcagtttgctggccagatcaacctgctgcacaagggcagcctgctgcggctgacagccttcatggagaagtacacagtgccccacaagcagggctgggtgtggagcatgcccaagttcatgagaagaaacaagaccccagactaccggggccagcacgtgtttggagtgcccccactcatccacgtgcagaggacaggccagcccctgccccagagcatccagcaggccatgagatacctgcggagccagtgcctggaccaggtgggcatcttcaggaagagcggcgtgaagagccgcatccagaacctgcggcagatgaatgagaccagcccagacaacgtgtgctatgagggccagagcgcctatgatgtggccgacctgctgaagcagtacttccgggacctgcctgagcccatcttcaccagcaagctgaccaccaccttcctgcagatctaccagctgctgcccaaggaccagtggctggccgccgcccaggccgccaccctgctgctgcctgatgagaaccgggaggtgctgcagaccctgctgtacttcctgagtgacatcgccagcgctgaggagaaccagatgacagctggcaacctggccgtgtgcctggcccccagcatcttccacctgaatgtgtccaagaaggacagccccagcccccgcatcaagagcaagaggagcctcatcggccggcccggcccccgggacctgagtgacaacatggccgccacccagggcctgagccacatgatcagtgactgcaagaagctgttccaggtgccccaggacatggtgctgcagctgtgcagcagctacagcgctgctgagctgagccccccaggccctgccctggccgagctgcggcaggcccaggccgccggcgtgtccctgagcctgtacatggaggagaacatccaggacctgctgagagatgctgctgagcgcttcaagggctggatgtctgtgcccggcccccagcacacagagctggcctgcaggaaggccccagatggccaccccctgcggctgtggaaggccagcacagaggtggccgcccccccagctgtggtgctgcaccgggtgctgcgggagcgggccctgtgggatgaggacctgctgcgggcccaggtgctggaggccctgatgcctggggtggagctgtaccactacgtgacagacagcatggccccccacccctgccgggactttgtggtgctgaggatgtggaggagtgacctgccccggggcggctgcctgctggtgtcccagagcctggaccctgagcagcctgtgcctgagagcggcgtgcgggccctgatgctgaccagccagtacctgatggagccctgtggcctgggccgcagccggctgacccacatctgcagagctgacctgcggggccgcagcccagactggtacaacaaggtgtttggccacctgtgtgccatggaggtggccaagatccgggacagcttccccaccctgcaggccgccggccctgagaccaagctgtag

SEQ ID NO: 171713 - DNA, 159 bp, synthetic construct
  misc_feature 1..159: note = Description of Artificial Sequence: Synthetic coding sequence
  source 1..159: mol_type = other DNA
atgcccctgctggatgtgttctggagctgcttcaggaaggtgaagtgcttccccctgctgcaggtgaagaagaatgctgaggccgaggccaagagggcctgtgagtggctgcaggccaccggcttcccccagtatgtgcagctgtttgaaggaggatag

SEQ ID NO: 171714 - DNA, 189 bp, synthetic construct
  misc_feature 1..189: note = Description of Artificial Sequence: Synthetic coding sequence
  source 1..189: mol_type = other DNA
atgaagttcctggtgtttgccttcatcctggccctgatggtgtccatgattggagctgacagcagcgaggagaagttcctgcggcgcatcggccgcttcggctacggctacggcccctaccagcctgtgcctgagcagcccctgtacccccagccctaccagccccagtaccagcagtacaccttctag

SEQ ID NO: 171715 - DNA, 159 bp, synthetic construct
  misc_feature 1..159: note = Description of Artificial Sequence: Synthetic coding sequence
  source 1..159: mol_type = other DNA
atgaagttcctggtgtttgccttcatcctggccctgatggtgtccatgattggagctgacagcagcgaggagtatggctacggcccctaccagcctgtgcctgagcagcccctgtacccccagccctaccagccccagtaccagcagtacaccttctag

SEQ ID NO: 171716 - DNA, 843 bp, synthetic construct
  misc_feature 1..843: note = Description of Artificial Sequence: Synthetic coding sequence
  source 1..843: mol_type = other DNA
atgcgctggttcctgccctggaccctggccgctgtgacagctgctgctgccagcacagtgctggccacagccctgagccctgcccccaccaccatggacttcaccccagcccccctggaggacaccagcagccggccccagttctgcaagtggccctgtgagtgcccccccagccccccacgctgccccctgggcgtgtccctcatcacagatggctgtgagtgctgcaagatgtgtgcccagcagctgggggacaactgcacagaggccgccatctgtgacccccaccggggcctgtactgtgactacagcggggaccggcccaggtatgccatcggcgtgtgtgcccatgctgtgggggaggtggaggcctggcacaggaactgcatcgcctacaccagcccctggagcccctgcagcaccagctgtggcctgggcgtgtccacccgcatcagcaatgtgaatgcccagtgctggccagagcaggagagccggctgtgcaacctgcggccctgtgatgtggacatccacaccctcatcaaggccggcaagaagtgcctggccgtgtaccagcctgaggcctccatgaacttcaccctggccggctgcatcagcaccaggagctaccagcccaagtactgcggcgtgtgcatggacaaccgctgctgcatcccctacaagagcaagaccattgatgtgtccttccagtgcccagatggcctgggcttcagccggcaggtgctgtggatcaatgcctgcttctgcaacctgagctgcaggaaccccaatgacatctttgctgacctggagagctacccagacttcagcgagatcgccaactag

SEQ ID NO: 171717 - DNA, 507 bp, synthetic construct
  misc_feature 1..507: note = Description of Artificial Sequence: Synthetic coding sequence
  source 1..507: mol_type = other DNA
atggccaagacagccatggcctacaaggagaagatgaaggagctgtccatgctgagcctcatctgcagctgcttctacccagagcccaggaacatcaacatctacacctatgatgacatggaggtgaagcagatcaacaagagggccagcggccaggcctttgagctgatcctgaagccacccagccccaagaagaaggacctgagcctggaggagatccagaagaagctggaggccgctgaggagaggaggaagagccaggaggcccaggtgctgaagcagctggccgagaagcgggagcacgagcgggaggtgctgcagaaggccctggaggagaacaacaacttcagcaagatggccgaggagaagctgatcctgaagatggagcagatcaaggaaaatcgggaggccaacctggccgccatcatcgagcggctgcaggagaaggagagacatgctgctgaggtgagaagaaacaaggagctgcaggtggagctgtctggatag

SEQ ID NO: 171718 - DNA, 564 bp, synthetic construct
  misc_feature 1..564: note = Description of Artificial Sequence: Synthetic coding sequence
  source 1..564: mol_type = other DNA
atggccaagacagccatggcctacaaggagaagatgaaggagctgtccatgctgagcctcatctgcagctgcttctacccagagcccaggaacatcaacatctacacctatgatgacatggaggtgaagcagatcaacaagagggccagcggccaggcctttgagctgatcctgaagccacccagccccatcagcgaggcccccaggaccctggccagccccaagaagaaggacctgagcctggaggagatccagaagaagctggaggccgctgaggagaggaggaagagccaggaggcccaggtgctgaagcagctggccgagaagcgggagcacgagcgggaggtgctgcagaaggccctggaggagaacaacaacttcagcaagatggccgaggagaagctgatcctgaagatggagcagatcaaggagaaccgggaggccaacctggccgccatcatcgagcggctgcaggagaagctggtgaagttcatcagcagcgagctgaaggagagcattgagagccagttcctggagctgcagcgggagggggagaagcagtag

SEQ ID NO: 171719 - DNA, 543 bp, synthetic construct
  misc_feature 1..543: note = Description of Artificial Sequence: Synthetic coding sequence
  source 1..543: mol_type = other DNA
atggccagcaccatcagcgcctacaaggagaagatgaaggagctgtctgtgctgagcctcatctgcagctgcttctacacccagccccaccccaacacagtgtaccagtatggagacatggaggtgaagcagctggacaagagggccagcggccagagctttgaggtgatcctgaagagccccagcgacctgagccctgagagccccatgctgagcagcccccccaagaagaaggacaccagcctggaggagctgcagaagaggctggaggccgctgaggagaggaggaagacccaggaggcccaggtgctgaagcagctggccgagcggcgggagcacgagcgggaggtgctgcacaaggccctggaggagaacaacaacttcagccggcaggccgaggagaagctgaactacaagatggagctgagcaaggagatccgggaggcccacctggccgccctgcgggagcggctgcgggagaaggagctgcatgctgctgaggtgagaagaaacaaggagcagcgggaggagatgtctggatag

SEQ ID NO: 171720 - DNA, 510 bp, synthetic construct
  misc_feature 1..510: note = Description of Artificial Sequence: Synthetic coding sequence
  source 1..510: mol_type = other DNA
atgaaggagctgtctgtgctgagcctcatctgcagctgcttctacacccagccccaccccaacacagtgtaccagtacggggacatggaggtgaagcagctggacaagagggccagcggccagagctttgaagtcatcctgaagagccccagcgacctgagccctgagagccccatgctgagcagcccccccaagaagaaggacaccagcctggaggagctgcagaagaggctggaggccgctgaggagaggaggaagacccaggaggcccaggtgctgaagcagctggccgagcggcgggagcacgagcgggaggtgctgcacaaggccctggaggagaacaacaacttcagccggcaggccgaggagaagctgaactacaagatggagctgagcaaggagatccgggaggcccacctggccgccctgcgggagcggctgcgggagaaggagctgcacgccgctgaggtgagaagaaacaaggagcagcgggaggagatgagcggctag

SEQ ID NO: 171721 - DNA, 1422 bp, synthetic construct
  misc_feature 1..1422: note = Description of Artificial Sequence: Synthetic coding sequence
  source 1..1422: mol_type = other DNA
atgttttctgtgcagctgagcctgggggagcagacctgggagagcgagggcagcagcatcaagaaggcccagcaggccgtggccaacaaggccctgacagagagcaccctgcccaagcctgtgcagaagccacccaagagcaatgtgaacaacaaccctggcagcatcacccccaccgtggagctgaatggcctggccatgaagagaggagagcccgccatctaccggcccctggaccccaagcccttccccaactaccgggccaactacaacttccggggcatgtacaaccagcgctaccactgccctgtgcccaagatcttctacgtgcagctgactgtgggcaacaatgagttcttcggggagggcaagacccggcaggccgcccggcacaatgctgccatgaaggccctgcaggccctgcagaatgagcccatccctgagaggagcccccagaatggagagagcggcaaggatgtggatgatgacaaggatgccaacaagtctgagatcagcctggtgtttgaaattgccctgaagaggaacatgcctgtgtcctttgaagtcatcaaggagagcggccccccccacatgaagagctttgtgaccagggtgtctgtgggggagttctctgctgagggggagggcaacagcaagaagctgagcaagaagagagctgccaccaccgtgctgcaggagctgaagaagctgccccccctgcctgtggtggagaagcccaagctgttcttcaagaagaggcccaagaccatcgtgaaggccggcccagaatatggccagggcatgaaccccatcagccggctggcccagatccagcaggccaagaaggagaaggagccagactatgtgctgctgtctgagcggggcatgcccaggagaagagaatttgtgatgcaggtgaaggtgggcaatgaggtggccaccggcaccggccccaacaagaagatcgccaagaagaatgctgctgaggccatgctgctgcagctgggctacaaggccagcaccaacctgcaggaccagctggagaagacaggagagaacaagggctggagcggccccaagccaggcttccctgagcccaccaacaacacccccaagggcatcctgcacctgagcccagatgtgtaccaggagatggaggccagccgccacaaggtgatcagcggcaccaccctgggctacctgagccccaaggacatgaaccagcccagcagcagcttcttcagcatcagccccaccagcaacagcagcgccaccatcgcccgggagctgctgatgaatggcaccagcagcacagctgaggccatcggcctgaagggcagcagccccaccccaccctgcagccctgtgcagcccagcaagcagctggagtacctggcccgcatccagggcttccaggtgtag

SEQ ID NO: 171722 - DNA, 1515 bp, synthetic construct
  misc_feature 1..1515: note = Description of Artificial Sequence: Synthetic coding sequence
  source 1..1515: mol_type = other DNA
atgaagagaggagagcccgccatctaccggcccctggaccccaagcccttccccaactaccgggccaactacaacttccggggcatgtacaaccagcgctaccactgccctgtgcccaagatcttctacgtgcagctgactgtgggcaacaatgagttcttcggggagggcaagacccggcaggccgcccggcacaatgctgccatgaaggccctgcaggccctgcagaatgagcccatccctgagaggagcccccagaatggagagagcggcaaggatgtggatgatgacaaggatgccaacaagtctgagatcagcctggtgtttgaaattgccctgaagaggaacatgcctgtgtcctttgaagtcatcaaggagagcggccccccccacatgaagagctttgtgaccagggtgtctgtgggggagttctctgctgagggggagggcaacagcaagaagctgagcaagaagagagctgccaccaccgtgctgcaggagctgaagaagctgccccccctgcctgtggtggagaagcccaagctgttcttcaagaagaggcccaagaccatcgtgaaggccggcccagaatatggccagggcatgaaccccatcagccggctggcccagatccagcaggccaagaaggagaaggagccagactatgtgctgctgtctgagcggggcatgcccaggagaagagaatttgtgatgcaggtgaaggtgggcaatgaggtggccaccggcaccggccccaacaagaagatcgccaagaagaatgctgctgaggccatgctgctgcagctgggctacaaggccagcaccaacctgcaggaccagctggagaagacaggagagaacaagggctggagcggccccaagccaggcttccctgagcccaccaacaacacccccaagggcatcctgcacctgagcccagatgtgtaccaggagatggaggccagccgccacaaggtgatcagcggcaccaccctgggctacctgagccccaaggacatgaaccagcccagcagcagcttcttcagcatcagccccaccagcaacagcagcgccaccatcgcccgggagctgctgatgaatggcaccagcagcacagctgaggccatcggcctgaagggcagcagccccaccccaccctgcagccctgtgcagcccagcaagcagctggagtacctggcccgcatccagggcttccaggtgcactactgtgaccggcagagcggcaaggaatgtgtgacctgcctgaccctggcccctgtgcagatgaccttccacgccatcggcagcagcattgaggccagccatgaccaggccgccctgagcgccctgaagcagttcagcgagcagggcctggaccccattgatggagccatgaacatcgagaagggcagcctggagaagcaggccaagcacctgcgggagaaggctgacaacaaccaggcccctcctggcagcatcgcccaggactgcaagaagagcaacagcgctgtgtag

SEQ ID NO: 171723 - DNA, 1197 bp, synthetic construct
  misc_feature 1..1197: note = Description of Artificial Sequence: Synthetic coding sequence
  source 1..1197: mol_type = other DNA
atgaaggccctgcaggccctgcagaatgagcccatccctgagaggagcccccagaatggagagagcggcaaggatgtggatgatgacaaggatgccaacaagtctgagatcagcctggtgtttgaaattgccctgaagaggaacatgcctgtgtcctttgaagtcatcaaggagagcggccccccccacatgaagagctttgtgaccagggtgtctgtgggggagttctctgctgagggggagggcaacagcaagaagctgagcaagaagagagctgccaccaccgtgctgcaggagctgaagaagctgccccccctgcctgtggtggagaagcccaagctgttcttcaagaagaggcccaagaccatcgtgaaggccggcccagaatatggccagggcatgaaccccatcagccggctggcccagatccagcaggccaagaaggagaaggagccagactatgtgctgctgtctgagcggggcatgcccaggagaagagaatttgtgatgcaggtgaaggtgggcaatgaggtggccaccggcaccggccccaacaagaagatcgccaagaagaatgctgctgaggccatgctgctgcagctgggctacaaggccagcaccaacctgcaggaccagctggagaagacaggagagaacaagggctggagcggccccaagccaggcttccctgagcccaccaacaacacccccaagggcatcctgcacctgagcccagatgtgtaccaggagatggaggccagccgccacaaggtgatcagcggcaccaccctgggctacctgagccccaaggacatgaaccagcccagcagcagcttcttcagcatcagccccaccagcaacagcagcgccaccatcgcccgggagctgctgatgaatggcaccagcagcacagctgaggccatcggcctgaagggcagcagccccaccccaccctgcagccctgtgcagcccagcaagcagctggagtacctggcccgcatccagggcttccaggccgccctgagcgccctgaagcagttcagcgagcagggcctggaccccattgatggagccatgaacatcgagaagggcagcctggagaagcaggccaagcacctgcgggagaaggctgacaacaaccaggcccctcctggcagcatcgcccaggactgcaagaagagcaacagcgctgtgtag

SEQ ID NO: 171724 - DNA, 1440 bp, synthetic construct
  misc_feature 1..1440: note = Description of Artificial Sequence: Synthetic coding sequence
  source 1..1440: mol_type = other DNA
atgctgcagatcaaccagatgttttctgtgcagctgagcctgggggagcagacctgggagagcgagggcagcagcatcaagaaggcccagcaggccgtggccaacaaggccctgacagagagcaccctgcccaagcctgtgcagaagccacccaagagcaatgtgaacaacaaccctggcagcatcacccccaccgtggagctgaatggcctggccatgaagagaggagagcccgccatctaccggcccctggaccccaagcccttccccaactaccgggccaactacaacttccggggcatgtacaaccagcgctaccactgccctgtgcccaagatcttctacgtgcagctgactgtgggcaacaatgagttcttcggggagggcaagacccggcaggccgcccggcacaatgctgccatgaaggccctgcaggccctgcagaatgagcccatccctgagaggagcccccagaatggagagagcggcaaggatgtggatgatgacaaggatgccaacaagtctgagatcagcctggtgtttgaaattgccctgaagaggaacatgcctgtgtcctttgaagtcatcaaggagagcggccccccccacatgaagagctttgtgaccagggtgtctgtgggggagttctctgctgagggggagggcaacagcaagaagctgagcaagaagagagctgccaccaccgtgctgcaggagctgaagaagctgccccccctgcctgtggtggagaagcccaagctgttcttcaagaagaggcccaagaccatcgtgaaggccggcccagaatatggccagggcatgaaccccatcagccggctggcccagatccagcaggccaagaaggagaaggagccagactatgtgctgctgtctgagcggggcatgcccaggagaagagaatttgtgatgcaggtgaaggtgggcaatgaggtggccaccggcaccggccccaacaagaagatcgccaagaagaatgctgctgaggccatgctgctgcagctgggctacaaggccagcaccaacctgcaggaccagctggagaagacaggagagaacaagggctggagcggccccaagccaggcttccctgagcccaccaacaacacccccaagggcatcctgcacctgagcccagatgtgtaccaggagatggaggccagccgccacaaggtgatcagcggcaccaccctgggctacctgagccccaaggacatgaaccagcccagcagcagcttcttcagcatcagccccaccagcaacagcagcgccaccatcgcccgggagctgctgatgaatggcaccagcagcacagctgaggccatcggcctgaagggcagcagccccaccccaccctgcagccctgtgcagcccagcaagcagctggagtacctggcccgcatccagggcttccaggtgtag

SEQ ID NO: 171725 - DNA, 615 bp, synthetic construct
  misc_feature 1..615: note = Description of Artificial Sequence: Synthetic coding sequence
  source 1..615: mol_type = other DNA
atgctgcagatcaaccagatgttttctgtgcagctgagcctgggggagcagacctgggagagcgagggcagcagcatcaagaaggcccagcaggccgtggccaacaaggccctgacagagagcaccctgcccaagcctgtgcagaagccacccaagagcaatgtgaacaacaaccctggcagcatcacccccaccgtggagctgaatggcctggccatgaagagaggagagcccgccatctaccggcccctggaccccaagcccttccccaactaccgggccaactacaacttccggggcatgtacaaccagcgctaccactgccctgtgcccaagatcttctacgtgcagctgactgtgggcaacaatgagttcttcggggagggcaagacccggcaggccgcccggcacaatgctgccatgaaggccctgcaggccctgcagaatgagcccatccctgagaggagcccccagaatggagagagcggcaaggatgtggatgatgacaaggatgccaacaagtctgagatcagcctggtgtttgaaattgccctgaagaggaacatgcctgtgtcctttgaagtcatcaaggagagcggccccccccacatgtag

SEQ ID NO: 171726 - DNA, 195 bp, synthetic construct
  misc_feature 1..195: note = Description of Artificial Sequence: Synthetic coding sequence
  source 1..195: mol_type = other DNA
atgctgcagatcaaccagatgttttctgtgcagctgagcctgggggagcagacctgggagagcgagggcagcagcatcaagaaggcccagcaggccgtggccaacaaggccctgacagagagcaccctgcccaagcctgtgcagaagccacccaagagcaatgtgaacaacaaccctggcagcatcaccccctag

SEQ ID NO: 171727 - DNA, 1440 bp, synthetic construct; identical to SEQ ID NO: 171724
  misc_feature 1..1440: note = Description of Artificial Sequence: Synthetic coding sequence
  source 1..1440: mol_type = other DNA

SEQ ID NO: 171728 - DNA, 1617 bp, synthetic construct
  misc_feature 1..1617: note = Description of Artificial Sequence: Synthetic coding sequence
  source 1..1617: mol_type = other DNA
atgctgcagatcaaccagatgttttctgtgcagctgagcctgggggagcagacctgggagagcgagggcagcagcatcaagaaggcccagcaggccgtggccaacaaggccctgacagagagcaccctgcccaagcctgtgcagaagccacccaagagcaatgtgaacaacaaccctggcagcatcacccccaccgtggagctgaatggcctggccatgaagagaggagagcccgccatctaccggcccctggaccccaagcccttccccaactaccgggccaactacaacttccggggcatgtacaaccagcgctaccactgccctgtgcccaagatcttctacgtgcagctgactgtgggcaacaatgagttcttcggggagggcaagacccggcaggccgcccggcacaatgctgccatgaaggccctgcaggccctgcagaatgagcccatccctgagaggagcccccagaatggagagagcggcaaggatgtggatgatgacaaggatgccaacaagtctgagatcagcctggtgtttgaaattgccctgaagaggaacatgcctgtgtcctttgaagtcatcaaggagagcggccccccccacatgaagagctttgtgaccagggtgtctgtgggggagttctctgctgagggggagggcaacagcaagaagctgagcaagaagagagctgccaccaccgtgctgcaggagctgaagaagctgccccccctgcctgtggtggagaagcccaagctgttcttcaagaagaggcccaagaccatcgtgaaggccggcccagaatatggccagggcatgaaccccatcagccggctggcccagatccagcaggccaagaaggagaaggagccagactatgtgctgctgtctgagcggggcatgcccaggagaagagaatttgtgatgcaggtgaaggtgggcaatgaggtggccaccggcaccggccccaacaagaagatcgccaagaagaatgctgctgaggccatgctgctgcagctgggctacaaggccagcaccaacctgcaggaccagctggagaagacaggagagaacaagggctggagcggccccaagccaggcttccctgagcccaccaacaacacccccaagggcatcctgcacctgagcccagatgtgtaccaggagatggaggccagccgccacaaggtgatcagcggcaccaccctgggctacctgagccccaaggacatgaaccagcccagcagcagcttcttcagcatcagccccaccagcaacagcagcgccaccatcgcccgggagctgctgatgaatggcaccagcagcacagctgaggccatcggcctgaagggcagcagccccaccccaccctgcagccctgtgcagcccagcaagcagctggagtacctggcccgcatccagggcttccaggccgccctgagcgccctgaagcagttcagcgagcagggcctggaccccattgatggagccatgaacatcgagaagggcagcctggagaagcaggccaagcacctgcgggagaaggctgacaacaaccaggcccctcctggcagcatcgcccaggactgcaagaagagcaacagcgctgtgtag

SEQ ID NO: 171729 - DNA, 318 bp, synthetic construct
  misc_feature 1..318: note = Description of Artificial Sequence: Synthetic coding sequence
  source 1..318: mol_type = other DNA
atgctgcagatcaaccagatgttttctgtgcagctgagcctgggggagcagacctgggagagcgagggcagcagcatcaagaaggcccagcaggccgtggccaacaaggccctgacagagagcaccctgcccaagcctgtgcagaagccacccaagagcaatgtgaacaacaaccctggcagcatcacccccaccgtggagctgaatggcctggccatgaagagaggagagcccgccatctaccggcccctggaccccaagcccttccccaactaccgggccaactacaacttccggggcatgtacaaccagaggtag

SEQ ID NO: 171730 - DNA, 1713 bp, synthetic construct
  misc_feature 1..1713: note = Description of Artificial Sequence: Synthetic coding sequence
  source 1..1713: mol_type = other DNA
atggccaaccccaaggagaagacagccatgtgcctggtgaatgagctggcccgcttcaacagagtgcagccccagtacaagctgctgaatgaaagaggccctgcccacagcaagatgttttctgtgcagctgagcctgggggagcagacctgggagagcgagggcagcagcatcaagaaggcccagcaggccgtggccaacaaggccctgacagagagcaccctgcccaagcctgtgcagaagccacccaagagcaatgtgaacaacaaccctggcagcatcacccccaccgtggagctgaatggcctggccatgaagagaggagagcccgccatctaccggcccctggaccccaagcccttccccaactaccgggccaactacaacttccggggcatgtacaaccagcgctaccactgccctgtgcccaagatcttctacgtgcagctgactgtgggcaacaatgagttcttcggggagggcaagacccggcaggccgcccggcacaatgctgccatgaaggccctgcaggccctgcagaatgagcccatccctgagaggagcccccagaatggagagagcggcaaggatgtggatgatgacaaggatgccaacaagtctgagatcagcctggtgtttgaaattgccctgaagaggaacatgcctgtgtcctttgaagtcatcaaggagagcggccccccccacatgaagagctttgtgaccagggtgtctgtgggggagttctctgctgagggggagggcaacagcaagaagctgagcaagaagagagctgccaccaccgtgctgcaggagctgaagaagctgccccccctgcctgtggtggagaagcccaagctgttcttcaagaagaggcccaagaccatcgtgaaggccggcccagaatatggccagggcatgaaccccatcagccggctggcccagatccagcaggccaagaaggagaaggagccagactatgtgctgctgtctgagcggggcatgcccaggagaagagaatttgtgatgcaggtgaaggtgggcaatgaggtggccaccggcaccggccccaacaagaagatcgccaagaagaatgctgctgaggccatgctgctgcagctgggctacaaggccagcaccaacctgcaggaccagctggagaagacaggagagaacaagggctggagcggccccaagccaggcttccctgagcccaccaacaacacccccaagggcatcctgcacctgagcccagatgtgtaccaggagatggaggccagccgccacaaggtgatcagcggcaccaccctgggctacctgagccccaaggacatgaaccagcccagcagcagcttcttcagcatcagccccaccagcaacagcagcgccaccatcgcccgggagctgctgatgaatggcaccagcagcacagctgaggccatcggcctgaagggcagcagccccaccccaccctgcagccctgtgcagcccagcaagcagctggagtacctggcccgcatccagggcttccaggccgccctgagcgccctgaagcagttcagcgagcagggcctggaccccattgatggagccatgaacatcgagaagggcagcctggagaagcaggccaagcacctgcgggagaaggctgacaacaaccaggcccctcctggcagcatcgcccaggactgcaagaagagcaacagcgctgtgtag

SEQ ID NO: 171731 - DNA, 1044 bp, synthetic construct
  misc_feature 1..1044: note = Description of Artificial Sequence: Synthetic coding sequence
  source 1..1044: mol_type = other DNA
agcctgctgaccaatgatgccagcagcgagagcatcgccagcttcagcaagcaggaggtgatgagcagcttcctgcctgagggcggctgctatgagctgctgactgtgattggaaaaggatttgaggacctgatgacagtgaacctggcccgctacaagcccactggagaatatgtgacagtgcggcgcatcaacctggaggcctgcagcaatgagatggtgaccttcctgcagggcgagctgcacgtgtccaagctgttcaaccaccccaacatcgtgccctaccgggccaccttcatcgctgacaatgagctgtgggtggtgaccagcttcatggcctacggcagcgccaaggacctgatctgcacccacttcatggatggcatgaatgagctggccatcgcctacatcctgcagggcgtgctgaaggccctggactacatccaccacatgggctacgtgcacaggtctgtgaaggccagccacatcctgatctctgtggatggcaaggtgtacctgagcggcctgcggagcaacctgtccatgatcagccacggccagaggcagagggtggtgcatgacttccccaagtacagcgtgaaggtgctgccctggctgagccctgaggtgctgcagcagaacctgcagggctatgatgccaagagtgacatctacagcgtgggcatcacagcctgtgagctggccaacggccacgtgcccttcaaggacatgcctgccacccagatgctgctggagaagctgaatggaacagtgccctgcctgctggacaccagcaccatcccagctgaggagctgaccatgagccccagccgctctgtggccaacagcggcctgagtgacagcctgaccaccagcaccccccggcccagcaatggagacagccccagccacccctaccacaggaccttcagcccccacttccaccactttgtggagcagtgcctgcagaggaacccagatgcccgctacccctgctggccaggccctggcctgcgggagagccggggctgcagcggcggctag

SEQ ID NO: 171732 - DNA, 1296 bp, synthetic construct
  misc_feature 1..1296: note = Description of Artificial Sequence: Synthetic coding sequence
  source 1..1296: mol_type = other DNA
atgtccttcctggtgtccaagccagagcgcatccgccgctgggtgtctgagaagttcatcgtggagggcctgcgggacctggagctgtttggagagcagcccccaggggacaccaggaggaagaccaatgatgccagcagcgagagcatcgccagcttcagcaagcaggaggtgatgagcagcttcctgcctgagggcggctgctatgagctgctgactgtgattggaaaaggatttgaggacctgatgacagtgaacctggcccgctacaagcccactggagaatatgtgacagtgcggcgcatcaacctggaggcctgcagcaatgagatggtgaccttcctgcagggcgagctgcacgtgtccaagctgttcaaccaccccaacatcgtgccctaccgggccaccttcatcgctgacaatgagctgtgggtggtgaccagcttcatggcctacggcagcgccaaggacctgatctgcacccacttcatggatggcatgaatgagctggccatcgcctacatcctgcagggcgtgctgaaggccctggactacatccaccacatgggctacgtgcacaggtctgtgaaggccagccacatcctgatctctgtggatggcaaggtgtacctgagcggcctgcggagcaacctgtccatgatcagccacggccagaggcagagggtggtgcatgacttccccaagtacagcgtgaaggtgctgccctggctgagccctgaggtgctgcagcagaacctgcagggctatgatgccaagagtgacatctacagcgtgggcatcacagcctgtgagctggccaacggccacgtgcccttcaaggacatgcctgccacccagatgctgctggagaagctgaatggaacagtgccctgcctgctggacaccagcaccatcccagctgaggagctgaccatgagccccagccgctctgtggccaacagcggcctgagtgacagcctgaccaccagcaccccccggcccagcaatggagacagccccagccacccctaccacaggaccttcagcccccacttccaccactttgtggagcagtgcctgcagaggaacccagatgcccggcccagcgccagcaccctgctgaaccacagcttcttcaagcagatcaagaggcgggccagcgaggccctgcctgagctgctgcggcctgtgacccccatcaccaactttgagggcagccagagccaggaccacagcggcatcttcggcctggtgaccaacctggaggagctggaggtggatgactgggagttctag

SEQ ID NO: 171733 - DNA, 1122 bp, synthetic construct
  misc_feature 1..1122: note = Description of Artificial Sequence: Synthetic coding sequence
  source 1..1122: mol_type = other DNA
atgagcagcttcctgcctgagggcggctgctatgagctgctgactgtgattggaaaaggatttgaggacctgatgacagtgaacctggcccgctacaagcccactggagaatatgtgacagtgcggcgcatcaacctggaggcctgcagcaatgagatggtgaccttcctgcagggcgagctgcacgtgtccaagctgttcaaccaccccaacatcgtgccctaccgggccaccttcatcgctgacaatgagctgtgggtggtgaccagcttcatggcctacggcagcgccaaggacctgatctgcacccacttcatggatggcatgaatgagctggccatcgcctacatcctgcagggcgtgctgaaggccctggactacatccaccacatgggctacgtgcacaggtctgtgaaggccagccacatcctgatctctgtggatggcaaggtgtacctgagcggcctgcggagcaacctgtccatgatcagccacggccagaggcagagggtggtgcatgacttccccaagtacagcgtgaaggtgctgccctggctgagccctgaggtgctgcagcagaacctgcagggctatgatgccaagagtgacatctacagcgtgggcatcacagcctgtgagctggccaacggccacgtgcccttcaaggacatgcctgccacccagatgctgctggagaagctgaatggaacagtgccctgcctgctggacaccagcaccatcccagctgaggagctgaccatgagccccagccgctctgtggccaacagcggcctgagtgacagcctgaccaccagcaccccccggcccagcaatggagacagccccagccacccctaccacaggaccttcagcccccacttccaccactttgtggagcagtgcctgcagaggaacccagatgcccggcccagcgccagcaccctgctgaaccacagcttcttcaagcagatcaagaggcgggccagcgaggccctgcctgagctgctgcggcctgtgacccccatcaccaactttgagggcagccagagccaggaccacagcggcatcttcggcctggtgaccaacctggaggagctggaggtggatgactgggagttctag

SEQ ID NO: 171734 - DNA, 1047 bp, synthetic construct
  misc_feature 1..1047: note = Description of Artificial Sequence: Synthetic coding sequence
  source 1..1047: mol_type = other DNA
atgtccttcctgaccaatgatgccagcagcgagagcatcgccagcttcagcaagcaggaggtgatgagcagcttcctgcctgagggcggctgctatgagctgctgaccgtcatcggcaagggctttgaggacctgatgacagtgaacctggcccgctacaagcccaccggggagtatgtgacagtgcggcgcatcaacctggaggcctgcagcaatgagatggtgaccttcctgcagggcgagctgcacgtgtccaagctgttcaaccaccccaacatcgtgccctaccgggccaccttcatcgctgacaatgagctgtgggtggtgaccagcttcatggcctacggcagcgccaaggacctgatctgcacccacttcatggatggcatgaatgagctggccatcgcctacatcctgcagggcgtgctgaaggccctggactacatccaccacatgggctacgtgcacaggtctgtgaaggccagccacatcctgatctctgtggatggcaaggtgtacctgagcggcctgcggagcaacctgtccatgatcagccacggccagaggcagagggtggtgcatgacttccccaagtacagcgtgaaggtgctgccctggctgagccctgaggtgctgcagcagaacctgcagggctatgatgccaagagtgacatctacagcgtgggcatcacagcctgtgagctggccaatggacatgtgcccttcaaggacatgcctgccacccagatgctgctggagaagctgaatggcaccgtgccctgcctgctggacaccagcaccatcccagctgaggagctgaccatgagccccagccgctctgtggccaacagcggcctgagtgacagcctgaccaccagcaccccccggcccagcaatggagacagccccagccacccctaccacaggaccttcagcccccacttccaccactttgtggagcagtgcctgcagagaaatccagatgcccgctacccctgctggccaggccctggcctgcgggagagccggggctgcagcggcggctag

SEQ ID NO: 171735 - DNA, 900 bp, synthetic construct
  misc_feature 1..900: note = Description of Artificial Sequence: Synthetic coding sequence
  source 1..900: mol_type = other DNA
atgtccttcctggtgtccaagccagagcgcatccgccgctgggtgtctgagaagttcatcgtggagggcctgcgggacctggagctgtttggaggaaaaggatttgaggacctgatgacagtgaacctggcccgctacaagcccactggagaatatgtgacagtgcggcgcatcaacctggaggcctgcagcaatgagatggtgaccttcctgcagggcgagctgcacgtgtccaagctgttcaaccaccccaacatcgtgccctaccgggccaccttcatcgctgacaatgagctgtgggtggtgaccagcttcatggcctacggcagcgccaaggacctgatctgcacccacttcatggatggcatgaatgagctggccatcgcctacatcctgcagggcgtgctgaaggccctggactacatccaccacatgggctacgtgcacaggtctgtgaaggccagccacatcctgatctctgtggatggcaaggtgtacctgagcggcctgcggagcaacctgtccatgatcagccacggccagaggcagagggtggtgcatgacttccccaagtacagcgtgaaggtgctgccctggctgagccctgaggtgctgcagcagaacctgcagggctatgatgccaagagtgacatctacagcgtgggcatcacagcctgtgagctggccaacggccacgtgcccttcaaggacatgcctgccacccagatgctgctggagaagctgaatggaacagtgccctgcctgctggacaccagcaccatcccagctgaggagctgaccatgagccccagccgctctgtggccaacagcggcctgagtgacagcctgaccaccagcaccccccggcccagcaatggacctgtgcctgcccccagctag

SEQ ID NO: 171736 - DNA, 1257 bp, synthetic construct
  misc_feature 1..1257: note = Description of Artificial Sequence: Synthetic coding sequence
  source 1..1257: mol_type = other DNA
atgagcctgctggactgcttctgcaccagcaggacccaggtggagagcctgcggcctgagaagcagagcgagaccagcatccaccagtacctggtggatgagcccaccctgtcctggagccggcccagcacccgggccagcgaggtgctgtgcagcaccaacgtgagccactatgagctgcaggtggagatcggccggggctttgacaacctgacctctgtgcacctggcccggcacacccccaccggcaccctggtgaccatcaagatcaccaacctggagaactgcaatgaggagcggctgaaggccctgcagaaggctgtgatcctgagccacttcttccgccaccccaacatcaccacctactggacagtgttcaccgtgggctcctggctgtgggtgatcagccccttcatggcctacggcagcgccagccagctgctgcggacctacttccctgagggcatgtctgagaccctcatccggaacatcctgtttggagctgtgcggggcctgaactacctgcaccagaatggctgcatccacaggagcatcaaggccagccacatcctgatctctggagatggcctggtgaccctgagcggcctgagccacctgcacagcctggtgaagcacggccagaggcacagagctgtgtatgacttcccccagttcagcacctctgtgcagccctggctgagccctgagctgctgcggcaggacctgcacggctacaacgtgaagagtgacatctacagcgtgggcatcacagcctgtgagctggccagcggccaggtgcccttccaggacatgcacaggacccagatgctgctgcagaagctgaagggccccccctacagccccctggacatcagcatcttcccccagagcgagagcaggatgaagaacagccagagcggcgtggacagcggcatcggggagagcgtgctggtgagcagcggcacccacacagtgaacagcgaccggctgcacacccccagcagcaagaccttcagccctgccttcttcagcctggtgcagctgtgcctgcagcaggaccctgagaagaggccttctgccagcagcctgctgagccacgtgttcttcaagcagatgaaggaggagagccaggacagcatcctgagcctgctgcccccagcctacaacaagcccagcatcagcctgccccctgtgctgccctggacagagccagaatgtgacttcccagatgagaaggacagctactgggagttctag

SEQ ID NO: 171737 - DNA, 1134 bp, synthetic construct
  misc_feature 1..1134: note = Description of Artificial Sequence: Synthetic coding sequence
  source 1..1134: mol_type = other DNA
atgagcctgctggactgcttctgcaccagcaggacccaggtggagagcctgcggcctgagaagcagagcgagaccagcatccaccagtacctggtggatgagcccaccctgtcctggagccggcccagcacccgggccagcgaggtgctgtgcagcaccaacgtgagccactatgagctgcaggtggagatcggccggggctttgacaacctgacctctgtgcacctggcccggcacacccccaccggcaccctggtgaccatcaagatcaccaacctggagaactgcaatgaggagcggctgaaggccctgcagaaggctgtgatcctgagccacttcttccgccaccccaacatcaccacctactggacagtgttcaccgtgggctcctggctgtgggtgatcagccccttcatggcctacggcagcgccagccagctgctgcggacctacttccctgagggcatgtctgagaccctcatccggaacatcctgtttggagctgtgcggggcctgaactacctgcaccagaatggctgcatccacaggagcatcaaggccagccacatcctgatctctggagatggcctggtgaccctgagcggcctgagccacctgcacagcctggtgaagcacggccagaggcacagagctgtgtatgacttcccccagttcagcacctctgtgcagccctggctgagccctgagctgctgcggcaggacctgcacggctacaacgtgaagagtgacatctacagcgtgggcatcacagcctgtgagctggccagcggccaggtgcccttccaggacatgcacaggacccagatgctgctgcagaagctgaagggccccccctacagccccctggacatcagcatcttcccccagagcgagagcaggatgaagaacagccagagcggcgtggacagcggcatcggggagagcgtgctggtgagcagcggcacccacacagtgaacagcgaccggctgcacacccccagcagcaagaccttcagccctgccttcttcagcctggtgcagctgtgcctgcagcaggaccctgagaagaggccttctgccagcagcctgctgagccacgtgttcttcaagcagccctactttgagttcctgtag

SEQ ID NO: 171738 - DNA, 843 bp, synthetic construct
  misc_feature 1..843: note = Description of Artificial Sequence: Synthetic coding sequence
  source 1..843: mol_type = other DNA
ctgggctactgcagcgccagccagctgctgcggacctacttccctgagggcatgtctgagaccctcatccggaacatcctgtttggagctgtgcggggcctgaactacctgcaccagaatggctgcatccacaggagcatcaaggccagccacatcctgatctctggagatggcctggtgaccctgagcggcctgagccacctgcacagcctggtgaagcacggccagaggcacagagctgtgtatgacttcccccagttcagcacctctgtgcagccctggctgagccctgagctgctgcggcaggacctgcacggctacaacgtgaagagtgacatctacagcgtgggcatcacagcctgtgagctggccagcggccaggtgcccttccaggacatgcacaggacccagatgctgctgcagaagctgaagggccccccctacagccccctggacatcagcatcttcccccagagcgagagcaggatgaagaacagccagagcggcgtggacagcggcatcggggagagcgtgctggtgagcagcggcacccacacagtgaacagcgaccggctgcacacccccagcagcaagaccttcagccctgccttcttcagcctggtgcagctgtgcctgcagcaggaccctgagaagaggccttctgccagcagcctgctgagccacgtgttcttcaagcagatgaaggaggagagccaggacagcatcctgagcctgctgcccccagcctacaacaagcccagcatcagcctgccccctgtgctgccctggacagagccagaatgtgacttcccagatgagaaggacagctactgggagttctag

SEQ ID NO: 171739 - DNA, 1257 bp, synthetic construct; identical to SEQ ID NO: 171736
  misc_feature 1..1257: note = Description of Artificial Sequence: Synthetic coding sequence
  source 1..1257: mol_type = other DNA

SEQ ID NO: 171740 - DNA, 1260 bp, synthetic construct
  misc_feature 1..1260: note = Description of Artificial Sequence: Synthetic coding sequence
  source 1..1260: mol_type = other DNA
atggagagcatctccatgatgggcagccccaagagcctgtctgagaccttcctgcccaacggcatcaatggcatcaaggatgccaggaaggtgacagtgggcgtcatcggcagcggggactttgccaagagcctgaccatccgcctcatccgctgtggctaccacgtggtgattggcagcaggaaccccaagtttgccagcgagttcttcccccacgtggtggatgtgacccaccatgaagatgccctgaccaagaccaacatcatctttgtggccatccaccgggagcactacaccagcctgtgggacctgcggcacctgctggtgggcaagatcctgattgatgtgagcaacaacatgaggatcaaccagtacccagagagcaatgctgagtacctggccagcctcttcccagacagcctcatcgtgaagggcttcaacgtggtgtctgcctgggccctgcagctgggccccaaggatgccagccggcaggtgtacatctgcagcaacaacatccaggcccggcagcaggtgattgagctggcccggcagctgaacttcatccccatcgacctgggcagcctgagcagcgcccgggagattgagaacctgcccctgcggctcttcaccctgtggaggggccctgtggtggtggccatcagcctggccaccttcttcttcctgtacagctttgtgagagatgtgatccacccctatgccaggaaccagcagagcgacttctacaagatccccatcgagatcgtgaacaagaccctgcccatcgtggccatcaccctgctgagcctggtgtacctggccggcctgctggccgccgcctaccagctgtactacggcaccaagtaccgccgcttccccccctggctggagacctggctgcagtgcaggaagcagctgggcctgctgtccttcttctttgccatggtgcacgtggcctacagcctgtgcctgcccatgagaagaagtgagcgctacctgttcctgaacatggcctaccagcaggtgcacgccaacatcgagaacagctggaatgaggaggaggtgtggagaattgagatgtacatcagctttggcatcatgagcctgggcctgctgagcctgctggccgtgaccagcatccccagcgtgtccaatgccctgaactggagggagttctccttcatccagatcttctgcagctttgctgacacccagacagagctggagctggagtttgtgttcctgctgaccctgctgctgtag

SEQ ID NO: 171741 - DNA, 1473 bp, synthetic construct
  misc_feature 1..1473: note = Description of Artificial Sequence: Synthetic coding sequence
  source 1..1473: mol_type = other DNA
atggagagcatctccatgatgggcagccccaagagcctgtctgagaccttcctgcccaacggcatcaatggcatcaaggatgccaggaaggtgacagtgggcgtcatcggcagcggggactttgccaagagcctgaccatccgcctcatccgctgtggctaccacgtggtgattggcagcaggaaccccaagtttgccagcgagttcttcccccacgtggtggatgtgacccaccatgaagatgccctgaccaagaccaacatcatctttgtggccatccaccgggagcactacaccagcctgtgggacctgcggcacctgctggtgggcaagatcctgattgatgtgagcaacaacatgaggatcaaccagtacccagagagcaatgctgagtacctggccagcctcttcccagacagcctcatcgtgaagggcttcaacgtggtgtctgcctgggccctgcagctgggccccaaggatgccagccggcaggtgtacatctgcagcaacaacatccaggcccggcagcaggtgattgagctggcccggcagctgaacttcatccccatcgacctgggcagcctgagcagcgcccgggagattgagaacctgcccctgcggctcttcaccctgtggaggggccctgtggtggtggccatcagcctggccaccttcttcttcctgtacagctttgtgagagatgtgatccacccctatgccaggaaccagcagagcgacttctacaagatccccatcgagatcgtgaacaagaccctgcccatcgtggccatcaccctgctgagcctggtgtacctggccggcctgctggccgccgcctaccagctgtactacggcaccaagtaccgccgcttccccccctggctggagacctggctgcagtgcaggaagcagctgggcctgctgtccttcttctttgccatggtgcacgtggcctacagcctgtgcctgcccatgagaagaagtgagcgctacctgttcctgaacatggcctaccagcaggtgcacgccaacatcgagaacagctggaatgaggaggaggtgtggagaattgagatgtacatcagctttggcatcatgagcctgggcctgctgagcctgctggccgtgaccagcatccccagcgtgtccaatgccctgaactggagggagttctccttcatccagagcaccctgggctacgtggccctgctgatcagcaccttccacgtgctgatctacggctggaagagggcctttgaggaggagtactaccgcttctacaccccacccaactttgtgctggccctggtgctgcccagcatcgtcatcctgggcaagatcatcctcttcctgccctgcatcagcaggaagctgaagaggatcaagaagggctgggagaagagccagttcctggaggagggcatgggcggcaccatcccccacgtgtccccagagcgggtgacagtgatgtag

SEQ ID NO: 171742 - DNA, 1473 bp, synthetic construct; identical to SEQ ID NO: 171741
  misc_feature 1..1473: note = Description of Artificial Sequence: Synthetic coding sequence
  source 1..1473: mol_type = other DNA

SEQ ID NO: 171743 - DNA, 1473 bp, synthetic construct; identical to SEQ ID NO: 171741
  misc_feature 1..1473: note = Description of Artificial Sequence: Synthetic coding sequence
  source 1..1473: mol_type = other DNA

SEQ ID NO: 171744 - DNA, 1365 bp, synthetic construct
  misc_feature 1..1365: note = Description of Artificial Sequence: Synthetic coding sequence
  source 1..1365: mol_type = other DNA
atggagagcatctccatgatgggcagccccaagagcctgtctgagaccttcctgcccaacggcatcaatggcatcaaggatgccaggaaggtgacagtgggcgtcatcggcagcggggactttgccaagagcctgaccatccgcctcatccgctgtggctaccacgtggtgattggcagcaggaaccccaagtttgccagcgagttcttcccccacgtggtggatgtgacccaccatgaagatgccctgaccaagaccaacatcatctttgtggccatccaccgggagcactacaccagcctgtgggacctgcggcacctgctggtgggcaagatcctgattgatgtgagcaacaacatgaggatcaaccagtacccagagagcaatgctgagtacctggccagcctcttcccagacagcctcatcgtgaagggcttcaacgtggtgtctgcctgggccctgcagctgggccccaaggatgccagccggcaggtgtacatctgcagcaacaacatccaggcccggcagcaggtgattgagctggcccggcagctgaacttcatccccatcgacctgggcagcctgagcagcgcccgggagattgagaacctgcccctgcggctcttcaccctgtggaggggccctgtggtggtggccatcagcctggccaccttcttcttcctgtacagctttgtgagagatgtgatccacccctatgccaggaaccagcagagcgacttctacaagatccccatcgagatcgtgaacaagaccctgcccatcgtggccatcaccctgctgagcctggtgtacctggccggcctgctggccgccgcctaccagctgtactacggcaccaagtaccgccgcttccccccctggctggagacctggctgcagtgcaggaagcagctgggcctgctgtccttcttctttgccatggtgcacgtggcctacagcctgtgcctgcccatgagaagaagtgagcgctacctgttcctgaacatggcctaccagcaggtgcacgccaacatcgagaacagctggaatgaggaggaggtgtggagaattgagatgtacatcagctttggcatcatgagcctgggcctgctgagcctgctggccgtgaccagcatccccagcgtgtccaatgccctgaactggagggagttctccttcatccagagcaccctgggctacgtggccctgctgatcagcaccttccacgtgctgatctacggctggaagagggcctttgaggaggagtactaccgcttctacaccccacccaactttgtgctggccctggtgctgcccagcatcgtcatcctggacctgctgcagctgtgccgctacccagactag

SEQ ID NO: 171745 - DNA, 1365 bp, synthetic construct; identical to SEQ ID NO: 171744
  misc_feature 1..1365: note = Description of Artificial Sequence: Synthetic coding sequence
  source 1..1365: mol_type = other DNA

SEQ ID NO: 171746 - DNA, 1365 bp, synthetic construct; identical to SEQ ID NO: 171744
  misc_feature 1..1365: note = Description of Artificial Sequence: Synthetic coding sequence
  source 1..1365: mol_type = other DNA

SEQ ID NO: 171747 - DNA, 267 bp, synthetic construct
  misc_feature 1..267: note = Description of Artificial Sequence: Synthetic coding sequence
  source 1..267: mol_type = other DNA
atggagagcatctccatgatgggcagccccaagagcctgtctgagaccttcctgcccaacggcatcaatggcatcaaggatgccaggaaggtgacagtgggcgtcatcggcagcggggactttgccaagagcctgaccatccgcctcatccgctgtggctaccacgtggtgattggcagcaggaaccccaagtttgccagcgagttcttcccccacgtggtggatgtgacccaccatgaagatgccctgaccaagaccaacatctag

SEQ ID NO: 171748 - DNA, 549 bp, synthetic construct
  misc_feature 1..549: note = Description of Artificial Sequence: Synthetic coding sequence
  source 1..549: mol_type = other DNA
atggagagcatctccatgatgggcagccccaagagcctgtctgagaccttcctgcccaacggcatcaatggcatcaaggatgccaggaaggtgacagtgggcgtcatcggcagcggggactttgccaagagcctgaccatccgcctcatccgctgtggctaccacgtggtgattggcagcaggaaccccaagtttgccagcgagttcttcccccacgtggtggatgtgacccaccatgaagatgccctgaccaagaccaacatcatctttgtggccatccaccgggagcactacaccagcctgtgggacctgcggcacctgctggtgggcaagatcctgattgatgtgagcaacaacatgaggatcaaccagtacccagagagcaatgctgagtacctggccagcctcttcccagacagcctcatcgtgaagggcttcaacgtggtgtctgcctgggccctgcagctgggccccaaggatgccagccggcaggtgtacatctgcagcaacaacatccaggcccggcagcaggtgattgagctggcctag

SEQ ID NO: 171749 - DNA, 1467 bp, synthetic construct
  misc_feature 1..1467: note = Description of Artificial Sequence: Synthetic coding sequence
  source 1..1467: mol_type = other DNA
atgcctgaggagatggacaagcccctcatcagcctgcacctggtggacagcgacagcagcctggccaaggtgcctgatgaggcccccaaggtgggcatcctgggcagcggggactttgcccggagcctggccacccggctggtgggcagcggcttcaaggtggtggtgggcagcaggaaccccaagaggacagcccggctcttccccagcgctgcccaggtgaccttccaggaggaggccgtgagcagccctgaggtgatctttgtggccgtgttccgggagcactacagcagcctgtgcagcctgagtgaccagctggccggcaagatcctggtggatgtgagcaaccccacagagcaggagcacctgcagcaccgggagagcaatgctgagtacctggccagcctcttccccacctgcaccgtggtgaaggccttcaacgtcatcagcgcctggaccctgcaggccggccccagagatggcaaccggcaggtgcccatctgtggggaccagcctgaggccaagagagctgtgtctgagatggccctggccatgggcttcatgcctgtggacatgggcagcctggccagcgcctgggaggtggaggccatgcccctgcggctgctgcctgcctggaaggtgcccaccctgctggccctgggcctgtttgtgtgcttctacgcctacaactttgtgagagatgtgctgcagccctacgtgcaggagagccagaacaagttcttcaagctgcctgtgtctgtggtgaacaccaccctgccctgtgtggcctacgtgctgctgagcctggtgtacctgcccggggtgctggccgccgccctgcagctgcggcggggcaccaagtaccagcgcttcccagactggctggaccactggctgcagcacaggaagcagatcggcctgctgtccttcttctgtgccgccctgcacgccctgtacagcttctgcctgcccctgcggcgggcccacagatatgacctggtgaacctggccgtgaagcaggtgctggccaacaagagccacctgtgggtggaggaggaggtgtggaggatggagatctacctgagcctgggcgtgctggccctgggcaccctgagcctgctggccgtgaccagcctgcccagcatcgccaacagcctgaactggagggagttctcctttgtgcagagcagcctgggctttgtggccctggtgctgagcaccctgcacaccctgacctacggctggacccgggcctttgaggagagccgctacaagttctacctgccccccaccttcaccctgaccctgctggtgccctgtgtggtgatcctggccaaggccctcttcctgctgccctgcatcagccggcggctggcccgcatccggcggggctgggagcgggagagcaccatcaagttcaccctgcccacagaccacgccctggccgagaagaccagccacgtgtag

SEQ ID NO: 171750 - DNA, 1467 bp, synthetic construct; identical to SEQ ID NO: 171749
  misc_feature 1..1467: note = Description of Artificial Sequence: Synthetic coding sequence
  source 1..1467: mol_type = other DNA

SEQ ID NO: 171751 - DNA, 1467 bp, synthetic construct; identical to SEQ ID NO: 171749
  misc_feature 1..1467: note = Description of Artificial Sequence: Synthetic coding sequence
  source 1..1467: mol_type = other DNA

SEQ ID NO: 171752 - DNA, 1467 bp, synthetic construct; identical to SEQ ID NO: 171749
  misc_feature 1..1467: note = Description of Artificial Sequence: Synthetic coding sequence
  source 1..1467: mol_type = other DNA

SEQ ID NO: 171753 - DNA, 1497 bp, synthetic construct
  misc_feature 1..1497: note = Description of Artificial Sequence: Synthetic coding sequence
  source 1..1497: mol_type = other DNA
atgagccaccagcctgctgtggccaccaagatgcctgaggagatggacaagcccctcatcagcctgcacctggtggacagcgacagcagcctggccaaggtgcctgatgaggcccccaaggtgggcatcctgggcagcggggactttgcccggagcctggccacccggctggtgggcagcggcttcaaggtggtggtgggcagcaggaaccccaagaggacagcccggctcttccccagcgctgcccaggtgaccttccaggaggaggccgtgagcagccctgaggtgatctttgtggccgtgttccgggagcactacagcagcctgtgcagcctgagtgaccagctggccggcaagatcctggtggatgtgagcaaccccacagagcaggagcacctgcagcaccgggagagcaatgctgagtacctggccagcctcttccccacctgcaccgtggtgaaggccttcaacgtcatcagcgcctggaccctgcaggccggccccagagatggcaaccggcaggtgcccatctgtggggaccagcctgaggccaagagagctgtgtctgagatggccctggccatgggcttcatgcctgtggacatgggcagcctggccagcgcctgggaggtggaggccatgcccctgcggctgctgcctgcctggaaggtgcccaccctgctggccctgggcctgtttgtgtgcttctacgcctacaactttgtgagagatgtgctgcagccctacgtgcaggagagccagaacaagttcttcaagctgcctgtgtctgtggtgaacaccaccctgccctgtgtggcctacgtgctgctgagcctggtgtacctgcccggggtgctggccgccgccctgcagctgcggcggggcaccaagtaccagcgcttcccagactggctggaccactggctgcagcacaggaagcagatcggcctgctgtccttcttctgtgccgccctgcacgccctgtacagcttctgcctgcccctgcggcgggcccacagatatgacctggtgaacctggccgtgaagcaggtgctggccaacaagagccacctgtgggtggaggaggaggtgtggaggatggagatctacctgagcctgggcgtgctggccctgggcaccctgagcctgctggccgtgaccagcctgcccagcatcgccaacagcctgaactggagggagttctcctttgtgcagagcagcctgggctttgtggccctggtgctgagcaccctgcacaccctgacctacggctggacccgggcctttgaggagagccgctacaagttctacctgccccccaccttcaccctgaccctgctggtgccctgtgtggtgatcctggccaaggccctcttcctgctgccctgcatcagccggcggctggcccgcatccggcggggctgggagcgggagagcaccatcaagttcaccctgcccacagaccacgccctggccgagaagaccagccacgtgtag

SEQ ID NO: 171754 - DNA, 1374 bp, synthetic construct
  misc_feature 1..1374: note = Description of Artificial Sequence: Synthetic coding sequence
  source 1..1374: mol_type = other DNA
atgcctgaggagatggacaagcccctcatcagcctgcacctggtggacagcgacagcagcctggccaaggtgcctgatgaggcccccaaggtgggcatcctgggcagcggggactttgcccggagcctggccacccggctggtgggcagcggcttcaaggtggtggtgggcagcaggaaccccaagaggacagcccggctcttccccagcgctgcccaggtgaccttccaggaggaggccgtgagcagccctgaggtgatctttgtggccgtgttccgggagcactacagcagcctgtgcagcctgagtgaccagctggccggcaagatcctggtggatgtgagcaaccccacagagcaggagcacctgcagcaccgggagagcaatgctgagtacctggccagcctcttccccacctgcaccgtggtgaaggccttcaacgtcatcagcgcctggaccctgcaggccggccccagagatggcaaccggcaggtgcccatctgtggggaccagcctgaggccaagagagctgtgtctgagatggccctggccatgggcttcatgcctgtggacatgggcagcctggccagcgcctgggaggtggaggccatgcccctgcggctgctgcctgcctggaaggtgcccaccctgctggccctgggcctgtttgtgtgcttctacgcctacaactttgtgagagatgtgctgcagccctacgtgcaggagagccagaacaagttcttcaagctgcctgtgtctgtggtgaacaccaccctgccctgtgtggcctacgtgctgctgagcctggtgtacctgcccggggtgctggccgccgccctgcagctgcggcggggcaccaagtaccagcgcttcccagactggctggaccactggctgcagcacaggaagcagatcggcctgctgtccttcttctgtgccgccctgcacgccctgtacagcttctgcctgcccctgcggcgggcccacagatatgacctggtgaacctggccgtgaagcaggtgctggccaacaagagccacctgtgggtggaggaggaggtgtggaggatggagatctacctgagcctgggcgtgctggccctgggcaccctgagcctgctggccgtgaccagcctgcccagcatcgccaacagcctgaactggagggagttctcctttgtgcagtgtgtggccaccagcagcgctggcaacacaggcagcggcacccggcggcctgagagccagagccaggacccccacctgcctgccccccaccaccagaccagcttcctgggccccaggagcttctgctgcagcctggtgcctgtgtccaccccctacggccaccaggaggacctgtcctggaccaggtag

SEQ ID NO: 171755 - DNA, 1467 bp, synthetic construct; identical to SEQ ID NO: 171749
  misc_feature 1..1467: note = Description of Artificial Sequence: Synthetic coding sequence
  source 1..1467: mol_type = other DNA

SEQ ID NO: 171756 - DNA, 1374 bp, synthetic construct; identical to SEQ ID NO: 171754
  misc_feature 1..1374: note = Description of Artificial Sequence: Synthetic coding sequence
  source 1..1374: mol_type = other DNA

SEQ ID NO: 171757 - DNA, 432 bp, synthetic construct
  misc_feature 1..432: note = Description of Artificial Sequence: Synthetic coding sequence
  source 1..432: mol_type = other DNA
atggagatctacctgagcctgggcgtgctggccctgggcaccctgagcctgctggccgtgaccagcctgcccagcatcgccaacagcctgaactggagggagttctcctttgtgcagagcagcctgggctttgtggccctggtgctgagcaccctgcacaccctgacctacggctggacccgggcctttgaggagagccgctacaagttctacctgccccccaccttcaccctgaccctgctggtgccctgtgtggtgatcctggccaaggccctcttcctgctgccctgcatcagccggcggctggcccgcatccggcggggctgggagcgggagagcaccatcaagttcaccctgcccacagaccacgccctgagccccctgggcttcctgttcctggtggtgcagagcggcatcaccgtgtgcaagtag

SEQ ID NO: 171758 - DNA, 852 bp, synthetic construct
  misc_feature 1..852: note = Description of Artificial Sequence: Synthetic coding sequence
  source 1..852: mol_type = other DNA
atggagaagacctgcattgatgccctgcccctgaccatgaacagcagcgagaagcaggagaccgtgtgcatctttggaactggagactttggccgcagcctgggcctgaagatgctgcagtgtggctacagcgtggtgtttggcagcaggaacccccagaagaccaccctgctgcccagcggggctgaggtgctgagctacagcgaggccgccaagaagagcggcatcatcatcatcgccatccaccgggagcactatgacttcctgacagagctgacagaggtgctgaatggcaagatcctggtggacatcagcaacaacctgaagatcaaccagtacccagagagcaatgctgagtacctggcccacctggtgcctggggcccacgtggtgaaggccttcaacaccatcagcgcctgggccctgcagagcggggccctggatgccagccggcaggccatcctgaagaaggagaaccccttcagcaccagcagcgcctggctgagtgacagctatgtggccctgggcatcctgggcttcttcctgtttgtgctgctgggcatcaccagcctgcccagcgtgtccaatgctgtgaactggagggagttccgctttgtgcagagcaagctgggctacctgaccctcatcctgtgcacagcccacaccctggtgtatggaggcaagcgcttcctgagccccagcaacctgcgctggtacctgcctgctgcctacgtgctgggcctcatcatcccctgcaccgtgctggtgatcaagtttgtgctgatcatgccctgtgtggacaacaccctgacccgcatccggcagggctgggagaggaacagcaagcactag

SEQ ID NO: 171759 - DNA, 1380 bp, synthetic construct
  misc_feature 1..1380: note = Description of Artificial Sequence: Synthetic coding sequence
  source 1..1380: mol_type = other DNA
atggagaagacctgcattgatgccctgcccctgaccatgaacagcagcgagaagcaggagaccgtgtgcatctttggaactggagactttggccgcagcctgggcctgaagatgctgcagtgtggctacagcgtggtgtttggcagcaggaacccccagaagaccaccctgctgcccagcggggctgaggtgctgagctacagcgaggccgccaagaagagcggcatcatcatcatcgccatccaccgggagcactatgacttcctgacagagctgacagaggtgctgaatggcaagatcctggtggacatcagcaacaacctgaagatcaaccagtacccagagagcaatgctgagtacctggcccacctggtgcctggggcccacgtggtgaaggccttcaacaccatcagcgcctgggccctgcagagcggggccctggatgccagccggcaggtgtttgtgtgtggaaatgacagcaaggccaagcagagggtgatggacatcgtgaggaacctgggcctgacccccatggaccagggcagcctgatggccgccaaggagattgagaagtaccccctgcagctgttccccatgtggaggttccccttctacctgtctgctgtgctgtgtgtgttcctgttcttctactgcgtcatcagagatgtgatctacccctacgtgtatgagaagaaggacaacaccttcaggatggccatcagcatccccaaccgcatcttccccatcacagccctgaccctgctggccctggtgtacctgcccggggtgattgctgccatcctgcagctgtaccggggcaccaagtaccgccgcttcccagactggctggaccactggatgctgtgcaggaagcagctgggcctggtggccctgggctttgccttcctgcacgtgctgtacaccctggtgatccccatccgctactacgtgcgctggaggctgggcaacctgactgtgacccaggccatcctgaagaaggagaaccccttcagcaccagcagcgcctggctgagtgacagctatgtggccctgggcatcctgggcttcttcctgtttgtgctgctgggcatcaccagcctgcccagcgtgtccaatgctgtgaactggagggagttccgctttgtgcagagcaagctgggctacctgaccctcatcctgtgcacagcccacaccctggtgtatggaggcaagcgcttcctgagccccagcaacctgcgctggtacctgcctgctgcctacgtgctgggcctcatcatcccctgcaccgtgctggtgatcaagtttgtgctgatcatgccctgtgtggacaacaccctgacccgcatccggcagggctgggagaggaacagcaagcactag

SEQ ID NO: 171760 - DNA, 1080 bp, synthetic construct
  misc_feature 1..1080: note = Description of Artificial Sequence: Synthetic coding sequence
  source 1..1080: mol_type = other DNA
atgcctgcccacctgctgcaggatgacatcagcagcagctacaccaccaccaccaccatcacagccccacccagccgggtgctgcagaatggaggagacaagctggagaccatgcccctgtacctggaggatgacatccggccagacatcaaggatgacatctatgaccccacctacaaggacaaggagggccccagccccaaggtggagtatgtgtggaggaacatcatcctgatgagcctgctgcacctgggcgccctgtatggcatcaccctcatccccacctgcaagttctacacctggctgtggggcgtcttctactactttgtgtctgccctgggcatcacagctggggcccaccggctgtggagccacaggagctacaaggcccggctgcccctgcggctcttcctgatcatcgccaacaccatggccttccagaatgatgtgtatgagtgggcccgggaccaccgggcccaccacaagttcagcgagacccacgccgacccccacaacagccggcggggcttcttcttcagccacgtgggctggctgctggtgaggaagcaccctgctgtgaaggagaagggcagcaccctggacctgagtgacctggaggccgagaagctggtgatgttccagaggcgctactacaagccaggcctgctgatgatgtgcttcatcctgcccaccctggtgccctggtacttctggggcgagaccttccagaacagcgtgtttgtggccaccttcctgcgctatgctgtggtgctgaatgccacctggctggtgaacagcgctgcccacctgtttggctaccggccctatgacaagaacatcagcccccgggagaacatcctggtgtccctgggcgctgtgggggagggcttccacaactaccaccacagcttcccctatgactacagcgccagcgagtaccgctggcacatcaacttcaccaccttcttcatcgactgcatggccgccctgggcctggcctatgacaggaagaaggtgtccaaggccgccatcctggcccgcatcaagaggactggagatggcaactacaagagcggctag

SEQ ID NO: 171761 - DNA, 729 bp, synthetic construct
  misc_feature 1..729: note = Description of Artificial Sequence: Synthetic coding sequence
  source 1..729: mol_type = other DNA
atgcctgcccacctgctgcaggatgacatcagcagcagctacaccaccaccaccaccatcacagccccacccagccgggtgctgcagaatggaggagacaagctggagaccatgcccctgtacctggaggatgacatccggccagacatcaaggatgacatctatgaccccacctacaaggacaaggagggccccagccccaaggtggagtatgtgtggaggaacatcatcctgatgagcctgctgcacctgggcgccctgtatggcatcaccctcatccccacctgcaagttctacacctggctgtggggcgtcttctactactttgtgtctgccctgggcatcacagctggggcccaccggctgtggagccacaggagctacaaggcccggctgcccctgcggctcttcctgatcatcgccaacaccatggccttccagaatgatgtgtatgagtgggcccgggaccaccgggcccaccacaagttcagcgagacccacgccgacccccacaacagccggcggggcttcttcttcagccacgtgggctggctgctggtgaggaagcaccctgctgtgaaggagaagggcagcaccctggacctgagtgacctggaggccgagaagctggtgatgttccagaggcgctactacaagccaggcctgctgatgatgtgcttcatcctgcccaccctggtgccctggtacttctggggcgagaccttctag

SEQ ID NO: 171762 - DNA, 813 bp, synthetic construct
  misc_feature 1..813: note = Description of Artificial Sequence: Synthetic coding sequence
  source 1..813: mol_type = other DNA
atggcctgccggcccaggagcccccccaggcaccagagccgctgtgatggagatgccagcccccccagccctgcccgctggagcctgggcaggaagagaagagcagatggccgccgctggaggccagaagatgctgaggaggccgagcacagaggagctgagaggaggcctgagagcttcaccaccccagagggccccaagcccaggagccgctgcagcgactgggccagcgctgtggaggaggatgagatgaggaccagggtgaacaaggagatggcccgctacaagaggaagctgctgatcaatgactttggccgggagaggaagagcagcagcggcagcagtgacagcaaggagagcatgagcacagtgcctgctgactttgaaacagatgaatctgtgctgatgaggcggcagaagcagatcaactacggcaagaacaccatcgcctatgaccgctacatcaaggaggtgcccaggcacctgcggcagcccggcatccaccccaagacccccaacaagttcaagaagtacagccgccgctcctgggaccagcagatcaagctgtggaaggtggccctgcacttctgggaccccccagctgaggagggctgtgacctgcaggagatccaccctgtggacctggagagcgctgagagcagcagcgagccccagaccagcagccaggatgactttgatgtgtacagcggcacccccaccaaggtgcgccacatggacagccaggtggaggatgaatttgacctggaggcctgcctgacagagcccctgcgggacttcagcgccatgtcctag

SEQ ID NO: 171763 - DNA, 5328 bp, synthetic construct
  misc_feature 1..5328: note = Description of Artificial Sequence: Synthetic coding sequence
  source 1..5328: mol_type = other DNA
atggccctgagcctgtggcccctgctgctgctgctgctgctgctgctgctgctgagctttgctgtgaccctggcccccaccggcccccacagcctggaccccggcctgtccttcctgaagagcctgctgagcaccctggaccaggccccccagggcagcctgagccgcagccgcttcttcaccttcctggccaacatcagcagcagctttgagcccggccgcatgggagagggccctgtgggggagcccccacccctgcagcccccagccctgcggctgcatgacttcctggtgaccctgcggggcagcccagactgggagcccatgctgggcctgctgggggacatgctggccctgctgggccaggagcagaccccccgggacttcctggtgcaccaggccggcgtgctgggcggcctggtggaggtgctgctgggcgccctggtgcctgggggcccccccacccccaccaggcctccctgcaccagagatggccccagcgactgtgtgctggccgctgactggctgcccagcctgctgctgctgctggagggcacccgctggcaggccctggtgcaggtgcagcccagcgtggaccccaccaatgccaccggcctggatggccgggaggccgccccccacttcctgcagggcctgctgggcctgctgacccccaccggggagctgggcagcaaggaggccctgtggggcggcctgctgaggacagtgggcgcccccctgtatgctgccttccaggagggcctgctgcgggtgacccacagcctgcaggatgaggtgttcagcatcctgggccagcctgagccagacaccaacggccagtgccagggcggcaacctgcagcagctgctgctgtggggcgtgcgccacaacctgtcctgggatgtgcaggccctgggcttcctgagcggcagccccccacctcctccagccctgctgcactgcctgagcactggagtgcccctgccccgggccagccagcccagcgcccacatcagcccccggcagaggcgggccatcaccgtggaggccctgtgtgagaaccacctgggccctgccccaccctacagcatcagcaacttcagcatccacctgctgtgccagcacaccaagccagccaccccccagccccaccccagcaccacagccatctgccagacagctgtgtggtatgctgtgtcctgggcccctggggcccagggctggctgcaggcctgccacgaccagttcccagatgagttcctggatgccatctgcagcaacctgtccttcagcgccctgagcggcagcaacagaaggctggtgaagaggctgtgtgccggcctgctgcccccacccaccagctgcccagagggcctgccccctgtgcccctgaccccagacatcttctggggctgcttcctggagaatgagaccctgtgggccgagcggctgtgtggggaggccagcctgcaggccgtgccccccagcaaccaggcctgggtgcagcacgtgtgccagggccccaccccagatgtgacagccagccccccctgccacatcggcccctgtggggagcgctgcccagatggcggcagcttcctggtgatggtgtgtgccaatgacaccatgtatgaggtgctggtgcccttctggccctggctggccggccagtgccgcatcagcagaggaggaaatgacacctgcttcctggagggcctgctgggccccctgctgcccagcctgccccccctgggccccagccccctgtgcctgaccccaggccccttcctgctgggcatgctgagccagctgccccgctgccagagctctgtgcctgccctggcccaccccacccggctgcactacctgctgcggctgctgaccttcctgctgggccctggagctggaggagctgaggcccagggcatgctgggccgggccctgctgctgagcagcctgcctgacaactgcagcttctgggatgccttccggcctgagggccgccgctctgtgctgcggaccatcggggagtacctggagcaggatgaggagcagcccaccccatctggctttgagcccaccgtgaaccccagcagcggcatcagcaagatggagctgctggcctgcttcagccctgtgctgtgggacctgctgcagcgggagaagtctgtgtgggccctgcagatcctggtgcaggcctacctgcacatgcctcctgagaacctgcagcagctggtgctgtctgctgagcgggaggccgcccagggcttcctgaccctgatgctgcagggcaagctgcagggcaagctgcaggtgcccccatctgaggagcaggccctgggccgcctgacagccctgctgctgcagcgctacccccggctgaccagccagctgttcatcgacctgagccccctcatccccttcctggccgtgtctgacctgatgaggttcccccccagcctgctggccaatgacagcgtgctggccgccatccgggactacagccctggcatgaggcctgagcagaaggaggccctggccaagaggctgctggcccctgagctgtttggagaggtgcctgcctggccccaggagctgctgtgggccgtgctgcccctgctgccccacctgcccctggagaacttcctgcagctgagcccccaccagatccaggccctggaggacagctggccagctgctggcctgggccctggccacgcccggcacgtgctgcggagcctggtgaaccagagcgtgcaggatggagaggagcaggtgcggcggctgggccccctggcctgcttcctgagccctgaggagctgcagagcctggtgcccctgagtgaccccactggacctgtggagcggggcctgctggagtgtgccgccaacggcaccctgagccctgagggccgggtggcctatgagctgctgggcgtgctgcggagcagcggcggcgctgtgctgagcccccgggagctgcgggtgtgggcccccctcttcagccagctgggcctgcgcttcctgcaggagctgtctgagccccagctgcgggccatgctgcctgtgctgcagggcacctctgtgaccccagcccaggccgtgctgctgctgggccgcctgctgcccaggcatgacctgagcctggaggagctgtgcagcctgcacctgctgctgcccggcctgagcccccagaccctgcaggccatcccccggcgggtgctggtgggcgcctgcagctgcctggcccctgagctgagccggctgagcgcctgccagacagctgccctgctgcagaccttccgggtgaaggatggagtgaagaacatgggcaccactggagctggccctgctgtgtgcatccctggccagcccatccccaccacctggccagactgcctgctgcccctgctgcccctgaagctgctgcagctggacagcctggccctgctggccaacagaagacgctactgggagctgccctggagcgagcagcaggcccagttcctgtggaagaagatgcaggtgcccaccaacctgaccctgaggaacctgcaggccctgggcaccctggccggcggcatgagctgtgagttcctgcagcagatcaacagcatggtggacttcctggaggtggtgcacatgatctaccagctgcccaccagggtgcggggcagcctgcgggcctgcatctgggccgagctgcagaggaggatggccatgcctgagcctgagtggaccaccgtgggccctgagctgaatggcctggacagcaagctgctgctggacctgcccatccagctgatggaccggctgagcaatgaaagcatcatgctggtggtggagctggtgcagagggcccctgagcagctgctggccctgacccccctgcaccaggccgccctggccgagcgggccctgcagaacctggcccccaaggagacccctgtgtctggagaggtgctggagaccctgggccccctggtgggcttcctgggcacagagagcacccggcagatccccctgcagatcctgctgagccacctgagccagctgcagggcttctgcctgggggagacctttgccacagagctgggctggctgctgctgcaggagagcgtgctgggcaagccagagctgtggagccaggatgaggtggagcaggccggccgcctggtgttcaccctgagcacagaggccatcagcctcatcccccgggaggccctgggccctgagaccctggagcggctgctggagaagcagcagagctgggagcagagccgggtgggccagctgtgccgggagccccagctggccgccaagaaggccgccctggtggccggcgtggtgcggcctgctgctgaggacctgcctgagcctgtgcccaactgtgctgatgtgcggggcaccttccctgctgcctggagcgccacccagattgctgagatggagctgagtgactttgaggactgcctgaccctgtttgctggggaccccggcctgggccctgaggagctgcgggccgccatgggcaaggccaagcagctgtggggccccccccggggcttccggcctgagcagatcctgcagctgggccgcctgctgattggcctgggggaccgggagctgcaggagctgatcctggtggactggggcgtgctgagcaccctgggccagattgatggctggagcaccacccagctgcgcatcgtggtgagcagcttcctgcggcagagcggccgccacgtgagccacctggactttgtgcacctgacagccctgggctacaccctgtgtggcctgcggcctgaggagctgcagcacatcagctcctgggagttcagccaggccgccctcttcctgggcaccctgcacctgcagtgcagcgaggagcagctggaggtgctggcccacctgctggtgctgcccggcggcttcggccccatcagcaactggggccctgagatcttcacagagatcggcaccatcgctgctggcatcccagacctggccctgagcgccctgctgcggggccagatccagggcgtgacccccctggccatcagcgtcatccccccacccaagtttgctgtggtgttcagccccatccagctgagcagcctgaccagcgcccaggccgtggccgtgaccccagagcagatggccttcctgagccctgagcagaggagagctgtggcctgggcccagcacgagggcaaggagagccctgagcagcagggccgcagcacagcctggggcctgcaggactggagccggcccagctggagcctggtgctgaccatctccttcctgggccacctgctgtag

SEQ ID NO: 171764 - DNA, 1056 bp, synthetic construct
  misc_feature 1..1056: note = Description of Artificial Sequence: Synthetic coding sequence
  source 1..1056: mol_type = other DNA
atggccctgagcctgtggcccctgctgctgctgctgctgctgctgctgctgctgagctttgctgtgaccctggcccccaccggcccccacagcctggaccccggcctgtccttcctgaagagcctgctgagcaccctggaccaggccccccagggcagcctgagccgcagccgcttcttcaccttcctggccaacatcagcagcagctttgagcccggccgcatgggagagggccctgtgggggagcccccacccctgcagcccccagccctgcggctgcatgacttcctggtgaccctgcggggcagcccagactgggagcccatgctgggcctgctgggggacatgctggccctgctgggccaggagcagaccccccgggacttcctggtgcaccaggccggcgtgctgggcggcctggtggaggtgctgctgggcgccctggtgcctgggggcccccccacccccacccagcccccctgcaccagagatggccccagcgactgtgtgctggccgctgactggctgcccagcctgctgctgctgctggagggcacccgctggcaggccctggtgcaggtgcagcccagcgtggaccccaccaatgccaccggcctggatggccgggaggccgccccccacttcctgcagggcctgctgggcctgctgacccccaccggggagctgggcagcaaggaggccctgtggggcggcctgctgaggacagtgggcgcccccctgtatgctgccttccaggagggcctgctgcgggtgacccacagcctgcaggatgaggtgttcagcatcctgggccagcctgagccagacaccaacggccagtgccagggcggcaacctgcagcagctgctgctgtggggcgtgcgccacaacctgtcctgggatgtgcaggccctgggcttcctgagcggcagccccccacctcctccagccctgctgcactgcctgagcactggagtgcccctgccccgggccagccagcccagcgcccacatcagcccccggcagaggcgggccatcaccgtggaggccctgtag

SEQ ID NO: 171765 - DNA, 5328 bp, synthetic construct; identical to SEQ ID NO: 171763
  misc_feature 1..5328: note = Description of Artificial Sequence: Synthetic coding sequence
  source 1..5328: mol_type = other DNA

SEQ ID NO: 171766 - DNA, 1056 bp, synthetic construct
  misc_feature 1..1056: note = Description of Artificial Sequence: Synthetic coding sequence
  source 1..1056: mol_type = other DNA
atggccctgagcctgtggcccctgctgctgctgctgctgctgctgctgctgctgagctttgctgtgaccctggcccccaccggcccccacagcctggaccccggcctgtccttcctgaagagcctgctgagcaccctggaccaggccccccagggcagcctgagccgcagccgcttcttcaccttcctggccaacatcagcagcagctttgagcccggccgcatgggagagggccctgtgggggagcccccacccctgcagcccccagccctgcggctgcatgacttcctggtgaccctgcggggcagcccagactgggagcccatgctgggcctgctgggggacatgctggccctgctgggccaggagcagaccccccgggacttcctggtgcaccaggccggcgtgctgggcggcctggtggaggtgctgctgggcgccctggtgcctgggggcccccccacccccaccaggcctccctgcaccagagatggccccagcgactgtgtgctggccgctgactggctgcccagcctgctgctgctgctggagggcacccgctggcaggccctggtgcaggtgcagcccagcgtggaccccaccaatgccaccggcctggatggccgggaggccgccccccacttcctgcagggcctgctgggcctgctgacccccaccggggagctgggcagcaaggaggccctgtggggcggcctgctgaggacagtgggcgcccccctgtatgctgccttccaggagggcctgctgcgggtgacccacagcctgcaggatgaggtgttcagcatcctgggccagcctgagccagacaccaacggccagtgccagggcggcaacctgcagcagctgctgctgtggggcgtgcgccacaacctgtcctgggatgtgcaggccctgggcttcctgagcggcagccccccacctcctccagccctgctgcactgcctgagcactggagtgcccctgccccgggccagccagcccagcgcccacatcagcccccggcagaggcgggccatcaccgtggaggccctgtag

SEQ ID NO: 171767 - DNA, 2100 bp, synthetic construct
  misc_feature 1..2100: note = Description of Artificial Sequence: Synthetic coding sequence
  source 1..2100: mol_type = other DNA
atggccctgagcctgtggcccctgctgctgctgctgctgctgctgctgctgctgagctttgctgtgaccctggcccccaccggcccccacagcctggaccccggcctgtccttcctgaagagcctgctgagcaccctggaccaggccccccagggcagcctgagccgcagccgcttcttcaccttcctggccaacatcagcagcagctttgagcccggccgcatgggagagggccctgtgggggagcccccacccctgcagcccccagccctgcggctgcatgacttcctggtgaccctgcggggcagcccagactgggagcccatgctgggcctgctgggggacatgctggccctgctgggccaggagcagaccccccgggacttcctggtgcaccaggccggcgtgctgggcggcctggtggaggtgctgctgggcgccctggtgcctgggggcccccccacccccacccagcccccctgcaccagagatggccccagcgactgtgtgctggccgctgactggctgcccagcctgctgctgctgctggagggcacccgctggcaggccctggtgcaggtgcagcccagcgtggaccccaccaatgccaccggcctggatggccgggaggccgccccccacttcctgcagggcctgctgggcctgctgacccccaccggggagctgggcagcaaggaggccctgtggggcggcctgctgaggacagtgggcgcccccctgtatgctgccttccaggagggcctgctgcgggtgacccacagcctgcaggatgaggtgttcagcatcctgggccagcctgagccagacaccaacggccagtgccagggcggcaacctgcagcagctgctgctgtggggcgtgcgccacaacctgtcctgggatgtgcaggccctgggcttcctgagcggcagccccccacctcctccagccctgctgcactgcctgagcactggagtgcccctgccccgggccagccagcccagcgcccacatcagcccccggcagaggcgggccatcaccgtggaggccctgtgtgagaaccacctgggccctgccccaccctacagcatcagcaacttcagcatccacctgctgtgccagcacaccaagccagccaccccccagccccaccccagcaccacagccatctgccagacagctgtgtggtatgctgtgtcctgggcccctggggcccagggctggctgcaggcctgccacgaccagttcccagatgagttcctggatgccatctgcagcaacctgtccttcagcgccctgagcggcagcaacagaaggctggtgaagaggctgtgtgccggcctgctgcccccacccaccagctgcccagagggcctgccccctgtgcccctgaccccagacatcttctggggctgcttcctggagaatgagaccctgtgggccgagcggctgtgtggggaggccagcctgcaggccgtgccccccagcaaccaggcctgggtgcagcacgtgtgccagggccccaccccagatgtgacagccagccccccctgccacatcggcccctgtggggagcgctgcccagatggcggcagcttcctggtgatggtgtgtgccaatgacaccatgtatgaggtgctggtgcccttctggccctggctggccggccagtgccgcatcagcagaggaggaaatgacacctgcttcctggagggcctgctgggccccctgctgcccagcctgccccccctgggccccagccccctgtgcctgaccccaggccccttcctgctgggcatgctgagccagctgccccgctgccagagctctgtgcctgccctggcccaccccacccggctgcactacctgctgcggctgctgaccttcctgctgggccctggagctggaggagctgaggcccagggcatgctgggccgggccctgctgctgagcagcctgcctgacaactgcagcttctgggatgccttccggcctgagggccgccgctctgtgctgcggaccatcggggagtacaacaagatgaggagcagccagccccaccaggccctgaaccccctgagcaccccagccctggtgtag

SEQ ID NO: 171768 - DNA, 3009 bp, synthetic construct
  misc_feature 1..3009: note = Description of Artificial Sequence: Synthetic coding sequence
  source 1..3009: mol_type = other DNA
atggagctgctggcctgcttcagccctgtgctgtgggacctgctgcagcgggagaagtctgtgtgggccctgcagatcctggtgcaggcctacctgcacatgcccccagagaacctgcagcagctggtgctgtctgctgagcgggaggccgcccagggcttcctgaccctgatgctgcagggcaagctgcagggcaagctgcaggtgccccccagcgaggagcaggccctgggccgcctgacagccctgctgctgcagcgctacccccggctgaccagccagctgttcatcgacctgagccccctcatccccttcctggccgtgtctgacctgatgagatttcctcccagcctgctggccaatgattctgtgcagcagggctaccggggcagcgaggagaacagcctggaggaggacaagggcctgcggcccatgacccccaggagcctggccgccatccgggactacagccctggcatgaggcctgagcagaaggaggccctggccaagaggctgctggcccctgagctgtttggagaggtgcctgcctggccccaggagctgctgtgggccgtgctgcccctgctgccccacctgcccctggagaacttcctgcagctgagcccccaccagatccaggccctggaggacagctggccagctgctggcctgggccctggccacgcccggcacgtgctgcggagcctggtgaaccagagcgtgcaggatggagaggagcaggtgcggcggctgggccccctggcctgcttcctgagccctgaggagctgcagagcctggtgcccctgagtgaccccactggacctgtggagcggggcctgctggagtgtgccgccaacggcaccctgagccctgagggccgggtggcctatgagctgctgggcgtgctgcggagcagcggcggcgctgtgctgagcccccgggagctgcgggtgtgggcccccctcttcagccagctgggcctgcgcttcctgcaggagctgtctgagccccagctgcgggccatgctgcctgtgctgcagggcacctctgtgaccccagcccaggccgtgctgctgctgggccgcctgctgcccaggcatgacctgctgcagctggacagcctggccctgctggccaacagaagacgctactgggagctgccctggagcgagcagcaggcccagttcctgtggaagaagatgcaggtgcccaccaacctgaccctgaggaacctgcaggccctgggcaccctggccggcggcatgagctgtgagttcctgcagcagatcaacagcatggtggacttcctggaggtggtgcacatgatctaccagctgcccaccagggtgcggggcagcctgcgggcctgcatctgggccgagctgcagaggaggatggccatgcctgagcctgagtggaccaccgtgggccctgagctgaatggcctggacagcaagctgctgctggacctgcccatccagctgatggaccggctgagcaatgaaagcatcatgctggtggtggagctggtgcagagggcccctgagcagctgctggccctgacccccctgcaccaggccgccctggccgagcgggccctgcagaacctggcccccaaggagacccctgtgtctggagaggtgctggagaccctgggccccctggtgggcttcctgggcacagagagcacccggcagatccccctgcagatcctgctgagccacctgagccagctgcagggcttctgcctgggggagacctttgccacagagctgggctggctgctgctgcaggagagcgtgctgggcaagccagagctgtggagccaggatgaggtggagcaggccggccgcctggtgttcaccctgagcacagaggccatcagcctcatcccccgggaggccctgggccctgagaccctggagcggctgctggagaagcagcagagctgggagcagagccgggtgggccagctgtgccgggagccccagctggccgccaagaaggccgccctggtggccggcgtggtgcggcctgctgctgaggacctgcctgagcctgtgcccaactgtgctgatgtgcggggcaccttccctgctgcctggagcgccacccagattgctgagatggagctgagtgactttgaggactgcctgaccctgtttgctggggaccccggcctgggccctgaggagctgcgggccgccatgggcaaggccaagcagctgtggggccccccccggggcttccggcctgagcagatcctgcagctgggccgcctgctgattggcctgggggaccgggagctgcaggagctgatcctggtggactggggcgtgctgagcaccctgggccagattgatggctggagcaccacccagctgagaattgtggtgtcctccttcctgcggcagagcggcagacatgtgagccacctggactttgtgcacctgacagccctgggctacaccctgtgtggcctgcggcctgaggagctgcagcacatcagctcctgggagttcagccaggccgccctcttcctgggcaccctgcacctgcagtgcagcgaggagcagctggaggtgctggcccacctgctggtgctgcccggcggcttcggccccatcagcaactggggccctgagatcttcacagaaattggcaccatcgccgccggcatcccagacctggccctgagcgccctgctgcggggccagatccagggcgtgacccccctggccatcagcgtcatccccccacccaagtttgctgtggtgttcagccccatccagctgagcagcctgaccagcgcccaggccgtggccgtgaccccagagcagatggccttcctgagccctgagcagaggagagctgtggcctgggcccagcacgagggcaaggagagccctgagcagcagggccgcagcacagcctggggcctgcaggactggagccggcccagctggagcctggtgctgaccatctccttcctgggccacctgctgtag

SEQ ID NO: 171769 - DNA, 1890 bp, synthetic construct
  misc_feature 1..1890: note = Description of Artificial Sequence: Synthetic coding sequence
  source 1..1890: mol_type = other DNA
atgttccgggaccaggtgggcgtgctggccggctggttcaagggctggaatgaatgtgagcagacagtggccctgctgagcctgctgaagagggtgtcccagacccaggcccgcttcctgcagctgtgcctggagcacagcctggccgactgtgccgagctgcacgtgctggagcgggaggccaacagccctggcatcatcaaccagtggcagcaggagagcaaggacaaggtgatcagcctgctgctgacccacctgcccctgctgaagccaggcaacctggatgccaaggtggagtacatgaagctgctgcccaagatcctggcccacagcattgagcacaaccagcacatcgaggagagccggcagctgctgtcctatgccctgatccacccagccaccagcctggaggacagaagtgccctggccatgtggctgaaccacctggaggacaggaccagcaccagctttggaggccagaacagaggccgcagtgacagcgtggactatggccagacccactactaccaccagaggcagaacagtgatgacaagctgaatggctggcagaacagccgggacagcggcatctgcatcaatgccagcaactggcaggacaagtccatgggctgtgaaaatggacatgtgcccctgtacagcagcagctctgtgcccaccaccatcaacaccatcggcaccagcaccagcaccaacgtgcctgcctggctgaagagcctgcggctgcacaagtatgctgccctcttcagccagatgacctatgaggagatgatggccctgacagagtgccagctggaggcccagaatgtgaccaagggggcccggcacaagatcgtcatcagcatccagaagctgaaggagcggcagaacctgctgaagagcctggagcgggacatcatcgagggcggcagcctgcgcatccccctgcaggagctgcaccagatgatcctgacccccatcaaggcctacagcagccccagcaccaccccagaggcccggcggcgggagccccaggccccccggcagcccagcctgatgggccctgagagccagagcccagactgcaaggatggagctgctgccaccggggccacagccaccccatctgctggggccagcggcggcctgcagccccaccagctgagcagctgtgatggagagctggccgtggcccccctgcctgagggggacctgcccggccagttcaccagggtgatgggcaaggtgtgcacccagctgctggtgtccaggccagatgaggagaacatcagcagctacctgcagctgattgacaagtgcctgatccacgaggccttcacagagacccagaagaagaggctgctgtcctggaagcagcaggtgcagaagctgttccgctccttccccaggaagaccctgctggacatcagcggctaccggcagcagaggaacagaggcttcggccagagcaacagcctgcccacagctggctctgtgggcggcggcatgggcagaagaaacccccggcagtaccagatccccagcagaaatgtgcccagcgcccggctgggcctgctgggcaccagcggctttgtgagcagcaaccagaggaacaccacagccacccccaccatcatgaagcagggccggcagaacctgtggtttgccaaccctgggggcagcaacagcatgcccagcaggacccacagctctgtgcagaggaccaggagcctgcctgtgcacaccagcccccagaacatgctgatgttccagcagcctgagttccagctgcctgtgacagagccagacatcaacaaccggctggagagcctgtgcctgtccatgacagaacatgccctgggagatggagtggacaggaccagcaccatctag

SEQ ID NO: 171770 - DNA, 1893 bp, synthetic construct
  misc_feature 1..1893: note = Description of Artificial Sequence: Synthetic coding sequence
  source 1..1893: mol_type = other DNA
atgatgttccgggaccaggtgggcgtgctggccggctggttcaagggctggaatgaatgtgagcagacagtggccctgctgagcctgctgaagagggtgtcccagacccaggcccgcttcctgcagctgtgcctggagcacagcctggccgactgtgccgagctgcacgtgctggagcgggaggccaacagccctggcatcatcaaccagtggcagcaggagagcaaggacaaggtgatcagcctgctgctgacccacctgcccctgctgaagccaggcaacctggatgccaaggtggagtacatgaagctgctgcccaagatcctggcccacagcattgagcacaaccagcacatcgaggagagccggcagctgctgtcctatgccctgatccacccagccaccagcctggaggacagaagtgccctggccatgtggctgaaccacctggaggacaggaccagcaccagctttggaggccagaacagaggccgcagtgacagcgtggactatggccagacccactactaccaccagaggcagaacagtgatgacaagctgaatggctggcagaacagccgggacagcggcatctgcatcaatgccagcaactggcaggacaagtccatgggctgtgaaaatggccacgtgcccctgtacagcagcagctctgtgcccaccaccatcaacaccatcggcaccagcaccagcaccaacgtgcctgcctggctgaagagcctgcggctgcacaagtatgctgccctcttcagccagatgacctatgaggagatgatggccctgacagagtgccagctggaggcccagaatgtgaccaagggggcccggcacaagatcgtcatcagcatccagaagctgaaggagcggcagaacctgctgaagagcctggagcgggacatcattgaaggaggcagcctgcgcatccccctgcaggagctgcaccagatgatcctgacccccatcaaggcctacagcagccccagcaccaccccagaggccaggagaagagagccccaggccccccggcagcccagcctgatgggccctgagagccagagcccagactgcaaggatggagctgctgccactggagccacagccacccccagcgctggggccagcggcggcctgcagccccaccagctgagcagctgtgatggagagctggccgtggcccccctgcctgagggggacctgcccggccagttcaccagggtgatgggcaaggtgtgcacccagctgctggtgtccaggccagatgaggagaacatcagcagctacctgcagctgattgacaagtgcctgattcatgaggccttcacagagacccagaagaagaggctgctgtcctggaagcagcaggtgcagaagctgttccgctccttccccaggaagaccctgctggacatcagcggctaccggcagcagaggaacagaggatttggccagagcaacagcctgcccacagctggctctgtgggcggcggcatgggcagaagaaacccccggcagtaccagatccccagcagaaatgtgcccagcgcccggctgggcctgctgggcaccagcggctttgtgagcagcaaccagaggaacaccacagccacccccaccatcatgaagcagggccggcagaacctgtggtttgccaaccctgggggcagcaacagcatgcccagcaggacccacagctctgtgcagaggaccaggagcctgcctgtgcacaccagcccccagaacatgctgatgttccagcagcctgagttccagctgcctgtgacagagccagacatcaacaaccggctggagagcctgtgcctgtccatgacagagcacgccctgggagatggagtggacaggaccagcaccatctag

SEQ ID NO: 171771 - DNA, 2154 bp, synthetic construct
  misc_feature 1..2154: note = Description of Artificial Sequence: Synthetic coding sequence
  source 1..2154: mol_type = other DNA
atgttccgggaccaggtgggcgtgctggccggctggttcaagggctggaatgaatgtgagcagacagtggccctgctgagcctgctgaagagggtgtcccagacccaggcccgcttcctgcagctgtgcctggagcacagcctggccgactgtgccgagctgcacgtgctggagcgggaggccaacagccctggcatcatcaaccagtggcagcaggagagcaaggacaaggtgatcagcctgctgctgacccacctgcccctgctgaagccaggcaacctggatgccaaggtggagtacatgaagctgctgcccaagatcctggcccacagcattgagcacaaccagcacatcgaggagagccggcagctgctgtcctatgccctgatccacccagccaccagcctggaggacagaagtgccctggccatgtggctgaaccacctggaggacaggaccagcaccagctttggaggccagaacagaggccgcagtgacagcgtggactatggccagacccactactaccaccagaggcagaacagtgatgacaagctgaatggctggcagaacagccgggacagcggcatctgcatcaatgccagcaactggcaggacaagtccatgggctgtgaaaatggacatgtgcccctgtacagcagcagctctgtgcccaccaccatcaacaccatcggcaccagcaccagcaccatcctgagcggccaggcccaccacagccccctgaagaggtctgtgtccctgaccccacccatgaatgtgcccaaccagcccctgggccacggctggatgagccatgaggacctgcgggcccggggcccccagtgcctgcccagcgaccacgcccccctgagcccccagagctctgtggccagcagcggcagcggcggcagcgagcacctggaggaccagaccacagccaggaacaccttccaggaggagggcagcggcatgaaggatgtgcctgcctggctgaagagcctgcggctgcacaagtatgctgccctcttcagccagatgacctatgaggagatgatggccctgacagagtgccagctggaggcccagaatgtgaccaagggggcccggcacaagatcgtcatcagcatccagaagctgaaggagcggcagaacctgctgaagagcctggagcgggacatcatcgagggcggcagcctgcgcatccccctgcaggagctgcaccagatgatcctgacccccatcaaggcctacagcagccccagcaccaccccagaggcccggcggcgggagccccaggccccccggcagcccagcctgatgggccctgagagccagagcccagactgcaaggatggagctgctgccaccggggccacagccaccccatctgctggggccagcggcggcctgcagccccaccagctgagcagctgtgatggagagctggccgtggcccccctgcctgagggggacctgcccggccagttcaccagggtgatgggcaaggtgtgcacccagctgctggtgtccaggccagatgaggagaacatcagcagctacctgcagctgattgacaagtgcctgatccacgaggccttcacagagacccagaagaagaggctgctgtcctggaagcagcaggtgcagaagctgttccgctccttccccaggaagaccctgctggacatcagcggctaccggcagcagaggaacagaggcttcggccagagcaacagcctgcccacagctggctctgtgggcggcggcatgggcagaagaaacccccggcagtaccagatccccagcagaaatgtgcccagcgcccggctgggcctgctgggcaccagcggctttgtgagcagcaaccagaggaacaccacagccacccccaccatcatgaagcagggccggcagaacctgtggtttgccaaccctgggggcagcaacagcatgcccagcaggacccacagctctgtgcagaggaccaggagcctgcctgtgcacaccagcccccagaacatgctgatgttccagcagcctgagttccagctgcctgtgacagagccagacatcaacaaccggctggagagcctgtgcctgtccatgacagaacatgccctgggagatggagtggacaggaccagcaccatctag

SEQ ID NO: 171772 - DNA, 2157 bp, synthetic construct
  misc_feature 1..2157: note = Description of Artificial Sequence: Synthetic coding sequence
  source 1..2157: mol_type = other DNA
atgatgttccgggaccaggtgggcgtgctggccggctggttcaagggctggaatgaatgtgagcagacagtggccctgctgagcctgctgaagagggtgtcccagacccaggcccgcttcctgcagctgtgcctggagcacagcctggccgactgtgccgagctgcacgtgctggagcgggaggccaacagccctggcatcatcaaccagtggcagcaggagagcaaggacaaggtgatcagcctgctgctgacccacctgcccctgctgaagccaggcaacctggatgccaaggtggagtacatgaagctgctgcccaagatcctggcccacagcattgagcacaaccagcacatcgaggagagccggcagctgctgtcctatgccctgatccacccagccaccagcctggaggacagaagtgccctggccatgtggctgaaccacctggaggacaggaccagcaccagctttggaggccagaacagaggccgcagtgacagcgtggactatggccagacccactactaccaccagaggcagaacagtgatgacaagctgaatggctggcagaacagccgggacagcggcatctgcatcaatgccagcaactggcaggacaagtccatgggctgtgaaaatggccacgtgcccctgtacagcagcagctctgtgcccaccaccatcaacaccatcggcaccagcaccagcaccatcctgagcggccaggcccaccacagccccctgaagaggtctgtgtccctgaccccacccatgaatgtgcccaaccagcccctgggccacggctggatgagccatgaggacctgcgggcccggggcccccagtgcctgcccagcgaccacgcccccctgagcccccagagctctgtggccagcagcggcagcggcggcagcgagcacctggaggaccagaccacagccaggaacaccttccaggaggagggcagcggcatgaaggatgtgcctgcctggctgaagagcctgcggctgcacaagtatgctgccctcttcagccagatgacctatgaggagatgatggccctgacagagtgccagctggaggcccagaatgtgaccaagggggcccggcacaagatcgtcatcagcatccagaagctgaaggagcggcagaacctgctgaagagcctggagcgggacatcattgaaggaggcagcctgcgcatccccctgcaggagctgcaccagatgatcctgacccccatcaaggcctacagcagccccagcaccaccccagaggccaggagaagagagccccaggccccccggcagcccagcctgatgggccctgagagccagagcccagactgcaaggatggagctgctgccactggagccacagccacccccagcgctggggccagcggcggcctgcagccccaccagctgagcagctgtgatggagagctggccgtggcccccctgcctgagggggacctgcccggccagttcaccagggtgatgggcaaggtgtgcacccagctgctggtgtccaggccagatgaggagaacatcagcagctacctgcagctgattgacaagtgcctgattcatgaggccttcacagagacccagaagaagaggctgctgtcctggaagcagcaggtgcagaagctgttccgctccttccccaggaagaccctgctggacatcagcggctaccggcagcagaggaacagaggatttggccagagcaacagcctgcccacagctggctctgtgggcggcggcatgggcagaagaaacccccggcagtaccagatccccagcagaaatgtgcccagcgcccggctgggcctgctgggcaccagcggctttgtgagcagcaaccagaggaacaccacagccacccccaccatcatgaagcagggccggcagaacctgtggtttgccaaccctgggggcagcaacagcatgcccagcaggacccacagctctgtgcagaggaccaggagcctgcctgtgcacaccagcccccagaacatgctgatgttccagcagcctgagttccagctgcctgtgacagagccagacatcaacaaccggctggagagcctgtgcctgtccatgacagagcacgccctgggagatggagtggacaggaccagcaccatctag

SEQ ID NO: 171773 - DNA, 2157 bp, synthetic construct; identical to SEQ ID NO: 171772
  misc_feature 1..2157: note = Description of Artificial Sequence: Synthetic coding sequence
  source 1..2157: mol_type = other DNA

SEQ ID NO: 171774 - DNA, 1038 bp, synthetic construct
  misc_feature 1..1038: note = Description of Artificial Sequence: Synthetic coding sequence
  source 1..1038: mol_type = other DNA
atgatcctgacccccatcaaggcctacagcagccccagcaccaccccagaggcccggcggcgggagccccaggccccccggcagcccagcctgatgggccctgagagccagagcccagactgcaaggatggagctgctgccaccggggccacagccaccccatctgctggggccagcggcggcctgcagccccaccagctgagcagctgtgatggagagctggccgtggcccccctgcctgagggggacctgcccggccagttcaccagggtgatgggcaaggtgtgcacccagctgctggtgtccaggccagatgaggagaacatcagcagctacctgcagctgattgacaagtgcctgatccacgaggccttcacagagacccagaagaagaggctgctgtcctggaagcagcaggtgcagaagctgttccgctccttccccaggaagaccctgctggacatcagcggctaccggcagcagaggaacagaggcttcggccagagcaacagcctgcccacagctggctctgtgggcggcggcatgggcagaagaaacccccggcagtaccagatccccagcagaaatgtgcccagcgcccggctgggcctgctgggcaccagcggctttgtgagcagcaaccagaggaacaccacagccacccccaccatcatgaagcagggccggcagaacctgtggtttgccaaccctgggggcagcaacagcatgcccagcaggacccacagctctgtgcagaggaccaggagcctgcctgtgcacaccagcccccagaacatgctgatgttccagcagcccggcagccaggtgcacagcggcctgtgcctgacagacctgcggggctggctgagcctgagcggggcccccagcatgcctgccctgactgtgcccaagagcagccagggcgagttccagctgcctgtgacagagccagacatcaacaaccggctggagagcctgtgcctgtccatgacagaacatgccctgggagatggagtggacaggaccagcaccatctag

SEQ ID NO: 171775 - DNA, 981 bp, synthetic construct
  misc_feature 1..981: note = Description of Artificial Sequence: Synthetic coding sequence
  source 1..981: mol_type = other DNA
atggccggccccaaccagctgtgcatccgccgctggaccaccaagcacgtggccgtgtggctgaaggatgagggcttctttgaatatgtggacatcctgtgcaacaagcaccggctggatggcatcaccctgctgaccctgacagaatatgacctgcggagcccccccctggagatcaaggtgctgggggacatcaagaggctgatgctgtctgtgaggaagctgcagaagatccacattgatgtgctggaggagatgggctacaacagcgacagccccatgggctccatgacccccttcatcagcgccctgcagagcacagactggctgtgcaatggagagctgagccatgactgtgatggccccatcacagacctgaacagcgaccagtaccagtacatgaatggcaagaacaagcacagcgtgcggcggctggaccctgagtactggaagaccatcctgagctgcatctacgtgttcatcgtgtttggcttcaccagcttcatcatggtgattgtgcatgagcgggtgcctgacatgcagacctacccacccctgcctgacatcttcctggacagcgtgccccgcatcccctgggcctttgccatgacagaggtgtgtggcatgatcctgtgctacatctggctgctggtgctgctgctgcacaagcacaggagcatcctgctgcggcggctgtgcagcctgatgggcaccgtcttcctgctgcgctgcttcaccatgtttgtgaccagcctgtctgtgcccggccagcacctgcagtgcaccgggaagatctacggctctgtgtgggagaagctgcaccgggcctttgccatctggagcggcttcggcatgaccctgactggagtgcacacctgtggggactacatgttttctggccacacagtggtgctgaccatgctgaacttctttgtgacagagtgcaagtacctgttcagcgcctccatgaggatcagatag

SEQ ID NO: 171776 - DNA, 1437 bp, synthetic construct
  misc_feature 1..1437: note = Description of Artificial Sequence: Synthetic coding sequence
  source 1..1437: mol_type = other DNA
atgcctgcccggagccgccaccggccccggctgcacagcggcagccccccccgggcccctcctccacccctggaggccctgcacagcggggaggccggccgggccccagacagtgatggcggcagtgatgctgacagcgaggtgggccctggcagccccaccaggacagctgaggccgctgaggaggagatggccggccccaaccagctgtgcatccgccgctggaccaccaagcacgtggccgtgtggctgaaggatgagggcttctttgaatatgtggacatcctgtgcaacaagcaccggctggatggcatcaccctgctgaccctgacagaatatgacctgcggagcccccccctggagatcaaggtgctgggggacatcaagaggctgatgctgtctgtgaggaagctgcagaagatccacattgatgtgctggaggagatgggctacaacagcgacagccccatgggctccatgacccccttcatcagcgccctgcagagcacagactggctgtgcaatggagagctgagccatgactgtgatggccccatcacagacctgaacagcgaccagtaccagtacatgaatggcaagaacaagcacagcgtgcggcggctggaccctgagtactggaagaccatcctgagctgcatctacgtgttcatcgtgtttggcttcaccagcttcatcatggtgattgtgcatgagcgggtgcctgacatgcagacctacccacccctgcctgacatcttcctggacagcgtgccccgcatcccctgggcctttgccatgacagaggtgtgtggcatgatcctgtgctacatctggctgctggtgctgctgctgcacaagcacaggagcatcctgctgcggcggctgtgcagcctgatgggcaccgtcttcctgctgcgctgcttcaccatgtttgtgaccagcctgtctgtgcccggccagcacctgcagtgcaccgggaagatctacggctctgtgtgggagaagctgcaccgggcctttgccatctggagcggcttcggcatgaccctgactggagtgcacacctgtggggactacatgttcagcggccacacagtggtgctgaccatgctgaacttctttgtgacagagtacacccccaggtcctggaacttcctgcacaccctgtcctgggtgctgaacctgtttggcatcttcttcatcctggccgcccacgagcactacagcattgatgtgttcatcgccttctacatcaccaccaggctcttcctgtactaccacaccctggccaacacccgggcctaccagcagagcagaagagcccgcatctggttccccatgttctccttctttgagtgcaatgtgaatggcaccgtgcccaatgagtactgctggcccttcagcaagccagccatcatgaagaggctgattggatag

SEQ ID NO: 171777 - DNA, 765 bp, synthetic construct
  misc_feature 1..765: note = Description of Artificial Sequence: Synthetic coding sequence
  source 1..765: mol_type = other DNA
atggccggccccaaccagctgtgcatccgccgctggaccaccaagcacgtggccgtgtggctgaaggatgagggcttctttgaatatgtggacatcctgtgcaacaagcaccggctggatggcatcaccctgctgaccctgacagaatatgacctgcggagcccccccctggagatcaaggtgctgggggacatcaagaggctgatgctgtctgtgaggaagctgcagaagatccacattgatgtgctggaggagatgggctacaacagcgacagccccatgggctccatgacccccttcatcagcgccctgcagagcacagactggctgtgcaatggagagctgagccatgactgtgatggccccatcacagacctgaacagcgaccagtaccagtacatgaatggcaagaacaagcacagcgtgcggcggctggaccctgagtactggaagaccatcctgagctgcatctacgtgttcatcgtgtttggcttcaccagcttcatcatggtgattgtgcatgagcgggtgcctgacatgcagacctacccacccctgcctgacatcttcctggacagcgtgccccgcatcccctgggcctttgccatgacagaggtgtgtggcatgatcctgtgctacatctggctgctggtgctgctgctgcacaagcacaggagcatcctgctgcggcggctgtgcagcctgatgggcaccgtcttcctgctgcgctgcttcaccatgtttgtgaccagcctgtctgtgtag

SEQ ID NO: 171778 - DNA, 1248 bp, synthetic construct
  misc_feature 1..1248: note = Description of Artificial Sequence: Synthetic coding sequence
  source 1..1248: mol_type = other DNA
atggccggccccaaccagctgtgcatccgccgctggaccaccaagcacgtggccgtgtggctgaaggatgagggcttctttgaatatgtggacatcctgtgcaacaagcaccggctggatggcatcaccctgctgaccctgacagaatatgacctgcggagcccccccctggagatcaaggtgctgggggacatcaagaggctgatgctgtctgtgaggaagctgcagaagatccacattgatgtgctggaggagatgggctacaacagcgacagccccatgggctccatgacccccttcatcagcgccctgcagagcacagactggctgtgcaatggagagctgagccatgactgtgatggccccatcacagacctgaacagcgaccagtaccagtacatgaatggcaagaacaagcacagcgtgcggcggctggaccctgagtactggaagaccatcctgagctgcatctacgtgttcatcgtgtttggcttcaccagcttcatcatggtgattgtgcatgagcgggtgcctgacatgcagacctacccacccctgcctgacatcttcctggacagcgtgccccgcatcccctgggcctttgccatgacagaggtgtgtggcatgatcctgtgctacatctggctgctggtgctgctgctgcacaagcacaggagcatcctgctgcggcggctgtgcagcctgatgggcaccgtcttcctgctgcgctgcttcaccatgtttgtgaccagcctgtctgtgcccggccagcacctgcagtgcaccgggaagatctacggctctgtgtgggagaagctgcaccgggcctttgccatctggagcggcttcggcatgaccctgactggagtgcacacctgtggggactacatgttttctggccacacagtggtgctgaccatgctgaacttctttgtgacagagtacacccccaggtcctggaacttcctgcacaccctgtcctgggtgctgaacctgtttggcatcttcttcatcctggccgcccacgagcactacagcattgatgtgttcatcgccttctacatcaccaccaggctcttcctgtactaccacaccctggccaacacccgggcctaccagcagagccggcgggcccgcatctggttccccatgttctccttctttgaatgtaatgtgaatggaacagtgcccaatgagtactgctggcccttcagcaagccagccatcatgaagaggctcatcggctag

SEQ ID NO: 171779 - DNA, 4770 bp, synthetic construct
  misc_feature 1..4770: note = Description of Artificial Sequence: Synthetic coding sequence
  source 1..4770: mol_type = other DNA
atggccaagcagctgaacctgcctgaaaatacagatgactggaccaaggaggatgtgaaccagtggctggagagccacaagattgaccagaagcaccgggagatcctgacagagcaggatgtgaatggagctgtgctgaagtggctgaagaaggagcacctggtggacatgggcatcacccacggccctgccatccagatcgaggagctgttcaaggagctgaggaagacagccatcgaggacagcatccagaccagcaagatgggcaagcccagcaagaatgcccccaaggaccagacagtgtcccagaaggagcggcgggagaccagcaagcagaagcagaagggcaaggagaacccagacatggccaaccccagcgccatgagcaccacagccaagggcagcaagagcctgaaggtggagctgattgaggacaagattgactacaccaaggagcggcagcccagcattgacctgacctgtgtgtcctacccctttgatgagttcagcaacccctaccgctacaagctggacttcagcctgcagcctgagactggacctggcaacctgattgaccccatccacgagttcaaggccttcaccaacacagccacagccacagaagaagatgtgaagatgaagttcagcaatgaggtgttccgctttgccagcgcctgcatgaacagcaggaccaacggcaccatccactttggagtgaaggacaagccccacggcaagatcgtgggcatcaaggtgaccaatgacaccaaggaggccctgatcaaccacttcaacctgatgatcaacaagtactttgaggaccaccaggtgcagcaggccaagaagtgcatccgggagcccaggtttgtggaggtgctgctgcccaacagcaccctgagtgacagatttgtgattgaggtggacatcatcccccagttcagcgagtgccagtatgactacttccagatcaagatgcagaactacaacaacaagatctgggagcagagcaagaagttcagcctgtttgtgagagatggcaccagcagcaaggacatcaccaagaacaaggtggacttccgggccttcaaggctgacttcaagaccctggccgagagcaggaaggctgctgaggagaagttccgggccaagaccaacaagaaggagcgggagggccccaagctggtgaagctgctgactggaaaccaggacctgctggacaacagctactatgagcagtacatcctggtgaccaacaagtgccacccagaccagaccaagcacctggacttcctgaaggagatcaagtggtttgctgtgctggagtttgatcctgagagcaacatcaatggagtggtgaaggcctacaaggagagccgggtggccaacctgcacttccccagcgtgtatgtggagcagaagaccaccccaaatgagaccatcagcaccctgaacctgtaccaccagcccagctggatcttctgcaatggccgcctggacctggacagcgagaagtacaagccctttgaccccagctcctggcagcgggagcgggccagtgatgtgaggaagctgatctccttcctgacccatgaggacatcatgccccggggcaagttcctggtggtgttcctgctgctgagctctgtggatgacccccgggaccccctgattgagaccttctgtgccttctaccaggacctgaagggcatggagaacatcctgtgcatctgtgtgcacccccacatcttccagggctggaaggacctgctggaggcccggctcatcaagcaccaggatgagatcagcagccagtgcatcagcgccctgagcctggaggagatcaatggcaccatcctgaagctgaagtctgtgacccagagcagcaagaggctgctgcccagcatcggcctgagcacagtgctgctgaagaaggaggaggacatcatgacagccctggagatcatctgtgaaaatgaatgtgagggcaccctgctggagaaggacaagaacaagttcctggagttcaaggccagcaaggaggaggacttctaccggggcggcaaggtgtcctggtggaacttctacttcagcagcgagagctacagcagcccctttgtgaagagggacaagtatgagcggctggaggccatgatccagaactgtgccgacagcagcaagcccaccagcaccaagatcatccacctgtaccaccaccctggctgcggcggcaccaccctggccatgcacatcctgtgggagctgaggaagaagttccgctgtgctgtgctgaagaacaagacagtggacttcagcgagattggagagcaggtgaccagcctcatcacctatggagccatgaaccggcaggagtatgtgcctgtgctgctgctggtggatgactttgaggagcaggacaacgtgtacctgctgcagtacagcatccagacagccatcgccaagaagtacatccgctatgagaagcccctggtgatcatcctgaactgcatgaggagccagaaccctgagaagagcgcccgcatcccagacagcattgctgtgatccagcagctgagccccaaggagcagagggcctttgagctgaagctgaaggagatcaaggagcagcacaagaactttgaggacttctacagcttcatgatcatgaagaccaacttcaacaaggagtacattgaaaatgtggtgaggaacatcctgaagggccagaacatcttcaccaaggaggccaagctgttctccttcctggccctgctgaacagctatgtgcctgacaccaccatcagcctgagccagtgtgagaagttcctgggcatcggcaacaagaaggccttctggggcacagagaagtttgaggacaagatgggcacctacagcaccatcctgatcaagacagaggtgattgaatgtggcaactactgcggcgtgcgcatcatccacagcctgattgctgagttcagcctggaggagctgaagaagagctaccacctgaacaagagccagatcatgctggacatgctgacagagaacctcttctttgacaccggcatgggcaagagcaagttcctgcaggacatgcacaccctgctgctgaccaggcacagagatgaacatgaaggagaaacaggcaactggttcagccccttcatcgaggccctgcacaaggatgagggcaatgaggccgtggaggccgtgctgctggagagcatccaccgcttcaaccccaatgccttcatctgccaggccctggcccggcacttctacatcaagaagaaggactttggaaatgccctgaactgggccaagcaggccaagatcatcgagccagacaacagctacatcagtgacaccctgggccaggtgtacaagagcaagatccgctggtggattgaagaaaatggaggaaatggaaacatctctgtggatgacctgattgccctgctggacctggccgagcacgccagcagcgccttcaaggagagccagcagcagagtgaagatcgggagtatgaggtgaaggagcggctgtaccccaagagcaagagaagatatgacacctacaacattgctggctaccagggcgagattgaggtgggcctgtacaccatccagatcctgcagctgatccccttctttgacaacaagaatgagctgagcaagcgctacatggtgaactttgtgtctggcagcagtgacatccctggggaccccaacaatgagtacaagctggccctgaagaactacatcccctacctgaccaagctgaagttcagcctgaagaagagctttgacttctttgatgagtactttgtgctgctgaagcccaggaacaacatcaagcagaatgaggaggccaagaccaggaggaaggtggccggctacttcaagaagtatgtggacatcttctgcctgctggaggagagccagaacaacacaggcctgggcagcaagttcagcgagcccctgcaggtggagcgctgcagaagaaacctggtggccctgaaggctgacaagttcagcggcctgctggagtacctgatcaagagccaggaggatgccatcagcaccatgaagtgcatcgtgaatgagtacaccttcctgctggagcagtgcaccgtgaagatccagagcaaggagaagctgaacttcatcctggccaacatcatcctgagctgcatccagcccaccagccggctggtgaagcctgtggagaagctgaaggaccagctgcgggaggtgctgcagcccatcggcctgacctaccagttcagcgagccctacttcctggccagcctgctcttctggccagagaaccagcagctggaccagcacagcgagcagatgaaggagtatgcccaggccctgaagaacagcttcaagggccagtacaagcacatgcacaggaccaagcagcccatcgcctacttcttcctgggcaagggcaagaggctggagcggctggtgcacaagggcaagattgaccagtgcttcaagaagaccccagacatcaacagcctgtggcagagcggagatgtgtggaaggaggagaaggtgcaggagctgctgctgcggctgcagggccgggcagagaacaactgcctgtacattgaatatggcatcaatgagaagatcaccatccccatcaccccagccttcctgggccagctgcggagcggccgcagcattgagaaggtgtccttctacctgggcttcagcatcggcggccccctggcctatgacatcgagatcgtgtag

SEQ ID NO: 171780 - DNA, 3852 bp, synthetic construct
  misc_feature 1..3852: note = Description of Artificial Sequence: Synthetic coding sequence
  source 1..3852: mol_type = other DNA
atggccaagcagctgaacctgcctgaaaatacagatgactggaccaaggaggatgtgaaccagtggctggagagccacaagattgaccagaagcaccgggagatcctgacagagcaggatgtgaatggagctgtgctgaagtggctgaagaaggagcacctggtggacatgggcatcacccacggccctgccatccagatcgaggagctgttcaaggagctgaggaagacagccatcgaggacagcatccagaccagcaagatgggcaagcccagcaagaatgcccccaaggaccagacagtgtcccagaaggagcggcgggagaccagcaagcagaagcagaagggcaaggagaacccagacatggccaaccccagcgccatgagcaccacagccaagggcagcaagagcctgaaggtggagctgattgaggacaagattgactacaccaaggagcggcagcccagcattgacctgacctgtgtgtcctacccctttgatgagttcagcaacccctaccgctacaagctggacttcagcctgcagcctgagactggacctggcaacctgattgaccccatccacgagttcaaggccttcaccaacacagccacagccacagaagaagatgtgaagatgaagttcagcaatgaggtgttccgctttgccagcgcctgcatgaacagcaggaccaacggcaccatccactttggagtgaaggacaagccccacggcaagatcgtgggcatcaaggtgaccaatgacaccaaggaggccctgatcaaccacttcaacctgatgatcaacaagtactttgaggaccaccaggtgcagcaggccaagaagtgcatccgggagcccaggtttgtggaggtgctgctgcccaacagcaccctgagtgacagatttgtgattgaggtggacatcatcccccagttcagcgagtgccagtatgactacttccagatcaagatgcagaactacaacaacaagatctgggagcagagcaagaagttcagcctgtttgtgagagatggcaccagcagcaaggacatcaccaagaacaaggtggacttccgggccttcaaggctgacttcaagaccctggccgagagcaggaaggctgctgaggagaagttccgggccaagaccaacaagaaggagcgggagggccccaagctggtgaagctgctgactggaaaccaggacctgctggacaacagctactatgagcagtacatcctggtgaccaacaagtgccacccagaccagaccaagcacctggacttcctgaaggagatcaagtggtttgctgtgctggagtttgatcctgagagcaacatcaatggagtggtgaaggcctacaaggagagccgggtggccaacctgcacttccccagcgtgtatgtggagcagaagaccaccccaaatgagaccatcagcaccctgaacctgtaccaccagcccagctggatcttctgcaatggccgcctggacctggacagcgagaagtacaagccctttgaccccagctcctggcagcgggagcgggccagtgatgtgaggaagctgatctccttcctgacccatgaggacatcatgccccggggcaagttcctggtggtgttcctgctgctgagctctgtggatgacccccgggaccccctgattgagaccttctgtgccttctaccaggacctgaagggcatggagaacatcctgtgcatctgtgtgcacccccacatcttccagggctggaaggacctgctggaggcccggctcatcaagcaccaggatgagatcagcagccagtgcatcagcgccctgagcctggaggagatcaatggcaccatcctgaagctgaagtctgtgacccagagcagcaagaggctgctgcccagcatcggcctgagcacagtgctgctgaagaaggaggaggacatcatgacagccctggagatcatctgtgaaaatgaatgtgagggcaccctgctggagaaggacaagaacaagttcctggagttcaaggccagcaaggaggaggacttctaccggggcggcaaggtgtcctggtggaacttctacttcagcagcgagagctacagcagcccctttgtgaagagggacaagtatgagcggctggaggccatgatccagaactgtgccgacagcagcaagcccaccagcaccaagatcatccacctgtaccaccaccctggctgcggcggcaccaccctggccatgcacatcctgtgggagctgaggaagaagttccgctgtgctgtgctgaagaacaagacagtggacttcagcgagattggagagcaggtgaccagcctcatcacctatggagccatgaaccggcaggagtatgtgcctgtgctgctgctggtggatgactttgaggagcaggacaacgtgtacctgctgcagtacagcatccagacagccatcgccaagaagtacatccgctatgagaagcccctggtgatcatcctgaactgcatgaggagccagaaccctgagaagagcgcccgcatcccagacagcattgctgtgatccagcagctgagccccaaggagcagagggcctttgagctgaagctgaaggagatcaaggagcagcacaagaactttgaggacttctacagcttcatgatcatgaagaccaacttcaacaaggagtacattgaaaatgtggtgaggaacatcctgaagggccagaacatcttcaccaaggaggccaagctgttctccttcctggccctgctgaacagctatgtgcctgacaccaccatcagcctgagccagtgtgagaagttcctgggcatcggcaacaagaaggccttctggggcacagagaagtttgaggacaagatgggcacctacagcaccatcctgatcaagacagaggtgattgaatgtggcaactactgcggcgtgcgcatcatccacagcctgattgctgagttcagcctggaggagctgaagaagagctaccacctgaacaagagccagatcatgctggacatgctgacagagaacctcttctttgacaccggcatgggcaagagcaagttcctgcaggacatgcacaccctgctgctgaccaggcacagagatgaacatgaaggagaaacaggcaactggttcagccccttcatcgaggccctgcacaaggatgagggcaatgaggccgtggaggccgtgctgctggagagcatccaccgcttcaaccccaatgccttcatctgccaggccctggcccggcacttctacatcaagaagaaggactttggaaatgccctgaactgggccaagcaggccaagatcatcgagccagacaacagctacatcagtgacaccctgggccaggtgtacaagagcaagatccgctggtggattgaagaaaatggaggaaatggaaacatctctgtggatgacctgattgccctgctggacctggccgagcacgccagcagcgccttcaaggagagccagcagcagagtgaagatcgggagtatgaggtgaaggagcggctgtaccccaagagcaagagaagatatgacacctacaacattgctggctaccagggcgagattgaggtgggcctgtacaccatccagatcctgcagctgatccccttctttgacaacaagaatgagctgagcaagcgctacatggtgaactttgtgtctggcagcagtgacatccctggggaccccaacaatgagtacaagctggccctgaagaactacatcccctacctgaccaagctgaagttcagcctgaagaagagctttgacttctttgatgagtactttgtgctgctgaagcccaggaacaactag

SEQ ID NO: 171781 - DNA, 4755 bp, synthetic construct
  misc_feature 1..4755: note = Description of Artificial Sequence: Synthetic coding sequence
  source 1..4755: mol_type = other DNA
atgagcaagcaggtgtccctgcctgagatgatcaaggactggaccaaggagcacgtgaagaagtgggtgaatgaagacctgaagatcaatgagcagtatggccagatcctgctgtctgaggaggtgacaggcctggtgctgcaggagctgacagagaaggacctggtggagatgggcctgccctggggccctgccctgctgatcaagaggagctacaacaagctgaacagcaagagccctgagagtgacaaccacgaccccggccagctggacaacagcaagcccagcaagacagagcaccagaagaaccccaagcacaccaagaaggaggaggagaacagcatgagcagcaacattgattatgacccccgggagatccgggacatcaagcaggaggagagcatcctgatgaaggaaaatgtgctggatgaggtggccaatgccaagcacaagaagaagggcaagctgaagccagagcagctgacctgcatgccctacccctttgaccagttccatgacagccaccgctacatcgagcactacaccctgcagcctgagactggagccctgaacctgattgaccccatccacgagttcaaggccctgaccaacacagaaacagccacagaggtggacatcaagatgaagttcagcaatgaggtgttccgctttgccagcgcctgcatgaacagcaggaccaacggcaccatccactttggagtgaaggacaagccccacggggagatcgtgggcgtgaagatcaccagcaaggccgccttcatcgaccacttcaacgtgatgatcaagaagtactttgaggagagcgagatcaatgaggccaagaagtgcatccgggagcccaggtttgtggaggtgctgctgcagaacaacacccccagcgacagatttgtgattgaggtggacaccatccccaagcacagcatctgcaatgacaagtacttctacatccagatgcagatctgcaaggacaagatctggaagcagaaccagaacctgagcctgtttgtgcgggagggcgccagcagccgggacatcctggccaacagcaagcagagagatgtggacttcaaggccttcctgcagaacctgaagagcctggtggccagcaggaaggaggccgaggaggagtatggcatgaaggccatgaagaaggagagcgagggcctgaagctggtgaagctgctgattggcaacagagacagcctggacaacagctactatgactggtacatcctggtgaccaacaagtgccaccccaaccagatcaagcacctggacttcctgaaggagatcaagtggtttgctgtgctggagtttgatcctgagagcatgatcaatggagtggtgaaggcctacaaggagagccgggtggccaacctgcacttccccaaccagtatgaggacaagaccaccaacatgtgggagaagatcagcaccctgaacctgtaccagcagcccagctggatcttctgcaatggccgcagtgacctgaagtctgagacctacaagcccctggagccccacctgtggcagcgggagcgggccagcgaggtgaggaagctgatcctcttcctgacagatgagaacatcatgacccggggcaagttcctggtggtgttcctgctgctgagctctgtggagagccctggggaccccctgattgagaccttctgggccttctaccaggccctgaagggcatggagaacatgctgtgcatctctgtgaacagccacatctaccagcgctggaaggacctgctgcagaccaggatgaagatggaggatgagctgaccaaccacagcatcagcaccctgaacatcgagctggtgaacagcaccatcctgaagctgaagtctgtgaccaggagcagccgccgcttcctgcctgcccggggcagcagcagcgtcatcctggagaagaagaaggaggatgtgctgacagccctggagatcctgtgtgaaaatgaatgtacagaaacagacatcgagaaggacaagagcaagttcctggagttcaagaagagcaaggaggagcacttctaccggggcggcaaggtgtcctggtggaacttctacttcagcagcgagaactacagcagtgactttgtgaagagggacagctatgagaagctgaaggacctgatccactgctgggccgagagccccaagcccatctttgccaagatcatcaacctgtaccaccaccctggctgcggcggcaccaccctggccatgcacgtgctgtgggacctgaagaagaacttccgctgtgctgtgctgaagaacaagaccacagactttgctgagattgctgagcaggtgatcaacctggtgacctaccgggccaagagccaccaggactacatccctgtgctgctgctggtggatgactttgaggagcaggagaatgtgtacttcctgcagaatgccatccacagcgtgctggccgagaaggacctgcgctatgagaagaccctggtgatcatcctgaactgcatgaggagcagaaatccagatgagagcgccaagctggccgacagcatcgccctgaactaccagctgagcagcaaggagcagagggcctttggagccaagctgaaggagattgagaagcagcacaagaactgtgagaacttctacagcttcatgatcatgaagagcaactttgatgagacctacattgaaaatgtggtgaggaacatcctgaagggccaggatgtggacagcaaggaggcccagctgatctccttcctggccctgctgagcagctatgtgacagacagcaccatctctgtgtcccagtgtgagatcttcctgggcatcatctacaccagcaccccctgggagcctgagagcctggaggacaagatgggcacctacagcaccctgctgatcaagacagaggtggccgagtatggccgctacacaggagtgcgcatcatccaccccctcatcgccctgtactgcctgaaggagctggagaggagctaccacctggacaagtgccagatcgccctgaacatcctggaggagaacctcttctatgacagcggcatcggccgggacaagttccagcatgatgtgcagaccctgctgctgacccggcagaggaaggtgtatggagatgaaacagacaccctcttcagccccctgatggaggccctgcagaacaaggacatcgagaaggtgctgtctgctggcagccgccgcttcccccagaatgccttcatctgccaggccctggcccggcacttctacatcaaggagaaggacttcaacacagccctggactgggcccggcaggccaagatgaaggcccccaagaacagctacatcagtgacaccctgggccaggtgtacaagtctgagatcaagtggtggctggatggcaacaagaactgccgcagcatcaccgtgaatgacctgacccacctgctggaggccgctgagaaggccagccgggccttcaaggagagccagaggcagacagacagcaagaactatgaaacagagaactggagcccccagaagagccagaggagatatgacatgtacaacacagcctgcttcctgggggagattgaggtgggcctgtacaccatccagatcctgcagctgacccccttcttccacaaggaaaatgagctgagcaagaagcacatggtgcagttcctgagcggcaagtggaccatccccccagaccccagaaatgaatgctacctggccctgagcaagttcaccagccacctgaagaacctgcagagcgacctgaagcgctgctttgacttcttcatcgactacatggtgctgctgaagatgagatacacccagaaggagattgctgagatcatgctgagcaagaaggtgagccgctgcttcaggaagtacacagagctgttctgccacctggacccctgcctgctgcagagcaaggagagccagctgctgcaggaggagaactgcaggaagaagctggaggccctgcgggctgacagatttgctggcctgctggagtacctgaaccccaactacaaggatgccaccaccatggagagcatcgtgaatgaatatgccttcctgctgcagcagaacagcaagaagcccatgaccaatgagaagcagaacagcatcctggccaacatcatcctgagctgcctgaagcccaacagcaagctgatccagcccctgaccaccctgaagaagcagctgcgggaggtgctgcagtttgtgggcctgagccaccagtacccaggcccctacttcctggcctgcctgctcttctggccagagaaccaggagctggaccaggacagcaagctgattgagaagtatgtgagcagcctgaacagaagcttccggggccagtacaagaggatgtgccgcagcaagcaggccagcaccctcttctacctgggcaagaggaagggcctgaacagcatcgtgcacaaggccaagattgagcagtactttgacaaggcccagaacaccaacagcctgtggcacagcggagatgtgtggaagaagaatgaggtgaaggacctgctgcggcggctgaccggccaggccgagggcaagctgatctctgtggagtatggaacagaggagaagatcaagatccctgtgatctctgtgtacagcggccccctgcggagcggcaggaacatcgagcgggtgtccttctacctgggcttcagcattgagggccccctggcctatgacattgaagtcatctag

SEQ ID NO: 171782 - DNA, 1221 bp, synthetic construct
  misc_feature 1..1221: note = Description of Artificial Sequence: Synthetic coding sequence
  source 1..1221: mol_type = other DNA
atgagcaagcaggtgtccctgcctgagatgatcaaggactggaccaaggagcacgtgaagaagtgggtgaatgaagacctgaagatcaatgagcagtatggccagatcctgctgtctgaggaggtgacaggcctggtgctgcaggagctgacagagaaggacctggtggagatgggcctgccctggggccctgccctgctgatcaagaggagctacaacaagctgaacagcaagagccctgagagtgacaaccacgaccccggccagctggacaacagcaagcccagcaagacagagcaccagaagaaccccaagcacaccaagaaggaggaggagaacagcatgagcagcaacattgattatgacccccgggagatccgggacatcaagcaggaggagagcatcctgatgaaggaaaatgtgctggatgaggtggccaatgccaagcacaagaagaagctggaggccctgcgggctgacagatttgctggcctgctggagtacctgaaccccaactacaaggatgccaccaccatggagagcatcgtgaatgaatatgccttcctgctgcagcagaacagcaagaagcccatgaccaatgagaagcagaacagcatcctggccaacatcatcctgagctgcctgaagcccaacagcaagctgatccagcccctgaccaccctgaagaagcagctgcgggaggtgctgcagtttgtgggcctgagccaccagtacccaggcccctacttcctggcctgcctgctcttctggccagagaaccaggagctggaccaggacagcaagctgattgagaagtatgtgagcagcctgaacagaagcttccggggccagtacaagaggatgtgccgcagcaagcaggccagcaccctcttctacctgggcaagaggaagggcctgaacagcatcgtgcacaaggccaagattgagcagtactttgacaaggcccagaacaccaacagcctgtggcacagcggagatgtgtggaagaagaatgaggtgaaggacctgctgcggcggctgaccggccaggccgagggcaagctgatctctgtggagtatggaacagaggagaagatcaagatccctgtgatctctgtgtacagcggccccctgcggagcggcaggaacatcgagcgggtgtccttctacctgggcttcagcattgagggccccctggcctatgacattgaagtcatctag

SEQ ID NO: 171783 - DNA, 4755 bp, synthetic construct; identical to SEQ ID NO: 171781
  misc_feature 1..4755: note = Description of Artificial Sequence: Synthetic coding sequence
  source 1..4755: mol_type = other DNA

SEQ ID NO: 171784 - DNA, 213 bp, synthetic construct
  misc_feature 1..213: note = Description of Artificial Sequence: Synthetic coding sequence
  source 1..213: mol_type = other DNA
atgagcaagcaggtgtccctgcctgagatgatcaaggactggaccaaggagcacgtgaagaagtgggtgaatgaagacctgaagatcaatgagcagtatggccagatcctgctgtctgaggaggtgacaggcctggtgctgcaggagctgacagagaaggacctggtggagatgggcctgccctggggccctgccctgctgatcaagaggtag

SEQ ID NO: 171785 - DNA, 4755 bp, synthetic construct; identical to SEQ ID NO: 171781
  misc_feature 1..4755: note = Description of Artificial Sequence: Synthetic coding sequence
  source 1..4755: mol_type = other DNA

SEQ ID NO: 171786 - DNA, 213 bp, synthetic construct; identical to SEQ ID NO: 171784
  misc_feature 1..213: note = Description of Artificial Sequence: Synthetic coding sequence
  source 1..213: mol_type = other DNA

SEQ ID NO: 171787 - DNA, 213 bp, synthetic construct; identical to SEQ ID NO: 171784
  misc_feature 1..213: note = Description of Artificial Sequence: Synthetic coding sequence
  source 1..213: mol_type = other DNA

SEQ ID NO: 171788 - DNA, 213 bp, synthetic construct; identical to SEQ ID NO: 171784
  misc_feature 1..213: note = Description of Artificial Sequence: Synthetic coding sequence
  source 1..213: mol_type = other DNA

SEQ ID NO: 171789 - DNA, 957 bp, synthetic construct
  misc_feature 1..957: note = Description of Artificial Sequence: Synthetic coding sequence
  source 1..957: mol_type = other DNA
atggccccctgggccgaggccgagcacagcgccctgaaccccctgcgggctgtgtggctgaccctgacagctgccttcctgctgaccctgctgctgcagctgctgcccccaggcctgctgcccggctgtgccatcttccaggacctgatccgctatggcaagaccaagtgtggggagcccagcaggcctgctgcctgccgggcctttgatgtgcccaagcgctacttcagccacttctacatcatctctgtgctgtggaatggcttcctgctgtggtgcctgacccagagcctcttcctgggcgcccccttccccagctggctgcacggcctgctgcgcatcctgggcgccgcccagttccagggcggggagctggccctgagcgccttcctggtgctggtgttcctgtggctgcacagcctgcggcggctgtttgagtgcctgtatgtgtctgtgttcagcaatgtgatgattcatgtggtgcagtactgcttcggcctggtgtactacgtgctggtgggcctgactgtgctgagccaggtgcccatggatggaagaaatgcctacatcaccgggaagaacctgctgatgcaggcccgctggttccacatcctgggcatgatgatgttcatctggagcagcgcccaccagtacaagtgccacgtgatcctgggcaacctgaggaagaacaaggccggcgtggtgatccactgcaaccaccgcatcccctttggagactggtttgaatatgtgagcagccccaactacctggccgagctgatgatctacgtgtccatggctgtgaccttcggcttccacaacctgacctggtggctggtggtgaccaacgtgttcttcaaccaggccctgagcgccttcctgagccaccagttctacaagagcaagtttgtgtcctaccccaagcacaggaaggccttcctgcccttcctgttctag

SEQ ID NO: 171790 - DNA, 711 bp, synthetic construct
  misc_feature 1..711: note = Description of Artificial Sequence: Synthetic coding sequence
  source 1..711: mol_type = other DNA
atgacccgctgcccagctggccaggccgaggtggagatggccgagctgtatgtgaagccaggcaacaaggagcggggctggaatgaccccccccagttctcctatggcctgcagacccaggccggcggccccaggaggagcctgctgaccaagagggtggccgccccccaggacggcagcccccgggtgcctgccagcgagaccagccctggccccccacccatgggccccccaccacccagcagcaaggcccccaggagcccccctgtgggcagcggccctgccagcggcgtggagcccaccagcttccctgtggagagcgaggccgtgatggaggatgtgctgcggcccctggagcaggccctggaggactgccggggccacaccaggaagcaggtgtgtgatgacatcagccggcggctggccctgctgcaggagcagtgggccggcggcaagctgagcatccctgtgaagaagaggatggccctgctggtgcaggagctgagcagccaccgctgggatgctgctgatgacatccacaggagcctgatggtggaccacgtgacagaggtgtcccagtggatggtgggcgtgaagaggctgattgctgagaagaggagcctcttcagcgaggaggccgccaatgaggagaagtctgctgccacagctgagaagaaccacaccatccctggcttccagcaggccagctag

SEQ ID NO: 171791 - DNA, 681 bp, synthetic construct
  misc_feature 1..681: note = Description of Artificial Sequence: Synthetic coding sequence
  source 1..681: mol_type = other DNA
atggagggctgtgtgagcaacctgatggtgtgcaacctggcctacagcggcaagctggaggagctgaaggagagcatcctggccgacaagagcctggccaccaggacagaccaggacagcaggacagccctgcactgggcctgcagcgctggccacacagaaattgtggagttcctgctgcagctgggcgtgcctgtgaatgacaaggatgatgctggctggagccccctgcacatcgccgccagcgctggaagagatgagatcgtgaaggccctgctgggcaaaggagcccaggtgaatgctgtgaaccagaatggctgcacccccctgcactatgctgccagcaagaacagacatgaaattgctgtgatgctgctggagggcggggccaacccagatgccaaggaccactatgaggccacagccatgcacagagctgctgccaagggcaacctgaagatgatccacatcctgctgtactacaaggccagcaccaacatccaggacacagagggcaacacccccctgcacctggcctgtgatgaggagcgggtggaggaggccaagctgctggtgtcccagggcgccagcatctacatcgagaacaaggaggagaagacccccctgcaggtggccaagggcggcctgggcctcatcctgaagaggatggtggagggctag

SEQ ID NO: 171792 - DNA, 780 bp, synthetic construct
  misc_feature 1..780: note = Description of Artificial Sequence: Synthetic coding sequence
  source 1..780: mol_type = other DNA
atggccacagccactggagtggccgaggagcggctgctggccgccctggcctacctgcagtgtgctgtgggctgtgctgtgtttgccaggaaccggcagaccaacagcgtgtatggaagacatgccctgcccagccaccggctgcgggtgcctgcccgggccgcctgggtggtgcaggagctgcccagcctggccctgcccctgtaccagtatgccagcgagagcgccccccggctgcggagcgcccccaactgcatcctgctggccatgttcctggtgcactacggccaccgctgcctgatctaccccttcctgatgaggggcggcaagcccatgcccctgctggcctgcaccatggccatcatgttctgcacctgcaatggctacctgcagagccgctacctgagccactgtgctgtgtatgcagatgactgggtgacagacccccgcttcctgattggatttggcctgtggctgaccggcatgctgatcaacatccacagcgaccacatcctgaggaacctgaggaagccaggggacaccggctacaagatcccccggggcggcctgtttgaatatgtgacagctgccaactactttggagagatcatggagtggtgtggctacgccctggcctcctggagcgtgcagggcgccgcctttgccttcttcaccttctgcttcctgagcggccgggccaaggagcaccacgagtggtacctgaggaagtttgaggagtaccccaagttcaggaagatcatcatccccttcctgttctag

SEQ ID NO: 171793 - DNA, 585 bp, synthetic construct
  misc_feature 1..585: note = Description of Artificial Sequence: Synthetic coding sequence
  source 1..585: mol_type = other DNA
atggagcacgccgcccagccctggcgctggcagaggagaagaggctggaggagaagtgcctgctggcccaggagccccacctgcagcgccccctgggccgcccggagcagccgggccatcgtgcggaggacccagtgcacagctgccacccgctgcccagccactggaagtgagtgccggcggggccccccaggctggtgccgcagctgcccccgctggccctgccgcagcaccagcaccccagccagccccccccgggtgtctgctgcccggcccacagccagctcctggccctgcagcagcagcaccaccggcattggaaatgtgggcatgcaggccctggccgtgtgcctgcaccccaagtgccagcccatggtgcccatcgtgtgcccagacctgaaccacgacagcaagacccagcgggagattgctggcatccgctgcagctacagcctgctgggcaacacagctgccagccgccgcatccccaccagcctgatgacccagcacctgaatgcccacctgctggccaacacctgctttgctgtgaaccagtatgaggtgttcctgggcgtgctggcctag

SEQ ID NO: 171794 - DNA, 639 bp, synthetic construct
  misc_feature 1..639: note = Description of Artificial Sequence: Synthetic coding sequence
  source 1..639: mol_type = other DNA
atggagcacgccgcccagccctggcgctggcagaggagaagaggctggaggagaagtgcctgctggcccaggagccccacctgcagcgccccctgggccgcccggagcagccgggccatcgtgcggaggacccagtgcacagctgccacccgctgcccagccactggaagtgagtgccggcggggccccccaggctggtgccgcagctgcccccgctggccctgccgcagcaccagcaccccagccagccccccccgggtgtctgctgcccggcccacagccagctcctggccctgcagcagcagcaccaccggcatcggcttcggcctgtggctgaccggcatgctgatcaacatccacagcgaccacatcctgaggaacctgaggaagccaggggacaccggctacaagatcccccggggcggcctgtttgaatatgtgacagctgccaactactttggagagatcatggagtggtgtggctacgccctggcctcctggagcgtgcagggcgccgcctttgccttcttcaccttctgcttcctgagcggccgggccaaggagcaccacgagtggtacctgaggaagtttgaggagtaccccaagttcaggaagatcatcatccccttcctgttctag

SEQ ID NO: 171795 - DNA, 858 bp, synthetic construct
  misc_feature 1..858: note = Description of Artificial Sequence: Synthetic coding sequence
  source 1..858: mol_type = other DNA
atgctgctggccaccttcaagctgtgtgccggcagcagctaccgccacatgaggaacatgaagggcctgcggcagcaggccgtgatggccatcagccaggagctgaacagaagagccctgggcggccccacccccagcacctggatcaaccaggtgagaagaagaagcagcctgctgggcagccggctggaggagaccctgtacagcgaccaggagctggcctacctgcagcagggcgaggaggccatgcagaaggccctgggcatcctgagcaaccaggagggctggaagaaggagagccagcaggacaacggggacaaggtgatgagcaaggtggtgcctgatgtgggcaaggtgttccggctggaggtggtggtggaccagcccatggagcggctgtatgaggagctggtggagaggatggaggccatgggagagtggaaccccaacgtgaaggagatcaaggtgctgcagaagattggcaaggacaccttcatcacccatgagctggccgctgaggccgccggcaacctggtgggcccccgggactttgtgtctgtgcgctgtgccaagaggcggggcagcacctgtgtgctggccggcatggccacagactttggaaacatgcctgagcagaagggcgtcatccgggcagagcacggccccacctgcatggtgctgcaccccctggccggcagccccagcaagaccaagctgacctggctgctgagcattgacctgaagggctggctgcccaagagcatcatcaaccaggtgctgagccagacccaggtggactttgccaaccacctgaggaagaggctggagagccacccagccagcgaggcccgctgctag

SEQ ID NO: 171796 - DNA, 744 bp, synthetic construct
  misc_feature 1..744: note = Description of Artificial Sequence: Synthetic coding sequence
  source 1..744: mol_type = other DNA
atgctgctggccaccttcaagctgtgtgccggcagcagctaccgccacatgaggaacatgaagggcagccggctggaggagaccctgtacagcgaccaggagctggcctacctgcagcagggcgaggaggccatgcagaaggccctgggcatcctgagcaaccaggagggctggaagaaggagagccagcaggacaacggggacaaggtgatgagcaaggtggtgcctgatgtgggcaaggtgttccggctggaggtggtggtggaccagcccatggagcggctgtatgaggagctggtggagaggatggaggccatgggagagtggaaccccaacgtgaaggagatcaaggtgctgcagaagattggcaaggacaccttcatcacccatgagctggccgctgaggccgccggcaacctggtgggcccccgggactttgtgtctgtgcgctgtgccaagaggcggggcagcacctgtgtgctggccggcatggccacagactttggaaacatgcctgagcagaagggcgtcatccgggcagagcacggccccacctgcatggtgctgcaccccctggccggcagccccagcaagaccaagctgacctggctgctgagcattgacctgaagggctggctgcccaagagcatcatcaaccaggtgctgagccagacccaggtggactttgccaaccacctgaggaagaggctggagagccacccagccagcgaggcccgctgctag

SEQ ID NO: 171797 - DNA, 969 bp, synthetic construct
  misc_feature 1..969: note = Description of Artificial Sequence: Synthetic coding sequence
  source 1..969: mol_type = other DNA
atgagcagcagcccctgggagcccgccaccctgcggcgggtgtttgtggtgggcgtgggcatgaccaagtttgtgaagccaggagctgagaacagccgggactacccagacctggccgaggaggccggcaagaaggccctggctgatgcccagatcccctacagcgctgtggaccaggcctgtgtgggctacgtgtttggagtggccgagtgtgtgctggccctgggctttgagaagatgagcaagggcagcctgggcatcaagttcagtgacaggaccatccccacagacaagcacgtggacctgctgatcaacaagtatggcctgagcgcccaccctgtggccccccagatgtttggctacgccggcaaggagcacatggagaagtatggcaccaagattgagcactttgccaagattggctggaagaaccacaagcacagcgtgaacaacccctacagccagttccaggatgagtacagcctggatgaggtgatggccagcaaggaggtgtttgacttcctgaccatcctgcagtgctgccccaccagtgatggagctgctgctgccatcctggccagcgaggcctttgtgcagaagtatggcctgcagagcaaggctgtggagatcctggcccaggagatgatgacagacctgcccagcagctttgaggagaagagcatcatcaagatggtgggctttgacatgagcaaggaggccgccaggaaatgttatgagaagagcggcctgaccccaaatgacattgatgtgattgagctgcatgactgcttcagcaccaatgagctgctgacctatgaggccctgggcctgtgcccagagggccagggcgccaccctggtggacagaggagacaacacctacggcggcaagtgggtgatcaaccccagcggcggcctcatcagcaagggccaccccctgggcgccaccggcggccacagctgcagctag

SEQ ID NO: 171798 - DNA, 1644 bp, synthetic construct
  misc_feature 1..1644: note = Description of Artificial Sequence: Synthetic coding sequence
  source 1..1644: mol_type = other DNA
atgagcagcagcccctgggagcccgccaccctgcggcgggtgtttgtggtgggcgtgggcatgaccaagtttgtgaagccaggagctgagaacagccgggactacccagacctggccgaggaggccggcaagaaggccctggctgatgcccagatcccctacagcgctgtggaccaggcctgtgtgggctacgtgtttggagacagcacctgtggccagagggccatctaccacagcctgggcatgacaggcatccccatcatcaacgtgaacaacaactgtgccaccggcagcacagccctcttcatggcccggcagctgatccagggcggcgtggccgagtgtgtgctggccctgggctttgagaagatgagcaagggcagcctgggcatcaagttcagtgacaggaccatccccacagacaagcacgtggacctgctgatcaacaagtatggcctgagcgcccaccctgtggccccccagatgtttggctacgccggcaaggagcacatggagaagtatggcaccaagattgagcactttgccaagattggctggaagaaccacaagcacagcgtgaacaacccctacagccagttccaggatgagtacagcctggatgaggtgatggccagcaaggaggtgtttgacttcctgaccatcctgcagtgctgccccaccagtgatggagctgctgctgccatcctggccagcgaggcctttgtgcagaagtatggcctgcagagcaaggctgtggagatcctggcccaggagatgatgacagacctgcccagcagctttgaggagaagagcatcatcaagatggtgggctttgacatgagcaaggaggccgccaggaaatgttatgagaagagcggcctgaccccaaatgacattgatgtgattgagctgcatgactgcttcagcaccaatgagctgctgacctatgaggccctgggcctgtgcccagagggccagggcgccaccctggtggacagaggagacaacacctacggcggcaagtgggtgatcaaccccagcggcggcctcatcagcaagggccaccccctgggcgccaccggcctggcccagtgtgccgagctgtgctggcagctgcggggggaggccggcaagaggcaggtgcctggggccaaggtggccctgcagcacaacctgggcatcggcggcgctgtggtggtgaccctgtacaagatgggcttccctgaggccgccagcagcttccgcacccaccagattgaagctgtgcccaccagcagcgccagtgatggcttcaaggccaacctggtgttcaaggagattgagaagaagctggaggaggagggggagcagtttgtgaagaagattggaggcatctttgccttcaaggtgaaggatggccctgggggcaaggaggccacctgggtggtggatgtgaagaatggcaagggctctgtgctgcccaacagcgacaagaaggctgactgcaccatcaccatggctgacagcgacttcctggccctgatgaccgggaagatgaacccccagagcgccttcttccagggcaagctgaagatcaccggcaacatgggcctggccatgaagctgcagaacctgcagctgcagcctggaaatgccaagctgtag

SEQ ID NO: 171799 - DNA, 1572 bp, synthetic construct
  misc_feature 1..1572: note = Description of Artificial Sequence: Synthetic coding sequence
  source 1..1572: mol_type = other DNA
atgagcagcagcccctgggagcccgccaccctgcggcgggtgtttgtggtgggcgtgggcatgaccaagtttgtgaagccaggagctgagaacagccgggactacccagacctggccgaggaggccggggacagcacctgtggccagagggccatctaccacagcctgggcatgacaggcatccccatcatcaacgtgaacaacaactgtgccaccggcagcacagccctcttcatggcccggcagctgatccagggcggcgtggccgagtgtgtgctggccctgggctttgagaagatgagcaagggcagcctgggcatcaagttcagtgacaggaccatccccacagacaagcacgtggacctgctgatcaacaagtatggcctgagcgcccaccctgtggccccccagatgtttggctacgccggcaaggagcacatggagaagtatggcaccaagattgagcactttgccaagattggctggaagaaccacaagcacagcgtgaacaacccctacagccagttccaggatgagtacagcctggatgaggtgatggccagcaaggaggtgtttgacttcctgaccatcctgcagtgctgccccaccagtgatggagctgctgctgccatcctggccagcgaggcctttgtgcagaagtatggcctgcagagcaaggctgtggagatcctggcccaggagatgatgacagacctgcccagcagctttgaggagaagagcatcatcaagatggtgggctttgacatgagcaaggaggccgccaggaaatgttatgagaagagcggcctgaccccaaatgacattgatgtgattgagctgcatgactgcttcagcaccaatgagctgctgacctatgaggccctgggcctgtgcccagagggccagggcgccaccctggtggacagaggagacaacacctacggcggcaagtgggtgatcaaccccagcggcggcctcatcagcaagggccaccccctgggcgccaccggcctggcccagtgtgccgagctgtgctggcagctgcggggggaggccggcaagaggcaggtgcctggggccaaggtggccctgcagcacaacctgggcatcggcggcgctgtggtggtgaccctgtacaagatgggcttccctgaggccgccagcagcttccgcacccaccagattgaagctgtgcccaccagcagcgccagtgatggcttcaaggccaacctggtgttcaaggagattgagaagaagctggaggaggagggggagcagtttgtgaagaagattggaggcatctttgccttcaaggtgaaggatggccctgggggcaaggaggccacctgggtggtggatgtgaagaatggcaagggctctgtgctgcccaacagcgacaagaaggctgactgcaccatcaccatggctgacagcgacttcctggccctgatgaccgggaagatgaacccccagagcgccttcttccagggcaagctgaagatcaccggcaacatgggcctggccatgaagctgcagaacctgcagctgcagcctggaaatgccaagctgtag

SEQ ID NO: 171800 - DNA, 180 bp, synthetic construct
  misc_feature 1..180: note = Description of Artificial Sequence: Synthetic coding sequence
  source 1..180: mol_type = other DNA
atgggcttccctgaggccgccagcagcttccgcacccaccagattgaagctgtgcccaccagcagcgccagtgatggcttcaaggccaacctggtgttcaaggagattgagaagaagctggaggagatccggcggctgacagcccagagccagtggctgacccagacctcctggctgtag

SEQ ID NO: 171801 - DNA, 423 bp, synthetic construct
  misc_feature 1..423: note = Description of Artificial Sequence: Synthetic coding sequence
  source 1..423: mol_type = other DNA
atgggcttccctgaggccgcccggacccaccagatcgaggccgtgcccaccagcagcgccagtgatggcttcaaggccaacctggtgttcaaggagattgagaagaagctggaggaggagggggagcagtttgtgaagaagattggaggcatctttgccttcaaggtgaaggatggccctgggggcaaggaggccacctgggtggtggatgtgaagaatggaaaaggatctgtgctgcccaacagcgacaagaaggctgactgcaccatcaccatggctgacagcgacttcctggccctgatgaccgggaagatgaacccccagagcgccttcttccagggcaagctgaagatcactggaaacatgggcctggccatgaagctgcagaacctgcagctgcagcctggaaatgccaagctgtag

SEQ ID NO: 171802 - DNA, 432 bp, synthetic construct
  misc_feature 1..432: note = Description of Artificial Sequence: Synthetic coding sequence
  source 1..432: mol_type = other DNA
atgggcttccctgaggccgccagcagcttccgcacccaccagattgaagctgtgcccaccagcagcgccagtgatggcttcaaggccaacctggtgttcaaggagattgagaagaagctggaggaggagggggagcagtttgtgaagaagattggaggcatctttgccttcaaggtgaaggatggccctgggggcaaggaggccacctgggtggtggatgtgaagaatggcaagggctctgtgctgcccaacagcgacaagaaggctgactgcaccatcaccatggctgacagcgacttcctggccctgatgaccgggaagatgaacccccagagcgccttcttccagggcaagctgaagatcaccggcaacatgggcctggccatgaagctgcagaacctgcagctgcagcctggaaatgccaagctgtag

SEQ ID NO: 171803 - DNA, 180 bp, synthetic construct; identical to SEQ ID NO: 171800
  misc_feature 1..180: note = Description of Artificial Sequence: Synthetic coding sequence
  source 1..180: mol_type = other DNA

SEQ ID NO: 171804 - DNA, 1401 bp, synthetic construct
  misc_feature 1..1401: note = Description of Artificial Sequence: Synthetic coding sequence
  source 1..1401: mol_type = other DNA
atgacaggcatccccatcatcaacgtgaacaacaactgtgccaccggcagcacagccctcttcatggcccggcagctgatccagggcggcgtggctgaatgtgtgctggccctgggctttgagaagatgagcaagggcagcctgggcatcaagttcagtgacaggaccatccccacagacaagcacgtggacctgctgatcaacaagtatggcctgagcgcccaccctgtggccccccagatgtttggctacgccggcaaggagcacatggagaagtatggcaccaagattgagcactttgccaagattggctggaagaaccacaagcacagcgtgaacaacccctacagccagttccaggatgagtacagcctggatgaggtgatggccagcaaggaggtgtttgacttcctgaccatcctgcagtgctgccccaccagtgatggagctgctgctgccatcctggccagcgaggcctttgtgcagaagtatggcctgcagagcaaggctgtggagatcctggcccaggagatgatgacagacctgcccagcagctttgaggagaagagcatcatcaagatggtgggctttgacatgagcaaggaggccgccaggaagtgctatgagaagagcggcctgaccccaaatgacattgatgtgattgagctgcatgactgcttcagcaccaatgagctgctgacctatgaggccctgggcctgtgcccagagggccagggcgccaccctggtggacagaggagacaacacctatggaggcaagtgggtgatcaaccccagcggcggcctcatcagcaagggccaccccctgggcgccaccggcctggcccagtgtgccgagctgtgctggcagctgcggggggaggccggcaagaggcaggtgcctggggccaaggtggccctgcagcacaacctgggcattggaggagctgtggtggtgaccctgtacaagatgggcttccctgaggccgccagcagcttccgcacccaccagatcgaggccgtgcccaccagcagcgccagtgatggcttcaaggccaacctggtgttcaaggagattgagaagaagctggaggaggagggggagcagtttgtgaagaagattggaggcatctttgccttcaaggtgaaggatggccctgggggcaaggaggccacctgggtggtggatgtgaagaatggaaaaggatctgtgctgcccaacagcgacaagaaggctgactgcaccatcaccatggctgacagcgacttcctggccctgatgaccgggaagatgaacccccagagcgccttcttccagggcaagctgaagatcactggaaacatgggcctggccatgaagctgcagaacctgcagctgcagcctggaaatgccaagctgtag

SEQ ID NO: 171805 - DNA, 1512 bp, synthetic construct
  misc_feature 1..1512: note = Description of Artificial Sequence: Synthetic coding sequence
  source 1..1512: mol_type = other DNA
atgagcagcagcccctgggagcccgccaccctgcggcgggtgtttgtggtgggcgtgggcatgaccaagtttgtgaagccaggagctgagaacagccgggactacccagacctggccgaggaggccggcaagaaggccctggctgatgcccagatcccctacagcgctgtggaccaggcctgtgtgggctacgtgtttggagtggccgagtgtgtgctggccctgggctttgagaagatgagcaagggcagcctgggcatcaagttcagtgacaggaccatccccacagacaagcacgtggacctgctgatcaacaagtatggcctgagcgcccaccctgtggccccccagatgtttggctacgccggcaaggagcacatggagaagtatggcaccaagattgagcactttgccaagattggctggaagaaccacaagcacagcgtgaacaacccctacagccagttccaggatgagtacagcctggatgaggtgatggccagcaaggaggtgtttgacttcctgaccatcctgcagtgctgccccaccagtgatggagctgctgctgccatcctggccagcgaggcctttgtgcagaagtatggcctgcagagcaaggctgtggagatcctggcccaggagatgatgacagacctgcccagcagctttgaggagaagagcatcatcaagatggtgggctttgacatgagcaaggaggccgccaggaaatgttatgagaagagcggcctgaccccaaatgacattgatgtgattgagctgcatgactgcttcagcaccaatgagctgctgacctatgaggccctgggcctgtgcccagagggccagggcgccaccctggtggacagaggagacaacacctacggcggcaagtgggtgatcaaccccagcggcggcctcatcagcaagggccaccccctgggcgccaccggcctggcccagtgtgccgagctgtgctggcagctgcggggggaggccggcaagaggcaggtgcctggggccaaggtggccctgcagcacaacctgggcatcggcggcgctgtggtggtgaccctgtacaagatgggcttccctgaggccgccagcagcttccgcacccaccagattgaagctgtgcccaccagcagcgccagtgatggcttcaaggccaacctggtgttcaaggagattgagaagaagctggaggaggagggggagcagtttgtgaagaagattggaggcatctttgccttcaaggtgaaggatggccctgggggcaaggaggccacctgggtggtggatgtgaagaatggcaagggctctgtgctgcccaacagcgacaagaaggctgactgcaccatcaccatggctgacagcgacttcctggccctgatgaccgggaagatgaacccccagagcgccttcttccagggcaagctgaagatcaccggcaacatgggcctggccatgaagctgcagaacctgcagctgcagcctggaaatgccaagctgtag

SEQ ID NO: 171806 - DNA, 1653 bp, synthetic construct
  misc_feature 1..1653: note = Description of Artificial Sequence: Synthetic coding sequence
  source 1..1653: mol_type = other DNA
atggtgggggaggagaagatgagcctgaggaaccggctgagcaagagccgggagaaccctgaggaggatgaggaccagagaaatcctgccaaggagagcctggagacccccagcaatggaagaattgacatcaagcagctgattgccaagaagatcaagctgacagctgaggccgaggagctgaagcccttcttcatgaaggaggtgggcagccactttgatgactttgtgaccaacctgattgagaagagcgccagcctggacaatggaggctgtgccctgaccaccttctctgtgctggagggggagaagaacaaccaccgggccaaggacctgcgggcccctcctgagcagggcaagatcttcatcgcccggcgcagcctgctggatgagctgctggaggtggaccacatccgcaccatctaccacatgttcatcgccctgctgatcctcttcatcctgagcaccctggtggtggactacattgatgagggccgcctggtgctggagttcagcctgctgtcctatgccttcggcaagttccccaccgtggtgtggacctggtggatcatgttcctgagcaccttctctgtgccctacttcctgttccagcactgggccaccggctacagcaagagcagccaccccctcatccgcagcctcttccacggcttcctgttcatgatcttccagatcggcgtgctgggcttcggccccacctacgtggtgctggcctacaccctgcccccagccagccgcttcatcatcatctttgagcagatccgctttgtgatgaaggcccacagctttgtgagagaaaatgtgccccgggtgctgaacagcgccaaggagaagagcagcacagtgcccatccccaccgtgaaccagtacctgtacttcctgtttgcccccaccctcatctacagagacagctaccccaggaaccccaccgtgcgctggggctacgtggccatgaagtttgcccaggtgtttggctgcttcttctacgtgtactacatctttgagcggctgtgtgcccccctcttcaggaacatcaagcaggagcccttcagcgcccgggtgctggtgctgtgtgtgttcaacagcatcctgcccggggtgctgatcctcttcctgaccttctttgccttcctgcactgctggctgaatgcctttgctgagatgctgcgctttggagacaggatgttctacaaggactggtggaacagcaccagctacagcaactactaccgcacctggaatgtggtggtgcatgactggctgtactactatgcctacaaggacttcctgtggttcttcagcaagcgcttcaagtctgctgccatgctggccgtgtttgctgtgtctgctgtggtgcatgaatatgccctggccgtgtgcctgtccttcttctaccctgtgctgtttgtgctcttcatgttcttcggcatggccttcaacttcatcgtgaatgacagcaggaagaagcccatctggaatgtgctgatgtggaccagcctcttcctgggcaatggagtgctgctgtgcttctacagccaggagtggtacgcccggcagcactgccccctgaagaaccccaccttcctggactatgtgcggcccaggtcctggacctgccgctacgtgttctag

SEQ ID NO: 171807 - DNA, 783 bp, synthetic construct
  misc_feature 1..783: note = Description of Artificial Sequence: Synthetic coding sequence
  source 1..783: mol_type = other DNA
atggtgggggaggagaagatgagcctgaggaaccggctgagcaagagccgggagaaccctgaggaggatgaggaccagagaaatcctgccaaggagagcctggagacccccagcaatggaagaattgacatcaagcagctgattgccaagaagatcaagctgacagctgaggccgaggagctgaagcccttcttcatgaaggaggtgggcagccactttgatgactttgtgaccaacctgattgagaagagcgccagcctggacaatggaggctgtgccctgaccaccttctctgtgctggagggggagaagaacaaccaccgggccaaggacctgcgggcccctcctgagcagggcaagatcttcatcgcccggcgcagcctgctggatgagctgctggaggtggaccacatccgcaccatctaccacatgttcatcgccctgctgatcctcttcatcctgagcaccctggtggtggactacattgatgagggccgcctggtgctggagttcagcctgctgtcctatgccttcggcaagttccccaccgtggtgtggacctggtggatcatgttcctgagcaccttctctgtgccctacttcctgttccagcactgggccaccggctacagcaagagcagccaccccctcatccgcagcctcttccacggcttcctgttcatgatcttccagatcggcgtgctgggcttcggccccacctacgtggtgctggcctacaccctgcccccagccagccgcttcatcatcatctttgagcagtag

SEQ ID NO: 171808 - DNA, 861 bp, synthetic construct
  misc_feature 1..861: note = Description of Artificial Sequence: Synthetic coding sequence
  source 1..861: mol_type = other DNA
atgaaggcccacagctttgtgagagaaaatgtgccccgggtgctgaacagcgccaaggagaagagcagcacagtgcccatccccaccgtgaaccagtacctgtacttcctgtttgcccccaccctcatctacagagacagctaccccaggaaccccaccgtgcgctggggctacgtggccatgaagtttgcccaggtgtttggctgcttcttctacgtgtactacatctttgagcggctgtgtgcccccctcttcaggaacatcaagcaggagcccttcagcgcccgggtgctggtgctgtgtgtgttcaacagcatcctgcccggggtgctgatcctcttcctgaccttctttgccttcctgcactgctggctgaatgcctttgctgagatgctgcgctttggagacaggatgttctacaaggactggtggaacagcaccagctacagcaactactaccgcacctggaatgtggtggtgcatgactggctgtactactatgcctacaaggacttcctgtggttcttcagcaagcgcttcaagtctgctgccatgctggccgtgtttgctgtgtctgctgtggtgcatgaatatgccctggccgtgtgcctgtccttcttctaccctgtgctgtttgtgctcttcatgttcttcggcatggccttcaacttcatcgtgaatgacagcaggaagaagcccatctggaatgtgctgatgtggaccagcctcttcctgggcaatggagtgctgctgtgcttctacagccaggagtggtacgcccggcagcactgccccctgaagaaccccaccttcctggactatgtgcggcccaggtcctggacctgccgctacgtgttctag

SEQ ID NO: 171809 - DNA, 1458 bp, synthetic construct
  misc_feature 1..1458: note = Description of Artificial Sequence: Synthetic coding sequence
  source 1..1458: mol_type = other DNA
atgaaggaggtgggcagccactttgatgactttgtgaccaacctgattgagaagagcgccagcctggacaatggaggctgtgccctgaccaccttctctgtgctggagggggagaagaacaaccaccgggccaaggacctgcgggcccctcctgagcagggcaagatcttcatcgcccggcgcagcctgctggatgagctgctggaggtggaccacatccgcaccatctaccacatgtttattgccctgctgatcctcttcatcctgagcaccctggtggtggactacattgatgagggccgcctggtgctggagttcagcctgctgtcctatgccttcggcaagttccccaccgtggtgtggacctggtggatcatgttcctgagcaccttctctgtgccctacttcctgttccagcactgggccaccggctacagcaagagcagccaccccctcatccgcagcctcttccacggcttcctgttcatgatcttccagattggagtgctgggcttcggccccacctacgtggtgctggcctacaccctgcccccagccagccgcttcatcatcatctttgagcagatccgctttgtgatgaaggcccacagctttgtgcgggagaatgtgccccgggtgctgaacagcgccaaggagaagagcagcacagtgcccatccccaccgtgaaccagtacctgtacttcctgtttgcccccaccctcatctacagagacagctaccccaggaaccccaccgtgcgctggggctacgtggccatgaagtttgcccaggtgtttggctgcttcttctacgtgtactacatctttgagcggctgtgtgcccccctcttcaggaacatcaagcaggagcccttcagcgcccgggtgctggtgctgtgtgtgttcaacagcatcctgcccggggtgctgatcctcttcctgaccttctttgccttcctgcactgctggctgaatgcctttgctgagatgctgcgctttggagacaggatgttctacaaggactggtggaacagcaccagctacagcaactactaccgcacctggaatgtggtggtgcatgactggctgtactactatgcctacaaggacttcctgtggttcttcagcaagcgcttcaagtctgctgccatgctggccgtgtttgctgtgtctgctgtggtgcatgaatatgccctggccgtgtgcctgtccttcttctaccctgtgctgtttgtgctcttcatgttcttcggcatggccttcaacttcatcgtgaatgacagcaggaagaagcccatctggaatgtgctgatgtggaccagcctcttcctgggcaatggagtgctgctgtgcttctacagccaggagtggtacgcccggcagcactgccccctgaagaaccccaccttcctggactatgtgcggcccaggtcctggacctgccgctacgtgttctag

SEQ ID NO: 171810 - DNA, 1479 bp, synthetic construct
  misc_feature 1..1479: note = Description of Artificial Sequence: Synthetic coding sequence
  source 1..1479: mol_type = other DNA
atggagctgaagcccttcttcatgaaggaggtgggcagccactttgatgactttgtgaccaacctgattgagaagagcgccagcctggacaatggaggctgtgccctgaccaccttctctgtgctggagggggagaagaacaaccaccgggccaaggacctgcgggcccctcctgagcagggcaagatcttcatcgcccggcgcagcctgctggatgagctgctggaggtggaccacatccgcaccatctaccacatgttcatcgccctgctgatcctcttcatcctgagcaccctggtggtggactacattgatgagggccgcctggtgctggagttcagcctgctgtcctatgccttcggcaagttccccaccgtggtgtggacctggtggatcatgttcctgagcaccttctctgtgccctacttcctgttccagcactgggccaccggctacagcaagagcagccaccccctcatccgcagcctcttccacggcttcctgttcatgatcttccagatcggcgtgctgggcttcggccccacctacgtggtgctggcctacaccctgcccccagccagccgcttcatcatcatctttgagcagatccgctttgtgatgaaggcccacagctttgtgagagaaaatgtgccccgggtgctgaacagcgccaaggagaagagcagcacagtgcccatccccaccgtgaaccagtacctgtacttcctgtttgcccccaccctcatctacagagacagctaccccaggaaccccaccgtgcgctggggctacgtggccatgaagtttgcccaggtgtttggctgcttcttctacgtgtactacatctttgagcggctgtgtgcccccctcttcaggaacatcaagcaggagcccttcagcgcccgggtgctggtgctgtgtgtgttcaacagcatcctgcccggggtgctgatcctcttcctgaccttctttgccttcctgcactgctggctgaatgcctttgctgagatgctgcgctttggagacaggatgttctacaaggactggtggaacagcaccagctacagcaactactaccgcacctggaatgtggtggtgcatgactggctgtactactatgcctacaaggacttcctgtggttcttcagcaagcgcttcaagtctgctgccatgctggccgtgtttgctgtgtctgctgtggtgcatgaatatgccctggccgtgtgcctgtccttcttctaccctgtgctgtttgtgctcttcatgttcttcggcatggccttcaacttcatcgtgaatgacagcaggaagaagcccatctggaatgtgctgatgtggaccagcctcttcctgggcaatggagtgctgctgtgcttctacagccaggagtggtacgcccggcagcactgccccctgaagaaccccaccttcctggactatgtgcggcccaggtcctggacctgccgctacgtgttctag

SEQ ID NO: 171811 - DNA, 1569 bp, synthetic construct
  misc_feature 1..1569: note = Description of Artificial Sequence: Synthetic coding sequence
  source 1..1569: mol_type = other DNA
atggagcctggaggagcccggctgcggctgcagaggacagagggcctgggcggggagcgggagcggcagccctgtggagatggcaacacagagacccaccgggccccagacctggtgcagtggaccaggcacatggaggccgtgaaggcccagctgctggagcaggcccagggccagctgcgggagctgctggaccgggccatgagggaggccatccagagctaccccagccaggacaagcccctgcccccacctcctcctggcagcctgagcaggacccaggagcccagcctgggcaagcagaaggtgttcatcatcaggaagagcctgctggatgagctgatggaggtgcagcacttccgcaccatctaccacatgttcatcgccggcctgtgtgtgttcatcatcagcaccctggccatcgacttcattgatgagggccgcctgctgctggagtttgacctgctgatcttctcctttggccagctgcccctggccctggtgacctgggtgcccatgttcctgagcaccctgctggccccctaccaggccctgcggctgtgggcccggggcacctggacccaggccaccggcctgggctgtgccctgctggccgcccatgctgtggtgctgtgtgccctgcctgtgcacgtggccgtggagcaccagctgcccccagccagccgctgtgtgctggtgtttgagcaggtgcgcttcctgatgaagagctacagcttcctgcgggaggccgtgcccggcaccctgcgggcccggcggggggagggcatccaggcccccagcttcagcagctacctgtacttcctgttctgccccaccctcatctaccgggagacctaccccaggaccccctacgtgcgctggaactacgtggccaagaactttgcccaggccctgggctgtgtgctgtatgcctgcttcatcctgggccgcctgtgtgtgcctgtgtttgccaacatgagccgggagcccttcagcacccgggccctggtgctgagcatcctgcacgccaccctgcccggcatcttcatgctgctgctgatcttctttgccttcctgcactgctggctgaatgcctttgctgagatgctgcgctttggagacaggatgttctacagagactggtggaacagcaccagcttcagcaactactaccgcacctggaatgtggtggtgcatgactggctgtacagctatgtgtaccaggacggcctgcggctgctgggcgcccgggcccggggcgtggccatgctgggcgtcttcctggtgtctgctgtggcccacgagtacatcttctgctttgtgctgggcttcttctaccctgtgatgctgatcctcttcctggtgattggaggcatgctgaacttcatgatgcatgaccagaggactggacctgcctggaatgtgctgatgtggaccatgctgttcctgggccagggcatccaggtgtccctgtactgccaggagtggtacgcccggcggcactgccccctgccccaggccaccttctggggcctggtgacccccaggtcctggagctgccacacctag

SEQ ID NO: 171812 - DNA, 3426 bp, synthetic construct
  misc_feature 1..3426: note = Description of Artificial Sequence: Synthetic coding sequence
  source 1..3426: mol_type = other DNA
atggatgacagcggggagctgggcggcctggagaccatggagaccctgacagagctgggagatgagctgaccctgggggacattgatgagatgctgcagtttgtgagcaaccaggtgggggagttcccagacctcttcagcgagcagctgtgcagcagcttccctggcagcggcggcagcggcagcagcagcggcagcagcggcagcagcagcagcagcagcaatggccggggcagcagcagtggagctgtggaccccagcgtgcagaggagcttcacccaggtgaccctgcccagcttcagccccagcgctgccagcccccaggcccccaccctgcaggtgaaggtgagccccacctctgtgcccaccaccccccgggccacccccatcctgcagccccggccccagccccagccccagccccagacccagctgcagcagcagacagtgatgatcacccccaccttcagcaccaccccccagacccgcatcatccagcagcccctcatctaccagaatgctgccaccagcttccaggtgctgcagccccaggtgcagagcctggtgaccagcagccaggtgcagcctgtgaccatccagcagcaggtgcagacagtgcaggcccagagggtgctgacccagacagccaacggcaccctgcagaccctggccccagccaccgtgcagacagtggccgccccccaggtgcagcaggtgcctgtgctggtgcagccccagatcatcaagacagacagcctggtgctgaccaccctgaagacagatggcagccctgtgatggctgctgtgcagaacccagccctgacagccctgaccacccccatccagacagctgccctgcaggtgcccaccctggtgggcagcagcggcaccatcctgaccaccatgcctgtgatgatgggccaggagaaggtgcccatcaagcaggtgcctggaggagtgaagcagctggagccccccaaggagggggagaggaggaccacccacaacatcatcgagaagcgctaccgcagcagcatcaatgacaagatcatcgagctgaaggacctggtgatgggcacagatgccaagatgcacaagtctggagtgctgaggaaggccatcgactacatcaagtacctgcagcaggtgaaccacaagctgcggcaggagaacatggtgctgaagctggccaaccagaagaacaagctgctgaagggcatcgacctgggcagcctggtggacaatgaggtggacctgaagattgaggacttcaaccagaatgtgctgctgatgagccccccagccagtgacagcggcagccaggccggcttcagcccctacagcattgattctgagcccggcagccccctgctggatgatgccaaggtgaaggatgagccagacagcccccctgtggccctgggcatggtggacaggagccgcatcctgctgtgtgtgctgaccttcctgtgcctgtccttcaaccccctgaccagcctgctgcagtggggcggggcccatgacagcgaccagcacccccacagcggcagcggccgctctgtgctgagctttgagagcggcagcggcggctggtttgactggatgatgcccaccctgctgctgtggctggtgaatggagtcatcgtgctgtctgtgtttgtgaagctgctggtgcatggagagcccgtcatccggccccacagccgcagctctgtgaccttctggaggcacaggaagcaggccgacctggacctggcccggggggactttgctgctgctgctggcaacctgcagacctgcctggccgtgctgggccgggccctgcccaccagccggctggacctggcctgcagcctgtcctggaatgtcatccgctacagcctgcagaagctgcggctggtgcgctggctgctgaagaaggtgttccagtgcagaagagccaccccagccacagaagctggctttgaagatgaggccaagaccagcgccagagatgctgccctggcctaccaccggctgcaccagctgcacatcaccgggaagctgcctgctggcagcgcctgcagtgatgtgcacatggccctgtgtgctgtgaacctggccgagtgtgccgaggagaagatcccccccagcaccctggtggagatccacctgacagctgccatgggcctgaagacccgctgtggcggcaagctgggcttcctggccagctacttcctgagccgggcccagagcctgtgtggccctgagcacagcgctgtgcctgacagcctgcgctggctgtgccaccccctgggccagaagttcttcatggagaggtcctggagcgtgaagtctgctgccaaggagagcctgtactgtgcccagaggaacccagctgaccccatcgcccaggtgcaccaggccttctgcaagaacctgctggagcgggccatcgagagcctggtgaagccccaggccaagaagaaggccggggaccaggaggaggagagctgtgagttcagcagcgccctggagtacctgaagctgctgcacagctttgtggacagcgtgggcgtgatgagcccccccctgagccgcagctctgtgctgaagagcgccctgggccctgacatcatctgccgctggtggaccagcgccatcaccgtggccatctcctggctgcagggagatgatgctgctgtgcgcagccacttcaccaaggtggagcgcatccccaaggccctggaggtgacagagagccccctggtgaaggccatcttccacgcctgccgggccatgcacgccagcctgcccgggaaggcagatggccagcagagcagcttctgccactgtgagcgggccagcggccacctgtggagcagcctgaatgtgtctggggccaccagtgaccctgccctgaaccacgtggtgcagctgctgacctgtgacctgctgctgagcctgaggacagccctgtggcagaagcaggccagcgccagccaggccgtgggggagacctaccacgccagcggggctgagctggccggcttccagagggacctgggcagcctgcggcggctggcccacagcttccggcctgcctacaggaaggtgttcctgcacgaggccaccgtgcggctgatggccggggccagccccaccaggacccaccagctgctggagcacagcctgcggcggaggaccacccagagcaccaagcacggggaggtggatgcctggccaggccagcgggagcgggccacagccatcctgctggcctgccgccacctgcccctgtccttcctgagcagccctggccagagagctgtgctgctggccgaggccgcccggaccctggagaaggtgggggacagaagaagctgcaatgactgccagcagatgattgtgaagctgggcggcggcacagccatcgccgccagctag

SEQ ID NO: 171813 - DNA, 2055 bp, synthetic construct
  misc_feature 1..2055: note = Description of Artificial Sequence: Synthetic coding sequence
  source 1..2055: mol_type = other DNA
atggatgacagcggggagctgggcggcctggagaccatggagaccctgacagagctgggagatgagctgaccctgggggacattgatgagatgctgcagtttgtgagcaaccaggtgggggagttcccagacctcttcagcgagcagctgtgcagcagcttccctggcagcggcggcagcggcagcagcagcggcagcagcggcagcagcagcagcagcagcaatggccggggcagcagcagtggagctgtggaccccagcgtgcagaggagcttcacccaggtgaccctgcccagcttcagccccagcgctgccagcccccaggcccccaccctgcaggtgaaggtgagccccacctctgtgcccaccaccccccgggccacccccatcctgcagccccggccccagccccagccccagccccagacccagctgcagcagcagacagtgatgatcacccccaccttcagcaccaccccccagacccgcatcatccagcagcccctcatctaccagaatgctgccaccagcttccaggtgctgcagccccaggtgcagagcctggtgaccagcagccaggtgcagcctgtgaccatccagcagcaggtgcagacagtgcaggcccagagggtgctgacccagacagccaacggcaccctgcagaccctggccccagccaccgtgcagacagtggccgccccccaggtgcagcaggtgcctgtgctggtgcagccccagatcatcaagacagacagcctggtgctgaccaccctgaagacagatggcagccctgtgatggctgctgtgcagaacccagccctgacagccctgaccacccccatccagacagctgccctgcaggtgcccaccctggtgggcagcagcggcaccatcctgaccaccatgcctgtgatgatgggccaggagaaggtgcccatcaagcaggtgcctggaggagtgaagcagctggagccccccaaggagggggagaggaggaccacccacaacatcatcgagaagcgctaccgcagcagcatcaatgacaagatcatcgagctgaaggacctggtgatgggcacagatgccaagatgcacaagtctggagtgctgaggaaggccatcgactacatcaagtacctgcagcaggtgaaccacaagctgcggcaggagaacatggtgctgaagctggccaaccagaagaacaagctgctgaagggcatcgacctgggcagcctggtggacaatgaggtggacctgaagattgaggacttcaaccagaatgtgctgctgatgagccccccagccagtgacagcggcagccaggccggcttcagcccctacagcattgattctgagcccggcagccccctgctggatgatgccaaggtgaaggatgagccagacagcccccctgtggccctgggcatggtggacaggagccgcatcctgctgtgtgtgctgaccttcctgtgcctgtccttcaaccccctgaccagcctgctgcagtggggcggggcccatgacagcgaccagcacccccacagcggcagcggccgctctgtgctgagctttgagagcggcagcggcggctggtttgactggatgatgcccaccctgctgctgtggctggtgaatggagtcatcgtgctgtctgtgtttgtgaagctgctggtgcatggagagcccgtcatccggccccacagccgcagctctgtgaccttctggaggcacaggaagcaggccgacctggacctggcccggggcgtgtatggcaagaagagcggggccacccacagcattgaggaggagctgaacatccacatcagccggggcaccaggaccaggaccctgctgagcagccgccgcttctgcagctgctgccggcagcccaccaacctgcccggcagctttggacctggaacagcccacctgcccccaggccctggcctgcagcccctgctggagcgggaccccctgcagcctgctgaggccacccctggggccctggccgcccaggagagcctgcctgtgcctgctggccacgccagccactag

SEQ ID NO: 171814 - DNA, 3309 bp, synthetic construct
  misc_feature 1..3309: note = Description of Artificial Sequence: Synthetic coding sequence
  source 1..3309: mol_type = other DNA
atggatgacagcggggagctgggcggcctggagaccatggagaccctgacagagctgggagatgagctgaccctgggggacattgatgagatgctgcagtttgtgagcaaccaggtgggggagttcccagacctcttcagcgagcagctgtgcagcagcttccctggcagcggcggcagcggcagcagcagcggcagcagcggcagcagcagcagcagcagcaatggccggggcagcagcagtggagctgtggaccccagcgtgcagaggagcttcacccaggtgaccctgcccagcttcagccccagcgctgccagcccccaggcccccaccctgcaggtgaaggtgagccccacctctgtgcccaccaccccccgggccacccccatcctgcagccccggccccagccccagccccagccccagacccagctgcagcagcagacagtgatgatcacccccaccttcagcaccaccccccagacccgcatcatccagcagcccctcatctaccagaatgctgccaccagcttccaggtgctgcagccccaggtgcagagcctggtgaccagcagccaggtgcagcctgtgaccatccagcagcaggtgcagacagtgcaggcccagagggtgctgacccagacagccaacggcaccctgcagaccctggccccagccaccgtgcagacagtggccgccccccaggtgcagcaggtgcctgtgctggtgcagccccagatcatcaagacagacagcctggtgctgaccaccctgaagacagatggcagccctgtgatggctgctgtgcagaacccagccctgacagccctgaccacccccatccagacagctgccctgcaggtgcccaccctggtgggcagcagcggcaccatcctgaccaccatgcctgtgatgatgggccaggagaaggtgcccatcaagcaggtgcctggaggagtgaagcagctggagccccccaaggagggggagaggaggaccacccacaacatcatcgagaagcgctaccgcagcagcatcaatgacaagatcatcgagctgaaggacctggtgatgggcacagatgccaagatgcacaagtctggagtgctgaggaaggccatcgactacatcaagtacctgcagcaggtgaaccacaagctgcggcaggagaacatggtgctgaagctggccaaccagaagaacaagctgctgaagggcatcgacctgggcagcctggtggacaatgaggtggacctgaagattgaggacttcaaccagaatgtgctgctgatgagccccccagccagtgacagcggcagccaggccggcttcagcccctacagcattgattctgagcccggcagccccctgctggatgatgccaaggtgaaggatgagccagacagcccccctgtggccctgggcatggtggacaggagccgcatcctgctgtgtgtgctgaccttcctgtgcctgtccttcaaccccctgaccagcctgctgcagtggggcggggcccatgacagcgaccagcacccccacagcggcagcggccgctctgtgctgagctttgagagcggcagcggcggctggtttgactggatgatgcccaccctgctgctgtggctggtgaatggagtcatcgtgctgtctgtgtttgtgaagctgctggtgcatggagagcccgtcatccggccccacagccgcagctctgtgaccttctggaggcacaggaagcaggccgacctggacctggcccggggggactttgctgctgctgctggcaacctgcagacctgcctggccgtgctgggccgggccctgcccaccagccggctggacctggcctgcagcctgtcctggaatgtcatccgctacagcctgcagaagctgcggctggtgcgctggctgctgaagaaggtgttccagtgcagaagagccaccccagccacagaagctggctttgaagatgaggccaagaccagcgccagagatgctgccctggcctaccaccggctgcaccagctgcacatcaccgggaagctgcctgctggcagcgcctgcagtgatgtgcacatggccctgtgtgctgtgaacctggccgagtgtgccgaggagaagatcccccccagcaccctggtggagatccacctgacagctgccatgggcctgaagacccgctgtggcggcaagctgggcttcctggccagctacttcctgagccgggcccagagcctgtgtggccctgagcacagcgctgtgcctgacagcctgcgctggctgtgccaccccctgggccagaagttcttcatggagaggtcctggagcgtgaagtctgctgccaaggagagcctgtactgtgcccagaggaacccagctgaccccatcgcccaggtgcaccaggccttctgcaagaacctgctggagcgggccatcgagagcctggtgaagccccaggccaagaagaaggccggggaccaggaggaggagagctgtgagttcagcagcgccctggagtacctgaagctgctgcacagctttgtggacagcgtgggcgtgatgagcccccccctgagccgcagctctgtgctgaagagcgccctgggccctgacatcatctgccgctggtggaccagcgccatcaccgtggccatctcctggctgcagggagatgatgctgctgtgcgcagccacttcaccaaggtggagcgcatccccaaggccctggaggtgacagagagccccctggtgaaggccatcttccacgcctgccgggccatgcacgccagcctgcccgggaaggcagatggccagcagagcagcttctgccactgtgagcgggccagcggccacctgtggagcagcctgaatgtgtctggggccaccagtgaccctgccctgaaccacgtggtgcagctgctgacctgtgacctgctgctgagcctgaggacagccctgtggcagaagcaggccagcgccagccaggccgtgggggagacctaccacgccagcggggctgagctggccggcttccagagggacctgggcagcctgcggcggctggcccacagcttccggcctgcctacaggaaggtgttcctgcacgaggccaccgtgcggctgatggccggggccagccccaccaggacccaccagctgctggagcacagcctgcggcggaggaccacccagagcaccaagcacggggaggtggatgcctggccaggccagcgggagcgggccacagccatcctgctggcctgccgccacctgcccctgtccttcctgccctgcctgcagcccagctag

SEQ ID NO: 171815 - DNA, 648 bp, synthetic construct
  misc_feature 1..648: note = Description of Artificial Sequence: Synthetic coding sequence
  source 1..648: mol_type = other DNA
atgcacgccagcctgcccgggaaggcagatggccagcagagcagcttctgccactgtgagcgggccagcggccacctgtggagcagcctgaatgtgtctggggccaccagtgaccctgccctgaaccacgtggtgcagctgctgacctgtgacctgctgctgagcctgaggacagccctgtggcagaagcaggccagcgccagccaggccgtgggggagacctaccacgccagcggggctgagctggccggcttccagagggacctgggcagcctgcggcggctggcccacagcttccggcctgcctacaggaaggtgttcctgcacgaggccaccgtgcggctgatggccggggccagccccaccaggacccaccagctgctggagcacagcctgcggcggaggaccacccagagcaccaagcacggggaggtggatgcctggccaggccagcgggagcgggccacagccatcctgctggcctgccgccacctgcccctgtccttcctgagcagccctggccagagagctgtgctgctggccgaggccgcccggaccctggagaaggtgggggacagaagaagctgcaatgactgccagcagatgattgtgaagctgggcggcggcacagccatcgccgccagctag

SEQ ID NO: 171816 - DNA, 900 bp, synthetic construct
  misc_feature 1..900: note = Description of Artificial Sequence: Synthetic coding sequence
  source 1..900: mol_type = other DNA
atggacctggtgctgcgggtggccgactactacttcttcaccccctacgtgtacccagccacctggccagaagatgacatcttccggcaggccatcagcctgctgattgtgaccaacgtgggcgcctacatcctgtacttcttctgtgccaccctgagctactactttgtgtttgaccacgccctgatgaagcacccccagttcctgaagaaccaggtgcggcgggagatcaagttcaccgtgcaggccctgccctggatcagcatcctgactgtggccctcttcctgctggagatccggggctacagcaagctgcatgatgacctgggggagttcccctacggcctgtttgagctggtggtgtccatcatctccttcctgttcttcacagacatgttcatctactggatccaccggggcctgcaccaccggctggtgtacaagaggctgcacaagccccaccacatctggaagatccccaccccatttgccagccacgccttccaccccattgatggcttcctgcagagcctgccctaccacatctaccccttcatcttccccctgcacaaggtggtgtacctgagcctgtacatcctggtgaacatctggaccatcagcatccatgatggagacttccgggtgccccagatcctgcagcccttcatcaatggcagcgcccaccacacagaccaccacatgttctttgactacaactacggccagtacttcaccctgtgggaccgcatcggcggcagcttcaagaaccccagcagctttgagggcaagggccccctgtcctatgtgaaggagatgacagagggcaagaggagcagccacagcggaaatggctgcaagaatgagaagctgttcaacggggagttcaccaagacagaatag

SEQ ID NO: 171817 - DNA, 900 bp, synthetic construct; identical to SEQ ID NO: 171816
  misc_feature 1..900: note = Description of Artificial Sequence: Synthetic coding sequence
  source 1..900: mol_type = other DNA

SEQ ID NO: 171818 - DNA, 192 bp, synthetic construct
  misc_feature 1..192: note = Description of Artificial Sequence: Synthetic coding sequence
  source 1..192: mol_type = other DNA
atggagggcgctggggccggcagcggcttcaggaaggagctggtgtcccggctgctgcacctgcacttcaaggatgacaagaccaaggaggccgctgtgcggggcgtgcggcaggcccaggccgaggatgccctgcgggtggatgtggaccagctggagaaggtgctgccccagctgctgctggacttctag

SEQ ID NO: 171819 - DNA, 246 bp, synthetic construct
  misc_feature 1..246: note = Description of Artificial Sequence: Synthetic coding sequence
  source 1..246: mol_type = other DNA
atggagggcgctggggccggcagcggcttcaggaaggagctggtgtcccggctgctgcacctgcacttcaaggatgacaagaccaaggtgtctggagatgccctgcagctgatggtggagctgctgaaggtgtttgtggtggaggccgctgtgcggggcgtgcggcaggcccaggccgaggatgccctgcgggtggatgtggaccagctggagaaggtgctgccccagctgctgctggacttctag

SEQ ID NO: 171820 - DNA, 2121 bp, synthetic construct
  misc_feature 1..2121: note = Description of Artificial Sequence: Synthetic coding sequence
  source 1..2121: mol_type = other DNA
atgggcggcaagggcggcggggacacccggggccctgtgctcttcccctgccagctggcccaggccctgagcccccggcgggccttcccccgggagctgaaggagaagggccagaggatgagcagccagcctgctggcaaccagaccagccctggggccacagaggactacagctatggctcctggtacattgatgagccccagggcggggaggagctgcagcctgagggggaggtgcccagctgccacaccagcatccccccaggcctgtaccacgcctgcctggccagcctgagcatcctggtgctgctgctgctggccatgctggtgagaagacggcagctgtggccagactgtgtgcggggccggcccggcctgcccagccctgtggacttcctggccggggaccggcccagggctgtgcctgctgctgtgttcatggtgctgctgagcagcctgtgcctgctgctgcctgatgaagatgccctgcccttcctgaccctggccagcgcccccagccaggacggcaagacagaggcccccaggggggcctggaagatcctgggcctcttctactatgctgccctgtactaccccctggccgcctgtgccacagctggccacacagctgcccacctgctgggcagcaccctgtcctgggcccacctgggcgtgcaggtgtggcagagagctgagtgcccccaggtgcccaagatctacaagtactacagcctgctggccagcctgcccctgctgctgggcctgggcttcctgagcctgtggtaccctgtgcagctggtgcgctccttcagcagaagaactggagctggcagcaagggcctgcagagcagctacagcgaggagtacctgaggaacctgctgtgcaggaagaagctgggcagcagctaccacaccagcaagcacggcttcctgtcctgggcccgggtgtgcctgcggcactgcatctacaccccccagcccggcttccacctgcccctgaagctggtgctgagcgccaccctgaccggcacagccatctaccaggtggccctgctgctgctggtgggcgtggtgcccaccatccagaaggtgcgggccggcgtgaccacagatgtgtcctacctgctggccggctttggaattgtgctgtctgaggacaagcaggaggtggtggagctggtgaagcaccacctgtgggccctggaggtgtgctacatcagcgccctggtgctgagctgcctgctgaccttcctggtgctgatgaggagcctggtgacccacaggaccaacctgcgggccctgcacagaggagctgccctggacctgagccccctgcacaggagcccccaccccagccggcaggccatcttctgctggatgtccttcagcgcctaccagacagccttcatctgcctgggcctgctggtgcagcagatcatcttcttcctgggcaccacagccctggccttcctggtgctgatgcctgtgctgcacggcaggaacctgctgctcttccgcagcctggagagctcctggcccttctggctgaccctggccctggccgtcatcctgcagaacatggccgcccactgggtgttcctggagacccatgatggccacccccagctgaccaacagaagagtgctgtatgctgccaccttcctgctcttccccctgaatgtgctggtgggcgccatggtggccacctggagggtgctgctgagcgccctgtacaatgccatccacctgggccagatggacctgagcctgctgccccccagggctgccaccctggaccccggctactacacctacagaaacttcctgaagattgaggtgtcccagagccacccagccatgacagccttctgcagcctgctgctgcaggcccagagcctgctgcccaggaccatggccgccccccaggacagcctgcggcctggagaggaggatgagggcatgcagctgctgcagaccaaggacagcatggccaagggggcccggcctggggccagccggggccgggcccgctggggcctggcctacaccctgctgcacaaccccaccctgcaggtgttcaggaagacagccctgctgggcgccaacggggcccagccctag

SEQ ID NO: 171821 - DNA, 2004 bp, synthetic construct
  misc_feature 1..2004: note = Description of Artificial Sequence: Synthetic coding sequence
  source 1..2004: mol_type = other DNA
atgagcagccagcctgctggcaaccagaccagccctggggccacagaggactacagctatggctcctggtacattgatgagccccagggcggggaggagctgcagcctgagggggaggtgcccagctgccacaccagcatccccccaggcctgtaccacgcctgcctggccagcctgagcatcctggtgctgctgctgctggccatgctggtgagaagacggcagctgtggccagactgtgtgcggggccggcccggcctgcccagccctgtggacttcctggccggggaccggcccagggctgtgcctgctgctgtgttcatggtgctgctgagcagcctgtgcctgctgctgcctgatgaagatgccctgcccttcctgaccctggccagcgcccccagccaggacggcaagacagaggcccccaggggggcctggaagatcctgggcctcttctactatgctgccctgtactaccccctggccgcctgtgccacagctggccacacagctgcccacctgctgggcagcaccctgtcctgggcccacctgggcgtgcaggtgtggcagagagcagaatgtccccaggtgcccaagatctacaagtactacagcctgctggccagcctgcccctgctgctgggcctgggcttcctgagcctgtggtaccctgtgcagctggtgcgctccttcagcagaagaactggagctggcagcaagggcctgcagagcagctacagcgaggagtacctgaggaacctgctgtgcaggaagaagctgggcagcagctaccacaccagcaagcacggcttcctgtcctgggcccgggtgtgcctgcggcactgcatctacaccccccagcccggcttccacctgcccctgaagctggtgctgagcgccaccctgactggaacagccatctaccaggtggccctgctgctgctggtgggcgtggtgcccaccatccagaaggtgcgggccggcgtgaccacagatgtgtcctacctgctggccggcttcggcatcgtgctgtctgaggacaagcaggaggtggtggagctggtgaagcaccacctgtgggccctggaggtgtgctacatcagcgccctggtgctgagctgcctgctgaccttcctggtgctgatgaggagcctggtgacccacaggaccaacctgcgggccctgcacagaggagctgccctggacctgagccccctgcacaggagcccccaccccagccggcaggccatcttctgctggatgtccttcagcgcctaccagacagccttcatctgcctgggcctgctggtgcagcagatcatcttcttcctgggcaccacagccctggccttcctggtgctgatgcctgtgctgcatggaagaaacctgctgctcttccgcagcctggagagctcctggcccttctggctgaccctggccctggccgtcatcctgcagaacatggccgcccactgggtgttcctggagacccatgatggccacccccagctgaccaacagaagagtgctgtatgctgccaccttcctgctcttccccctgaatgtgctggtgggcgccatggtggccacctggagggtgctgctgagcgccctgtacaatgccatccacctgggccagatggacctgagcctgctgcccccccgggccgccaccctggaccccggctactacacctacagaaacttcctgaagattgaggtgtcccagagccacccagccatgacagccttctgcagcctgctgctgcaggcccagagcctgctgcccaggaccatggccgccccccaggacagcctgcggcctggagaagaagatgagggcatgcagctgctgcagaccaaggacagcatggccaagggggcccggcctggggccagccggggccgggcccgctggggcctggcctacaccctgctgcacaaccccaccctgcaggtgttcaggaagacagccctgctgggcgccaatggagcccagccctag

SEQ ID NO: 171822 - DNA, 2004 bp, synthetic construct; identical to SEQ ID NO: 171821
  misc_feature 1..2004: note = Description of Artificial Sequence: Synthetic coding sequence
  source 1..2004: mol_type = other DNA

SEQ ID NO: 171823 - DNA, 1800 bp, synthetic construct
  misc_feature 1..1800: note = Description of Artificial Sequence: Synthetic coding sequence
  source 1..1800: mol_type = other DNA
atgctggtgagaagacggcagctgtggccagactgtgtgcggggccggcccggcctgcccagccctgtggacttcctggccggggaccggcccagggctgtgcctgctgctgtgttcatggtgctgctgagcagcctgtgcctgctgctgcctgatgaagatgccctgcccttcctgaccctggccagcgcccccagccaggacggcaagacagaggcccccaggggggcctggaagatcctgggcctcttctactatgctgccctgtactaccccctggccgcctgtgccacagctggccacacagctgcccacctgctgggcagcaccctgtcctgggcccacctgggcgtgcaggtgtggcagagagcagaatgtccccaggtgcccaagatctacaagtactacagcctgctggccagcctgcccctgctgctgggcctgggcttcctgagcctgtggtaccctgtgcagctggtgcgctccttcagcagaagaactggagctggcagcaagggcctgcagagcagctacagcgaggagtacctgaggaacctgctgtgcaggaagaagctgggcagcagctaccacaccagcaagcacggcttcctgtcctgggcccgggtgtgcctgcggcactgcatctacaccccccagcccggcttccacctgcccctgaagctggtgctgagcgccaccctgactggaacagccatctaccaggtggccctgctgctgctggtgggcgtggtgcccaccatccagaaggtgcgggccggcgtgaccacagatgtgtcctacctgctggccggcttcggcatcgtgctgtctgaggacaagcaggaggtggtggagctggtgaagcaccacctgtgggccctggaggtgtgctacatcagcgccctggtgctgagctgcctgctgaccttcctggtgctgatgaggagcctggtgacccacaggaccaacctgcgggccctgcacagaggagctgccctggacctgagccccctgcacaggagcccccaccccagccggcaggccatcttctgctggatgtccttcagcgcctaccagacagccttcatctgcctgggcctgctggtgcagcagatcatcttcttcctgggcaccacagccctggccttcctggtgctgatgcctgtgctgcatggaagaaacctgctgctcttccgcagcctggagagctcctggcccttctggctgaccctggccctggccgtcatcctgcagaacatggccgcccactgggtgttcctggagacccatgatggccacccccagctgaccaacagaagagtgctgtatgctgccaccttcctgctcttccccctgaatgtgctggtgggcgccatggtggccacctggagggtgctgctgagcgccctgtacaatgccatccacctgggccagatggacctgagcctgctgcccccccgggccgccaccctggaccccggctactacacctacagaaacttcctgaagattgaggtgtcccagagccacccagccatgacagccttctgcagcctgctgctgcaggcccagagcctgctgcccaggaccatggccgccccccaggacagcctgcggcctggagaagaagatgagggcatgcagctgctgcagaccaaggacagcatggccaagggggcccggcctggggccagccggggccgggcccgctggggcctggcctacaccctgctgcacaaccccaccctgcaggtgttcaggaagacagccctgctgggcgccaatggagcccagccctag

SEQ ID NO: 171824 - DNA, 1977 bp, synthetic construct
  misc_feature 1..1977: note = Description of Artificial Sequence: Synthetic coding sequence
  source 1..1977: mol_type = other DNA
atgagcagccagcctgctggcaaccagaccagccctggggccacagaggactacagctatggctcctggtacattgatgagccccagggcggggaggagctgcagcctgagggggaggtgcccagctgccacaccagcatccccccaggcctgtaccacgcctgcctggccagcctgagcatcctggtgctgctgctgctggccatgctggtgagaagacggcagctgtggccagactgtgtgcggggccggcccggcctgccccggcccagggctgtgcctgctgctgtgttcatggtgctgctgagcagcctgtgcctgctgctgcctgatgaagatgccctgcccttcctgaccctggccagcgcccccagccaggacggcaagacagaggcccccaggggggcctggaagatcctgggcctcttctactatgctgccctgtactaccccctggccgcctgtgccacagctggccacacagctgcccacctgctgggcagcaccctgtcctgggcccacctgggcgtgcaggtgtggcagagagctgagtgcccccaggtgcccaagatctacaagtactacagcctgctggccagcctgcccctgctgctgggcctgggcttcctgagcctgtggtaccctgtgcagctggtgcgctccttcagcagaagaactggagctggcagcaagggcctgcagagcagctacagcgaggagtacctgaggaacctgctgtgcaggaagaagctgggcagcagctaccacaccagcaagcacggcttcctgtcctgggcccgggtgtgcctgcggcactgcatctacaccccccagcccggcttccacctgcccctgaagctggtgctgagcgccaccctgaccggcacagccatctaccaggtggccctgctgctgctggtgggcgtggtgcccaccatccagaaggtgcgggccggcgtgaccacagatgtgtcctacctgctggccggctttggaattgtgctgtctgaggacaagcaggaggtggtggagctggtgaagcaccacctgtgggccctggaggtgtgctacatcagcgccctggtgctgagctgcctgctgaccttcctggtgctgatgaggagcctggtgacccacaggaccaacctgcgggccctgcacagaggagctgccctggacctgagccccctgcacaggagcccccaccccagccggcaggccatcttctgctggatgtccttcagcgcctaccagacagccttcatctgcctgggcctgctggtgcagcagatcatcttcttcctgggcaccacagccctggccttcctggtgctgatgcctgtgctgcacggcaggaacctgctgctcttccgcagcctggagagctcctggcccttctggctgaccctggccctggccgtcatcctgcagaacatggccgcccactgggtgttcctggagacccatgatggccacccccagctgaccaacagaagagtgctgtatgctgccaccttcctgctcttccccctgaatgtgctggtgggcgccatggtggccacctggagggtgctgctgagcgccctgtacaatgccatccacctgggccagatggacctgagcctgctgccccccagggctgccaccctggaccccggctactacacctacagaaacttcctgaagattgaggtgtcccagagccacccagccatgacagccttctgcagcctgctgctgcaggcccagagcctgctgcccaggaccatggccgccccccaggacagcctgcggcctggagaggaggatgagggcatgcagctgctgcagaccaaggacagcatggccaagggggcccggcctggggccagccggggccgggcccgctggggcctggcctacaccctgctgcacaaccccaccctgcaggtgttcaggaagacagccctgctgggcgccaacggggcccagccctag

SEQ ID NO: 171825 - DNA, 480 bp, synthetic construct
  misc_feature 1..480: note = Description of Artificial Sequence: Synthetic coding sequence
  source 1..480: mol_type = other DNA
atgagcagccagcctgctggcaaccagaccagccctggggccacagaggactacagctatggctcctggtacattgatgagccccagggcggggaggagctgcagcctgagggggaggtgcccagctgccacaccagcatccccccaggcctgtaccacgcctgcctggccagcctgagcatcctggtgctgctgctgctggccatgctggtgagaagacggcagctgtggccagactgtgtgcggggccggcccggcctgcccagccctgtggacttcctggccggggaccggcccagggctgtgcctgctgctgtgttcatggtgctgctgagcagcctgtgcctgctgctgcctgatgaagatgccctgcccttcctgaccctggccagcgcccccagccaggacggcaagacagaggccccccggggcaacctgcccaagatcacagagctgcggctggtgcgggcctggatctag

SEQ ID NO: 171826 - DNA, 2121 bp, synthetic construct; identical to SEQ ID NO: 171820
  misc_feature 1..2121: note = Description of Artificial Sequence: Synthetic coding sequence
  source 1..2121: mol_type = other DNA

SEQ ID NO: 171827 - DNA, 2115 bp, synthetic construct
  misc_feature 1..2115: note = Description of Artificial Sequence: Synthetic coding sequence
  source 1..2115: mol_type = other DNA
atgcagatccggctgctgcgggcagagctggtggtgcccctgtggcagttcatccggcagtggcccccaggcagtgatggctggggccagatggaggagaagggccagaggatgagcagccagcctgctggcaaccagaccagccctggggccacagaggactacagctatggctcctggtacattgatgagccccagggcggggaggagctgcagcctgagggggaggtgcccagctgccacaccagcatccccccaggcctgtaccacgcctgcctggccagcctgagcatcctggtgctgctgctgctggccatgctggtgagaagacggcagctgtggccagactgtgtgcggggccggcccggcctgcccagccctgtggacttcctggccggggaccggcccagggctgtgcctgctgctgtgttcatggtgctgctgagcagcctgtgcctgctgctgcctgatgaagatgccctgcccttcctgaccctggccagcgcccccagccaggacggcaagacagaggcccccaggggggcctggaagatcctgggcctcttctactatgctgccctgtactaccccctggccgcctgtgccacagctggccacacagctgcccacctgctgggcagcaccctgtcctgggcccacctgggcgtgcaggtgtggcagagagctgagtgcccccaggtgcccaagatctacaagtactacagcctgctggccagcctgcccctgctgctgggcctgggcttcctgagcctgtggtaccctgtgcagctggtgcgctccttcagcagaagaactggagctggcagcaagggcctgcagagcagctacagcgaggagtacctgaggaacctgctgtgcaggaagaagctgggcagcagctaccacaccagcaagcacggcttcctgtcctgggcccgggtgtgcctgcggcactgcatctacaccccccagcccggcttccacctgcccctgaagctggtgctgagcgccaccctgaccggcacagccatctaccaggtggccctgctgctgctggtgggcgtggtgcccaccatccagaaggtgcgggccggcgtgaccacagatgtgtcctacctgctggccggctttggaattgtgctgtctgaggacaagcaggaggtggtggagctggtgaagcaccacctgtgggccctggaggtgtgctacatcagcgccctggtgctgagctgcctgctgaccttcctggtgctgatgaggagcctggtgacccacaggaccaacctgcgggccctgcacagaggagctgccctggacctgagccccctgcacaggagcccccaccccagccggcaggccatcttctgctggatgtccttcagcgcctaccagacagccttcatctgcctgggcctgctggtgcagcagatcatcttcttcctgggcaccacagccctggccttcctggtgctgatgcctgtgctgcacggcaggaacctgctgctcttccgcagcctggagagctcctggcccttctggctgaccctggccctggccgtcatcctgcagaacatggccgcccactgggtgttcctggagacccatgatggccacccccagctgaccaacagaagagtgctgtatgctgccaccttcctgctcttccccctgaatgtgctggtgggcgccatggtggccacctggagggtgctgctgagcgccctgtacaatgccatccacctgggccagatggacctgagcctgctgccccccagggctgccaccctggaccccggctactacacctacagaaacttcctgaagattgaggtgtcccagagccacccagccatgacagccttctgcagcctgctgctgcaggcccagagcctgctgcccaggaccatggccgccccccaggacagcctgcggcctggagaggaggatgagggcatgcagctgctgcagaccaaggacagcatggccaagggggcccggcctggggccagccggggccgggcccgctggggcctggcctacaccctgctgcacaaccccaccctgcaggtgttcaggaagacagccctgctgggcgccaacggggcccagccctag

SEQ ID NO: 171828 - DNA, 1674 bp, synthetic construct
  misc_feature 1..1674: note = Description of Artificial Sequence: Synthetic coding sequence
  source 1..1674: mol_type = other DNA
atggctgctggcacctccatgagcccagatgaagatgccctgcccttcctgaccctggccagcgcccccagccaggacggcaagacagaggcccccaggggggcctggaagatcctgggcctcttctactatgctgccctgtactaccccctggccgcctgtgccacagctggccacacagctgcccacctgctgggcagcaccctgtcctgggcccacctgggcgtgcaggtgtggcagagagcagaatgtccccaggtgcccaagatctacaagtactacagcctgctggccagcctgcccctgctgctgggcctgggcttcctgagcctgtggtaccctgtgcagctggtgcgctccttcagcagaagaactggagctggcagcaagggcctgcagagcagctacagcgaggagtacctgaggaacctgctgtgcaggaagaagctgggcagcagctaccacaccagcaagcacggcttcctgtcctgggcccgggtgtgcctgcggcactgcatctacaccccccagcccggcttccacctgcccctgaagctggtgctgagcgccaccctgactggaacagccatctaccaggtggccctgctgctgctggtgggcgtggtgcccaccatccagaaggtgcgggccggcgtgaccacagatgtgtcctacctgctggccggcttcggcatcgtgctgtctgaggacaagcaggaggtggtggagctggtgaagcaccacctgtgggccctggaggtgtgctacatcagcgccctggtgctgagctgcctgctgaccttcctggtgctgatgaggagcctggtgacccacaggaccaacctgcgggccctgcacagaggagctgccctggacctgagccccctgcacaggagcccccaccccagccggcaggccatcttctgctggatgtccttcagcgcctaccagacagccttcatctgcctgggcctgctggtgcagcagatcatcttcttcctgggcaccacagccctggccttcctggtgctgatgcctgtgctgcatggaagaaacctgctgctcttccgcagcctggagagctcctggcccttctggctgaccctggccctggccgtcatcctgcagaacatggccgcccactgggtgttcctggagacccatgatggccacccccagctgaccaacagaagagtgctgtatgctgccaccttcctgctcttccccctgaatgtgctggtgggcgccatggtggccacctggagggtgctgctgagcgccctgtacaatgccatccacctgggccagatggacctgagcctgctgcccccccgggccgccaccctggaccccggctactacacctacagaaacttcctgaagattgaggtgtcccagagccacccagccatgacagccttctgcagcctgctgctgcaggcccagagcctgctgcccaggaccatggccgccccccaggacagcctgcggcctggagaagaagatgagggcatgcagctgctgcagaccaaggacagcatggccaagggggcccggcctggggccagccggggccgggcccgctggggcctggcctacaccctgctgcacaaccccaccctgcaggtgttcaggaagacagccctgctgggcgccaatggagcccagccctag

SEQ ID NO: 171829 - DNA, 1431 bp, synthetic construct
  misc_feature 1..1431: note = Description of Artificial Sequence: Synthetic coding sequence
  source 1..1431: mol_type = other DNA
atgggcaagctgcggctgcaggagatctacaagtactacagcctgctggccagcctgcccctgctgctgggcctgggcttcctgagcctgtggtaccctgtgcagctggtgcgctccttcagcagaagaactggagctggcagcaagggcctgcagagcagctacagcgaggagtacctgaggaacctgctgtgcaggaagaagctgggcagcagctaccacaccagcaagcacggcttcctgtcctgggcccgggtgtgcctgcggcactgcatctacaccccccagcccggcttccacctgcccctgaagctggtgctgagcgccaccctgaccggcacagccatctaccaggtggccctgctgctgctggtgggcgtggtgcccaccatccagaaggtgcgggccggcgtgaccacagatgtgtcctacctgctggccggctttggaattgtgctgtctgaggacaagcaggaggtggtggagctggtgaagcaccacctgtgggccctggaggtgtgctacatcagcgccctggtgctgagctgcctgctgaccttcctggtgctgatgaggagcctggtgacccacaggaccaacctgcgggccctgcacagaggagctgccctggacctgagccccctgcacaggagcccccaccccagccggcaggccatcttctgctggatgtccttcagcgcctaccagacagccttcatctgcctgggcctgctggtgcagcagatcatcttcttcctgggcaccacagccctggccttcctggtgctgatgcctgtgctgcacggcaggaacctgctgctcttccgcagcctggagagctcctggcccttctggctgaccctggccctggccgtcatcctgcagaacatggccgcccactgggtgttcctggagacccatgatggccacccccagctgaccaacagaagagtgctgtatgctgccaccttcctgctcttccccctgaatgtgctggtgggcgccatggtggccacctggagggtgctgctgagcgccctgtacaatgccatccacctgggccagatggacctgagcctgctgccccccagggctgccaccctggaccccggctactacacctacagaaacttcctgaagattgaggtgtcccagagccacccagccatgacagccttctgcagcctgctgctgcaggcccagagcctgctgcccaggaccatggccgccccccaggacagcctgcggcctggagaggaggatgagggcatgcagctgctgcagaccaaggacagcatggccaagggggcccggcctggggccagccggggccgggcccgctggggcctggcctacaccctgctgcacaaccccaccctgcaggtgttcaggaagacagccctgctgggcgccaacggggcccagccctag

SEQ ID NO: 171830 - DNA, 993 bp, synthetic construct
  misc_feature 1..993: note = Description of Artificial Sequence: Synthetic coding sequence
  source 1..993: mol_type = other DNA
atgggcaagattgatgtggacaagatcctcttcttcaaccaggagatccggctgtggcagctgatcatggccaccccagaggagaacagcaacccccatgaccgggccaccccccagctgcctgcccagctgcaggagctggagcaccgggtggcccggcggcggctgagccaggcccggcaccgggccaccctggccgccctcttcaacaacctgaggaagacagtgtacagccagagcgacctgattgccagcaagtggcaggtgctgaacaaggccaagagccacatccctgagctggagcagaccctggacaacctgctgaagctgaaggccagcttcaacctggaggatggccacgccagcagcctggaggaggtgaagaaggagtatgcctccatgtacagcggaaatgacagcttcccccagaatggcagcagcccctggtacctgaacttctacaagcagaccatggacctgctgaccggcagcggcatcatcaccccccaggaggccgccctgcccatcgtgtctgctgccatcagccacctgtggcagaacctgtctgaggagaggaaggccagcctgcggcaggcctgggcccagaagcaccggggccctgccaccctggccgaggcctgccgggagcccgcctgtgccgagggctctgtgaaggacagcggcgtggacagccagggcgccagctgcagcctggtgtccaccccagaggagatcctgtttgaagatgcctttgatgtggccagcttcctggacaagtctgaggtgcccagcaccagcagcagcagctctgtgctggccagctgcaaccctgagaaccctgaggagaagttccagctgtacatgcagatcatcaacttcttcaagggcctgagctgtgccaacacccaggtgaagcaggaggccagcttccctgtggatgaggagatgatcatgctgcagtgcacagagacctttgatgatgaggacctgtag

SEQ ID NO: 171831 - DNA, 882 bp, synthetic construct
  misc_feature 1..882: note = Description of Artificial Sequence: Synthetic coding sequence
  source 1..882: mol_type = other DNA
atgggcttccctgctgctgccctgctgtgtgccctgtgctgcggcctgctggccccagctgcccgggccggctacagcgaggagcgctgctcctggaggggcagcggcctgacccaggagcccggctctgtgggccagctggccctggcctgtgccgagggcgctgtggagtggctgtacccagctggggccctgcggctgaccctgggcggccctgacccccgggcccggcccggcatcgcctgcctgcggcctgtgcggccctttgctggggcccaggtgtttgctgagagagctggaggagccctggagctgctgctggccgagggccctggccctgctgggggccgctgtgtgcgctggggcccccgggagcggcgggccctcttcctgcaggccaccccccaccaggacatcagcagaagagtggccgccttccgctttgagctgcgggaggatggccggcctgagctgcccccccaggcccacggcctgggcgtggatggagcctgccggccctgcagtgatgctgagctgctgctggccgcctgcaccagtgactttgtgattcatggcatcatccatggagtgacccatgatgtggagctgcaggagagcgtcatcaccgtggtggccgcccgggtgctgcggcagaccccacccctcttccaggccggccgcagcggggaccagggcctgaccagcatccgcacccccctgcgctgtggggtgcaccctggccctggcaccttcctgttcatgggctggagcagatttggagaggcccggctgggctgtgccccccgcttccaggagttccggcgggcctatgaagctgcccgggccgcccacctgcacccctgtgaggtggccctgcactag

SEQ ID NO: 171832 - DNA, 1197 bp, synthetic construct
  misc_feature 1..1197: note = Description of Artificial Sequence: Synthetic coding sequence
  source 1..1197: mol_type = other DNA
atgctgggccgcagcggctaccgggccctgcccctgggggactttgaccgcttccagcagagcagctttggcttcctgggcagccagaagggctgcctgagccctgagcggggcggcgtgggcaccggggctgatgtgccccagagctggcccagctgcctgtgccacggcctcatctccttcctgggcttcctgctgctgctggtgaccttccccatcagcggctggtttgccctgaagatcgtgcccacctatgaaagaatgattgtgttccggctgggccgcatccgcaccccccagggccctggcatggtgctgctgctgcccttcatcgacagcttccagagggtggacctgcggacccgggccttcaacgtgcccccctgcaagctggccagcaaggatggagctgtgctgtctgtgggcgcagatgtgcagttccgcatctgggaccctgtgctgtctgtgatgacagtgaaggacctgaacacagccaccaggatgacagcccagaatgccatgaccaaggccctgctgaagaggcccctgcgggagatccagatggagaagctgaagatcagtgaccagctgctgctggagatcaatgatgtgacccgggcctggggcctggaggtggacagagtggagctggccgtggaggccgtgctgcagcccccccaggacagccctgctggccccaacctggacagcaccctgcagcagctggccctgcacttcctgggcggctccatgaacagcatggccggcggggcccccagccctggccctgctgacacagtggagatggtgtctgaggtggagcccccagccccccaggtgggcgcccggagcagccccaagcagcccctggccgagggcctgctgacagccctgcagcccttcctgtctgaggccctggtgtcccaggtgggcgcctgctaccagttcaacgtggtgctgcccagcggcacccagagcgcctacttcctggacctgaccaccggccggggccgggtgggccatggagtgcctgatggcatcccagatgtggtggtggagatggccgaggccgacctgcgggccctgctgtgccgggagctgcggcccctgggcgcctacatgagcggccgcctgaaggtgaagggggacctggccatggccatgaagctggaggccgtgctgcgggccctgaagtag

SEQ ID NO: 171833 - DNA, 1047 bp, synthetic construct
  misc_feature 1..1047: note = Description of Artificial Sequence: Synthetic coding sequence
  source 1..1047: mol_type = other DNA
atgctgggccgcagcggctaccgggccctgcccctgggggactttgaccgcttccagcagagcagctttggcttcctgggcagccagaagggctgcctgagccctgagcggggcggcgtgggcaccggggctgatgtgccccagagctggcccagctgcctgtgccacggcctcatctccttcctgggcttcctgctgctgctggtgaccttccccatcagcggctggtttgccctgaagctggccagcaaggatggagctgtgctgtctgtgggcgcagatgtgcagttccgcatctgggaccctgtgctgtctgtgatgacagtgaaggacctgaacacagccaccaggatgacagcccagaatgccatgaccaaggccctgctgaagaggcccctgcgggagatccagatggagaagctgaagatcagtgaccagctgctgctggagatcaatgatgtgacccgggcctggggcctggaggtggacagagtggagctggccgtggaggccgtgctgcagcccccccaggacagccctgctggccccaacctggacagcaccctgcagcagctggccctgcacttcctgggcggctccatgaacagcatggccggcggggcccccagccctggccctgctgacacagtggagatggtgtctgaggtggagcccccagccccccaggtgggcgcccggagcagccccaagcagcccctggccgagggcctgctgacagccctgcagcccttcctgtctgaggccctggtgtcccaggtgggcgcctgctaccagttcaacgtggtgctgcccagcggcacccagagcgcctacttcctggacctgaccaccggccggggccgggtgggccatggagtgcctgatggcatcccagatgtggtggtggagatggccgaggccgacctgcgggccctgctgtgccgggagctgcggcccctgggcgcctacatgagcggccgcctgaaggtgaagggggacctggccatggccatgaagctggaggccgtgctgcgggccctgaagtag

SEQ ID NO: 171834 - DNA, 984 bp, synthetic construct
  misc_feature 1..984: note = Description of Artificial Sequence: Synthetic coding sequence
  source 1..984: mol_type = other DNA
atgctgggccgcagcggctaccgggccctgcccctgggggactttgaccgcttccagcagagcagctttggcttcctgggcagccagaagggctgcctgagccctgagcggggcggcgtgggcaccggggctgatgtgccccagagctggcccagctgcctgtgccacggcctcatctccttcctgggcttcctgctgctgctggtgaccttccccatcagcggctggtttgccctgaagatcgtgcccacctatgaaagaatgattgtgttccggctgggccgcatccgcaccccccagggccctggcatggtgctgctgctgcccttcatcgacagcttccagagggtggacctgcggacccgggccttcaacgtgcccccctgcaagctggccagcaaggatggagctgtgctgtctgtgggcgcagatgtgcagttccgcatctgggaccctgtgctgtctgtgatgacagtgaaggacctgaacacagccaccaggatgacagcccagaatgccatgaccaaggccctgctgaagaggcccctgcgggagatccagatggagaagctgaagatcagtgaccagctgctgctggagatcaatgatgtgacccgggcctggggcctggaggtggacagagtggagctggccgtggaggccgtgctgcagcccccccaggacagccctgctggccccaacctggacagcaccctgcagcagctggccctgcacttcctgggcggctccatgaacagcatggccggcggggcccccagccctggccctggccggggccgggtgggccacggcgtgcctgatggcatcccagatgtggtggtggagatggccgaggccgacctgcgggccctgctgtgccgggagctgcggcccctgggcgcctacatgagcggccgcctgaaggtgaagggggacctggccatggccatgaagctggaggccgtgctgcgggccctgaagtag

SEQ ID NO: 171835 - DNA, 1068 bp, synthetic construct
  misc_feature 1..1068: note = Description of Artificial Sequence: Synthetic coding sequence
  source 1..1068: mol_type = other DNA
atgccagatgtgccccagagctggcccagctgcctgtgccacggcctcatctccttcctgggcttcctgctgctgctggtgaccttccccatcagcggctggtttgccctgaagatcgtgcccacctatgaaagaatgattgtgttccggctgggccgcatccgcaccccccagggccctggcatggtgctgctgctgcccttcatcgacagcttccagagggtggacctgcggacccgggccttcaacgtgcccccctgcaagctggccagcaaggatggagctgtgctgtctgtgggcgcagatgtgcagttccgcatctgggaccctgtgctgtctgtgatgacagtgaaggacctgaacacagccaccaggatgacagcccagaatgccatgaccaaggccctgctgaagaggcccctgcgggagatccagatggagaagctgaagatcagtgaccagctgctgctggagatcaatgatgtgacccgggcctggggcctggaggtggacagagtggagctggccgtggaggccgtgctgcagcccccccaggacagccctgctggccccaacctggacagcaccctgcagcagctggccctgcacttcctgggcggctccatgaacagcatggccggcggggcccccagccctggccctgacacagtggagatggtgtctgaggtggagcccccagccccccaggtgggcgcccggagcagccccaagcagcccctggccgagggcctgctgacagccctgcagcccttcctgtctgaggccctggtgtcccaggtgggcgcctgctaccagttcaacgtggtgctgcccagcggcacccagagcgcctacttcctggacctgaccaccggccggggccgggtgggccacggcgtgcctgatggcatcccagatgtggtggtggagatggccgaggccgacctgcgggccctgctgtgccgggagctgcggcccctgggcgcctacatgagcggccgcctgaaggtgaagggggacctggccatggccatgaagctggaggccgtgctgcgggccctgaagtag

SEQ ID NO: 171836 - DNA, 933 bp, synthetic construct
  misc_feature 1..933: note = Description of Artificial Sequence: Synthetic coding sequence
  source 1..933: mol_type = other DNA
atgattgtgttccggctgggccgcatccgcaccccccagggccctggcatggtgctgctgctgcccttcatcgacagcttccagagggtggacctgcggacccgggccttcaacgtgcccccctgcaagctggccagcaaggatggagctgtgctgtctgtgggcgcagatgtgcagttccgcatctgggaccctgtgctgtctgtgatgacagtgaaggacctgaacacagccaccaggatgacagcccagaatgccatgaccaaggccctgctgaagaggcccctgcgggagatccagatggagaagctgaagatcagtgaccagctgctgctggagatcaatgatgtgacccgggcctggggcctggaggtggacagagtggagctggccgtggaggccgtgctgcagcccccccaggacagccctgctggccccaacctggacagcaccctgcagcagctggccctgcacttcctgggcggctccatgaacagcatggccggcggggcccccagccctggccctgacacagtggagatggtgtctgaggtggagcccccagccccccaggtgggcgcccggagcagccccaagcagcccctggccgagggcctgctgacagccctgcagcccttcctgtctgaggccctggtgtcccaggtgggcgcctgctaccagttcaacgtggtgctgcccagcggcacccagagcgcctacttcctggacctgaccaccggccggggccgggtgggccatggagtgcctgatggcatcccagatgtggtggtggagatggccgaggccgacctgcgggccctgctgtgccgggagctgcggcccctgggcgcctacatgagcggccgcctgaaggtgaagggggacctggccatggccatgaagctggaggccgtgctgcgggccctgaagtag

SEQ ID NO: 171837 - DNA, 1044 bp, synthetic construct
  misc_feature 1..1044: note = Description of Artificial Sequence: Synthetic coding sequence
  source 1..1044: mol_type = other DNA
atgctgggccgcagcggctaccgggccctgcccctgggggactttgaccgcttccagcagagcagctttggcttcctgggcagccagaagggctgcctgagccctgagcggggcggcgtgggcaccggggctgatgtgccccagagctggcccagctgcctgtgccacggcctcatctccttcctgggcttcctgctgctgctggtgaccttccccatcagcggctggtttgccctgaagctggccagcaaggatggagctgtgctgtctgtgggcgcagatgtgcagttccgcatctgggaccctgtgctgtctgtgatgacagtgaaggacctgaacacagccaccaggatgacagcccagaatgccatgaccaaggccctgctgaagaggcccctgcgggagatccagatggagaagctgaagatcagtgaccagctgctgctggagatcaatgatgtgacccgggcctggggcctggaggtggacagagtggagctggccgtggaggccgtgctgcagcccccccaggacagccctgctggccccaacctggacagcaccctgcagcagctggccctgcacttcctgggcggctccatgaacagcatggccggcggggcccccagccctggccctgacacagtggagatggtgtctgaggtggagcccccagccccccaggtgggcgcccggagcagccccaagcagcccctggccgagggcctgctgacagccctgcagcccttcctgtctgaggccctggtgtcccaggtgggcgcctgctaccagttcaacgtggtgctgcccagcggcacccagagcgcctacttcctggacctgaccaccggccggggccgggtgggccacggcgtgcctgatggcatcccagatgtggtggtggagatggccgaggccgacctgcgggccctgctgtgccgggagctgcggcccctgggcgcctacatgagcggccgcctgaaggtgaagggggacctggccatggccatgaagctggaggccgtgctgcgggccctgaagtag

SEQ ID NO: 171838 - DNA, 1071 bp, synthetic construct
  misc_feature 1..1071: note = Description of Artificial Sequence: Synthetic coding sequence
  source 1..1071: mol_type = other DNA
atgctggcccgggccgcccggggcactggagccctgctgctgcggggcagcctgctggccagcggccgggccccccggcgggccagcagcggcctgcccaggaacacagtggtgctgtttgtgccccagcaggaggcctgggtggtggagaggatgggccgcttccaccgcatcctggagcccggcctgaacatcctgatccctgtgctggaccgcatccgctacgtgcagagcctgaaggagatcgtcatcaacgtgcctgagcagagcgctgtgaccctggacaacgtgaccctgcagattgatggagtgctgtacctgcgcatcatggacccctacaaggccagctatggagtggaggaccctgaatatgctgtgacccagctggcccagaccaccatgaggtctgagctgggcaagctgagcctggacaaggtgttccgggagcgggagagcctgaatgccagcatcgtggatgccatcaaccaggccgctgactgctggggcatccgctgcctgcgctatgagatcaaggacatccacgtgcccccccgggtgaaggagagcatgcagatgcaggtggaggccgagaggaggaagagggccaccgtgctggagagcgagggcacccgggagagcgccatcaacgtggccgagggcaagaagcaggcccagatcctggccagcgaggccgagaaggccgagcagatcaaccaggccgccggggaggccagcgctgtgctggccaaggccaaggccaaggccgaggccatccgcatcctggccgccgccctgacccagcacaatggagatgctgctgccagcctgactgtggccgagcagtatgtgtctgccttcagcaagctggccaaggacagcaacaccatcctgctgcccagcaaccctggagatgtgacctccatggtggcccaggccatgggcgtgtatggagccctgaccaaggcccctgtgcccggcaccccagacagcctgagcagcggcagcagcagagatgtgcagggcacagatgccagcctggatgaggagctggacagagtgaagatgtcctag

SEQ ID NO: 171839 - DNA, 936 bp, synthetic construct
  misc_feature 1..936: note = Description of Artificial Sequence: Synthetic coding sequence
  source 1..936: mol_type = other DNA
atgctggcccgggccgcccggggcactggagccctgctgctgcggggcagcctgctggccagcggccgggccccccggcgggccagcagcggcctgcccaggaacacagtggtgctgtttgtgccccagcaggaggcctgggtggtggagaggatgggccgcttccaccgcatcctggagcccggcctgaacatcctgatccctgtgctggaccgcatccgctacgtgcagagcctgaaggagatcgtcatcaacgtgcctgagcagagcgctgtgaccctggacaacgtgaccctgcagattgatggagtgctgtacctgcgcatcatggacccctacaaggccagctatggagtggaggaccctgaatatgctgtgacccagctggcccagaccaccatgaggtctgagctgggcaagctgagcctggacaaggtgttccgggtggaggccgagaggaggaagagggccaccgtgctggagagcgagggcacccgggagagcgccatcaacgtggccgagggcaagaagcaggcccagatcctggccagcgaggccgagaaggccgagcagatcaaccaggccgccggggaggccagcgctgtgctggccaaggccaaggccaaggccgaggccatccgcatcctggccgccgccctgacccagcacaatggagatgctgctgccagcctgactgtggccgagcagtatgtgtctgccttcagcaagctggccaaggacagcaacaccatcctgctgcccagcaaccctggagatgtgacctccatggtggcccaggccatgggcgtgtatggagccctgaccaaggcccctgtgcccggcaccccagacagcctgagcagcggcagcagcagagatgtgcagggcacagatgccagcctggatgaggagctggacagagtgaagatgtcctag

SEQ ID NO: 171840 - DNA, 876 bp, synthetic construct
  misc_feature 1..876: note = Description of Artificial Sequence: Synthetic coding sequence
  source 1..876: mol_type = other DNA
atggacagccgggtgagcagccctgagaagcaggacaaggagaactttgtgggcgtgaacaacaagaggctgggcgtgtgtggctggatcctcttcagcctgtccttcctgctggtgatcatcaccttccccatcagcatctggatgtgcctgaagatcatcaaggagtatgaaagagctgtggtgttccggctgggccgcatccaggccgacaaggccaagggccctggcctcatcctggtgctgccctgcattgatgtgtttgtgaaggtggacctgaggacagtgacctgcaacatccccccccaggagatcctgacccgggacagcgtgaccacccaggtggatggagtggtgtactaccgcatctacagcgctgtgtctgctgtggccaacgtgaatgatgtgcaccaggccaccttcctgctggcccagaccaccctgagaaatgtgctgggcacccagaccctgagccagatcctggccggccgggaggagatcgcccacagcatccagaccctgctggatgatgccacagagctgtggggcatccgggtggcccgggtggagatcaaggatgtgcgcatccctgtgcagctgcagaggtccatggctgctgaggccgaggccacccgggaggcccgggccaaggtgctggccgctgagggggagatgaatgccagcaagagcctgaagagcgcctccatggtgctggccgagagccccatcgccctgcagctgcgctacctgcagaccctgagcacagtggccacagagaagaacagcaccatcgtgttccccctgcccatgaacatcctggagggcatcggcggcgtgtcctatgacaaccacaagaagctgcccaacaaggcctag

SEQ ID NO: 171841 - DNA, 849 bp, synthetic construct
  misc_feature 1..849: note = Description of Artificial Sequence: Synthetic coding sequence
  source 1..849: mol_type = other DNA
atgaacagcagaggagagctggtgggcgtgaacaacaagaggctgggcgtgtgtggctggatcctcttcagcctgtccttcctgctggtgatcatcaccttccccatcagcatctggatgtgcctgaagatcatcaaggagtatgaaagagctgtggtgttccggctgggccgcatccaggccgacaaggccaagggccctggcctcatcctggtgctgccctgcattgatgtgtttgtgaaggtggacctgaggacagtgacctgcaacatccccccccaggagatcctgacccgggacagcgtgaccacccaggtggatggagtggtgtactaccgcatctacagcgctgtgtctgctgtggccaacgtgaatgatgtgcaccaggccaccttcctgctggcccagaccaccctgagaaatgtgctgggcacccagaccctgagccagatcctggccggccgggaggagatcgcccacagcatccagaccctgctggatgatgccacagagctgtggggcatccgggtggcccgggtggagatcaaggatgtgcgcatccctgtgcagctgcagaggtccatggctgctgaggccgaggccacccgggaggcccgggccaaggtgctggccgctgagggggagatgaatgccagcaagagcctgaagagcgcctccatggtgctggccgagagccccatcgccctgcagctgcgctacctgcagaccctgagcacagtggccacagagaagaacagcaccatcgtgttccccctgcccatgaacatcctggagggcattggaggagtgtcctatgacaaccacaagaagctgcccaacaaggcctag

SEQ ID NO: 171842 - DNA, 2970 bp, synthetic construct
  misc_feature 1..2970: note = Description of Artificial Sequence: Synthetic coding sequence
  source 1..2970: mol_type = other DNA
atggcccggcctgtgcagctggcccctggcagcctggccctggtgctgtgccgcctggaggcccagaaggctgctggagctgctgaggagcccggcggccgggctgtgttccgggccttcagaagagccaatgcccgctgcttctggaatgcccggctggcccgggccgccagccggctggccttccagggctggctgcggcggggcgtgctgctggtgcgggcccccccagcctgcctgcaggtgctgagagatgcctggaggagaagagccctgcggcccccccggggcttccgcatccgggctgtgggagatgtgtttcctgtgcagatgaaccccatcacccagagccagtttgtgcccctgggggaggtgctgtgctgtgccatcagtgacatgaacacagcccagatcgtggtgacccaggagagcctgctggagcggctgatgaagcactacccaggcatcgccatccccagcgaggacatcctgtacaccaccctgggcaccctcatcaaggagaggaagatctaccacactggagagggctacttcatcgtgaccccccagacctacttcatcaccaacaccaccacccaggagaacaagaggatgctgcccagtgatgagagccggctgatgcctgcctccatgacctacctggtgtccatggagagctgtgccgagagcgcccaggagaatgctgcccccatcagccactgccagagctgccagtgcttccgggacatgcacacccaggatgtgcaggaggcccctgtggccgctgaggtgaccaggaagagccaccggggcctgggggagagcgtgtcctgggtgcagaatggagctgtgtctgtgtctgctgagcaccacatctgtgagagcaccaagcccctgccctacacccgggacaaggagaagggcaagaagtttggcttcagcctgctgtggaggagcctgagcaggaaggagaagcccaagacagagcacagcagcttcagcgcccagttccccccagaggagtggcctgtgagagatgaagatgacctggacaacatccccagagatgtggagcacgagatcatcaagaggatcaaccccatcctgactgtggacaacctgatcaagcacacagtgctgatgcagaagtatgaggagcagaagaagtacaacagccagggcaccagcacagacatgctgaccatcggccacaagtaccccagcaaggagggcgtgaagaagaggcagggcctgagcgccaagccccagggccagggccacagcagaagagacagacacaaggccaggaaccagggcagcgagttccagcccggcagcatccggctggagaagcaccccaagctgcctgccacccagcccatcccccgcatcaagagccccaatgagatggtgggccagaagcccctgggggagatcaccaccgtgctgggcagccacctgatctacaagaagaggatcagcaaccccttccagggcctgagccaccggggcagcaccatcagcaagggccacaagatccagaagaccagtgacctgaagcccagccagacaggccccaaggagaagcccttccagaagcccaggagcctggacagcagccgcatctttgatggcaaggccaaggagccctatgcagagcagcccaatgacaagatggaggccgagagcatctacatcaatgaccccaccgtgaagcccatcaatgatgacttccggggccacctgttcagccacccccagcagagcatgctgcagaatgatggcaagtgctgccccttcatggagagcatgctgcgctatgaggtgtatggaggagaaaatgaggtgattcctgaggtgctgaggaagagccacagccactttgacaagctgggggagaccaagcagaccccccacagcctgcccagcagaggagccagcttcagtgacaggacccccagcgcctgccgcctggtggacaacaccatccaccagttccagaacctgggcctgctggactaccctgtgggcgtgaaccccctgcggcaggccgcccggcaggacaaggacagcgaggagctgctgaggaaaggatttgtgcaggatgctgagaccaccagcctggagaatgagcagctgagcaatgatgaccaggccctgtaccagaatgaggtggaggatgatgatggagcctgcagcagcctgtacctggaggaggatgacatcagtgaaaatgatgacctgcggcagatgctgcccggccacagccagtacagcttcaccggcggcagccagggcaaccacctgggcaagcagaaggtgattgaaagaagcctgacagagtacaacagcaccatggagcgggtggagagccaggtgctgaagagaaatgaatgctacaagcccaccggcctgcacgccaccccaggagagagccaggagcccaacctgtctgctgagagctgtggcctgaacagcggggcccagtttggcttcaactatgaggaggagcccagcgtggccaagtgtgtgcaggccagcgccccagcagatgagcgcatctttgactactacagcgccaggaaggccagctttgaagctgaggtgatccaggacaccatcggggacaccgggaagaagccagcctcctggagccagagcccccagaaccaggagatgaggaagcacttcccccagaagttccagctgttcaacaccagccacatgcctgtgctggcccaggatgtgcagtatgagcacagccacctggagggcacagagaaccacagcatggccggggacagcggcatcgacagccccaggacccagagcctgggcagcaacaacagcgtcatcctggatggcctgaagaggcggcagaacttcctgcagaatgtggagggcaccaagagcagccagcccctgaccagcaacagcctgctgcccctgacccctgtgatcaacgtgtag

SEQ ID NO: 171843 - DNA, 510 bp, synthetic construct
  misc_feature 1..510: note = Description of Artificial Sequence: Synthetic coding sequence
  source 1..510: mol_type = other DNA
atggcccggcctgtgcagctggcccctggcagcctggccctggtgctgtgccgcctggaggcccagaaggctgctggagctgctgaggagcccggcggccgggctgtgttccgggccttcagaagagccaatgcccgctgcttctggaatgcccggctggcccgggccgccagccggctggccttccagggctggctgcggcggggcgtgctgctggtgcgggcccccccagcctgcctgcaggtgctgagagatgcctggaggagaagagccctgcggcccccccggggcttccgcatccgggctgtgggagatgtgtttcctgtgcagatgaaccccatcacccagagccagtttgtgcccctgggggaggtgctgtgctgtgccatcagtgacatgaacacagcccagatcgtggtgacccaggagagcctgctggagcggctgatgaagcactacccaggccaccgggtgtgggacctgatcatccagagcttctggatggactag

SEQ ID NO: 171844 - DNA, 684 bp, synthetic construct
  misc_feature 1..684: note = Description of Artificial Sequence: Synthetic coding sequence
  source 1..684: mol_type = other DNA
atggcccggcctgtgcagctggcccctggcagcctggccctggtgctgtgccgcctggaggcccagaaggctgctggagctgctgaggagcccggcggccgggctgtgttccgggccttcagaagagccaatgcccgctgcttctggaatgcccggctggcccgggccgccagccggctggccttccagggctggctgcggcggggcgtgctgctggtgcgggcccccccagcctgcctgcaggtgctgagagatgcctggaggagaagagccctgcggcccccccggggcttccgcatccgggctgtgggagatgtgtttcctgtgcagatgaaccccatcacccagagccagtttgtgcccctgggggaggtgctgtgctgtgccatcagtgacatgaacacagcccagatcgtggtgacccaggagagcctgctggagcggctgatgaagcactacccaggcatcgccatccccagcgaggacatcctgtacaccaccctgggcaccctcatcaaggagaggaagatctaccacactggagagggctacttcatcgtgaccccccagacctacttcatcaccaacaccaccacccaggagaacaagaggatgctgcccagtgatgagagccggctgatgcctgcctccatgacctacctggacacagaaagtggcatctag

SEQ ID NO: 171845 - DNA, 2970 bp, synthetic construct; identical to SEQ ID NO: 171842
  misc_feature 1..2970: note = Description of Artificial Sequence: Synthetic coding sequence
  source 1..2970: mol_type = other DNA

SEQ ID NO: 171846 - DNA, 2640 bp, synthetic construct
  misc_feature 1..2640: note = Description of Artificial Sequence: Synthetic coding sequence
  source 1..2640: mol_type = other DNA
atgaaccccatcacccagagccagtttgtgcccctgggggaggtgctgtgctgtgccatcagtgacatgaacacagcccagatcgtggtgacccaggagagcctgctggagcggctgatgaagcactacccaggcatcgccatccccagcgaggacatcctgtacaccaccctgggcaccctcatcaaggagaggaagatctaccacactggagagggctacttcatcgtgaccccccagacctacttcatcaccaacaccaccacccaggagaacaagaggatgctgcccagtgatgagagccggctgatgcctgcctccatgacctacctggtgtccatggagagctgtgccgagagcgcccaggagaatgctgcccccatcagccactgccagagctgccagtgcttccgggacatgcacacccaggatgtgcaggaggcccctgtggccgctgaggtgaccaggaagagccaccggggcctgggggagagcgtgtcctgggtgcagaatggagctgtgtctgtgtctgctgagcaccacatctgtgagagcaccaagcccctgccctacacccgggacaaggagaagggcaagaagtttggcttcagcctgctgtggaggagcctgagcaggaaggagaagcccaagacagagcacagcagcttcagcgcccagttccccccagaggagtggcctgtgagagatgaagatgacctggacaacatccccagagatgtggagcacgagatcatcaagaggatcaaccccatcctgactgtggacaacctgatcaagcacacagtgctgatgcagaagtatgaggagcagaagaagtacaacagccagggcaccagcacagacatgctgaccatcggccacaagtaccccagcaaggagggcgtgaagaagaggcagggcctgagcgccaagccccagggccagggccacagcagaagagacagacacaaggccaggaaccagggcagcgagttccagcccggcagcatccggctggagaagcaccccaagctgcctgccacccagcccatcccccgcatcaagagccccaatgagatggtgggccagaagcccctgggggagatcaccaccgtgctgggcagccacctgatctacaagaagaggatcagcaaccccttccagggcctgagccaccggggcagcaccatcagcaagggccacaagatccagaagaccagtgacctgaagcccagccagacaggccccaaggagaagcccttccagaagcccaggagcctggacagcagccgcatctttgatggcaaggccaaggagccctatgcagagcagcccaatgacaagatggaggccgagagcatctacatcaatgaccccaccgtgaagcccatcaatgatgacttccggggccacctgttcagccacccccagcagagcatgctgcagaatgatggcaagtgctgccccttcatggagagcatgctgcgctatgaggtgtatggaggagaaaatgaggtgattcctgaggtgctgaggaagagccacagccactttgacaagctgggggagaccaagcagaccccccacagcctgcccagcagaggagccagcttcagtgacaggacccccagcgcctgccgcctggtggacaacaccatccaccagttccagaacctgggcctgctggactaccctgtgggcgtgaaccccctgcggcaggccgcccggcaggacaaggacagcgaggagctgctgaggaaaggatttgtgcaggatgctgagaccaccagcctggagaatgagcagctgagcaatgatgaccaggccctgtaccagaatgaggtggaggatgatgatggagcctgcagcagcctgtacctggaggaggatgacatcagtgaaaatgatgacctgcggcagatgctgcccggccacagccagtacagcttcaccggcggcagccagggcaaccacctgggcaagcagaaggtgattgaaagaagcctgacagagtacaacagcaccatggagcgggtggagagccaggtgctgaagagaaatgaatgctacaagcccaccggcctgcacgccaccccaggagagagccaggagcccaacctgtctgctgagagctgtggcctgaacagcggggcccagtttggcttcaactatgaggaggagcccagcgtggccaagtgtgtgcaggccagcgccccagcagatgagcgcatctttgactactacagcgccaggaaggccagctttgaagctgaggtgatccaggacaccatcggggacaccgggaagaagccagcctcctggagccagagcccccagaaccaggagatgaggaagcacttcccccagaagttccagctgttcaacaccagccacatgcctgtgctggcccaggatgtgcagtatgagcacagccacctggagggcacagagaaccacagcatggccggggacagcggcatcgacagccccaggacccagagcctgggcagcaacaacagcgtcatcctggatggcctgaagaggcggcagaacttcctgcagaatgtggagggcaccaagagcagccagcccctgaccagcaacagcctgctgcccctgacccctgtgatcaacgtgtag

SEQ ID NO: 171847 - DNA, 4179 bp, synthetic construct
  misc_feature 1..4179: note = Description of Artificial Sequence: Synthetic coding sequence
  source 1..4179: mol_type = other DNA
atggtggagcccggccaggacctgctgctggccgccctgtctgagagcggcatcagccccaatgacctgtttgatattgatggaggagatgctggcctggccacccccatgcccaccccatctgtgcagcagagcgtgcccctgagcgccctggagctgggcctggagacagaagctgctgtgcctgtgaagcaggagcctgagaccgtgcccaccccagccctgctgaatgtgcggcagccccccagcaccaccacctttgtgctgaaccagatcaaccacctgccccccctgggcagcaccatcgtgatgaccaagaccccacctgtgaccaccaaccggcagaccatcaccctgaccaagttcatccagaccacagccagcacccggcccagcgtgtctgcccccaccgtgagaaatgccatgaccagcgcccccagcaaggaccaggtgcagctgaaggacctgctgaagaacaacagcctgaatgagctgatgaagctgaagcccccagccaacatcgcccagcctgtggccacagctgccacagatgtgtccaatggaacagtgaagaaggagagcagcaacaaggagggcgccaggatgtggatcaatgacatgaagatgaggagcttcagccccaccatgaaggtgcctgtggtgaaggaggatgatgagcctgaggaggaggatgaggaggagatgggccacgccgagacctacgccgagtacatgcccatcaagctgaagattggcctgcggcacccagatgctgtggtggagaccagcagcctgagctctgtgaccccaccagatgtgtggtacaagaccagcatcagcgaggagaccatcgacaatggctggctgagcgccctgcagctggaggccatcacctacgccgcccagcagcacgagaccttcctgcccaacggggaccgggccggcttcctgattggagatggagctggggtgggcaagggccgcaccatcgccggcatcatctatgagaactacctgctgagcaggaagagggccctgtggttctctgtgtccaatgacctgaagtatgatgctgagcgggacctgcgggacattggagccaagaacatcctggtgcacagcctgaacaagttcaagtatggcaagatcagcagcaagcacaacggctctgtgaagaagggcgtcatctttgccacctacagcagcctcatcggggagagccagagcggcggcaagtacaagacccggctgaagcagctgctgcactggtgtggagatgactttgatggagtcatcgtgtttgatgagtgccacaaggccaagaacctgtgccctgtgggcagcagcaagcccaccaagacaggcctggccgtgctggagctgcagaacaagctgcccaaggcccgggtggtgtatgccagcgccaccggggccagcgagcccaggaacatggcctacatgaaccggctgggcatctggggcgagggcacccccttccgggagttcagtgacttcatccaggccgtggagaggagaggagtgggcgccatggagatcgtggccatggacatgaagctgcggggcatgtacatcgcccggcagctgtccttcaccggggtgaccttcaagattgaggaggtgctgctgagccagagctatgtgaagatgtacaacaaggctgtgaagctgtgggtgattgcccgggagcgcttccagcaggccgctgacctgattgatgctgagcagaggatgaagaagtccatgtggggccagttctggagcgcccaccagcgcttcttcaagtacctgtgcatcgccagcaaggtgaagagggtggtgcagctggcccgggaggagatcaagaatggaaaatgtgtggtgattggcctgcagagcactggagaggcccggaccctggaggccctggaggagggcggcggggagctgaatgactttgtgtccacagccaagggcgtgctgcagagcctcatcgagaagcacttccctgccccagacaggaagaagctgtacagcctgctgggcatcgacctgacagcccccagcaacaacagcagcccccgggacagcccctgcaaggagaacaagatcaagaagaggaaaggagaggagatcacccgggaggccaagaaggccaggaaggtgggcggcctgaccggcagcagcagtgatgacagcggcagcgagagtgatgccagtgacaatgaggagagtgactatgagagcagcaagaacatgagcagtggagatgatgatgacttcaaccccttcctggatgagagcaatgaagatgatgaaaatgacccctggctgatcaggaaggaccacaagaagaacaaggagaagaagaagaagaagagcattgatcctgacagcatccagagcgccctgctggccagcggcctgggcagcaagaggcccagcttcagcagcacccctgtgatcagccctgcccccaacagcaccccagccaacagcaacaccaacagcaacagcagcctcatcaccagccaggatgctgtggagcgggcccagcagatgaagaaggacctgctggacaagctggagaagctggccgaggacctgccccccaacaccctggatgagctgattgatgagctgggcggcccagaaaatgtggccgagatgacaggcaggaagggccgggtggtgtccaatgatgatggcagcatctcctatgagagccgctctgagctggatgtgcctgtggagatcctgaacatcacagagaagcagcgcttcatggatggagacaagaacatcgccatcatcagcgaggccgccagcagcggcatcagcctgcaggccgacagaagagccaagaaccagaggcggcgggtgcacatgaccctggagctgccctggagcgctgaccgggccatccagcagtttggaagaacccacaggagcaaccaggtgacagccccagaatatgtgttcctgatcagcgagctggccggggagcagagatttgccagcatcgtggccaagaggctggagagcctgggcgccctgacccacggggacagaagagccacagagagccgggacctgagccgcttcaactttgacaacaagtatggaagaaatgccctggagatcgtgatgaagagcatcgtgaacctggacagccccatggtgagccccccaccagactacccaggagagttcttcaaggatgtgcggcagggcctgattggagtgggcctcatcaacgtggaggacaggagcggcatcctgaccctggacaaggactacaacaacatcggcaagttcctgaaccgcatcctgggcatggaggtgcaccagcagaatgccctcttccagtactttgctgacaccctgacagctgtggtgcagaatgccaagaagaatggccgctatgacatgggcatcctggacctgggcagcggagatgagaaggtgaggaagagtgatgtgaagaagttcctgaccccaggctacagcaccagcggccacgtggagctgtacaccatctctgtggagcggggcatgtcctgggaggaggccaccaagatctgggccgagctgaccggcccagatgatggcttctacctgagcctgcagatccggaacaacaagaagacagccatcctggtgaaggaggtgaaccccaagaagaagctgttcctggtgtaccggcccaacacaggcaagcagctgaagctggagatctatgctgacctgaagaagaagtacaagaaggtggtgtctgatgatgccctgatgcactggctggaccagtacaacagcagcgctgacacctgcacccacgcctactggaggggcaactgcaagaaggccagcctgggcctggtgtgtgagatcggcctgcgctgcaggacctactacgtgctgtgtggctctgtgctgtctgtgtggaccaaggtggagggcgtgctggcctctgtgtctggcaccaacgtgaagatgcagatcgtgcggctgaggacagaagatggccagagaattgtgggcctcatcatcccagccaactgtgtgagccccctggtgaacctgctgagcaccagtgaccagagccagcagctggccgtgcagcagaagcagctgtggcagcagcaccacccccagagcatcaccaacctgagcaatgcctag

SEQ ID NO: 171848 - DNA, 4182 bp, synthetic construct
  misc_feature 1..4182: note = Description of Artificial Sequence: Synthetic coding sequence
  source 1..4182: mol_type = other DNA
atggtggagcccggccaggacctgctgctggccgccctgtctgagagcggcatcagccccaatgacctgtttgatattgatggaggagatgctggcctggccacccccatgcccaccccatctgtgcagcagagcgtgcccctgagcgccctggagctgggcctggagacagaagctgctgtgcctgtgaagcaggagcctgagaccgtgcccaccccagccctgctgaatgtgcggcagcagccccccagcaccaccacctttgtgctgaaccagatcaaccacctgccccccctgggcagcaccatcgtgatgaccaagaccccacctgtgaccaccaaccggcagaccatcaccctgaccaagttcatccagaccacagccagcacccggcccagcgtgtctgcccccaccgtgagaaatgccatgaccagcgcccccagcaaggaccaggtgcagctgaaggacctgctgaagaacaacagcctgaatgagctgatgaagctgaagcccccagccaacatcgcccagcctgtggccacagctgccacagatgtgtccaatggcaccgtgaagaaggagagcagcaacaaggagggcgccaggatgtggatcaatgacatgaagatgaggagcttcagccccaccatgaaggtgcctgtggtgaaggaggatgatgagcctgaggaggaggatgaggaggagatgggccatgctgagacctatgcagagtacatgcccatcaagctgaagattggcctgcggcacccagatgctgtggtggagaccagcagcctgagctctgtgaccccaccagatgtgtggtacaagaccagcatcagcgaggagaccatcgacaatggctggctgagcgccctgcagctggaggccatcacctatgctgcccagcagcacgagaccttcctgcccaatggagacagagctggcttcctgattggagatggagctggggtgggcaaaggaagaaccatcgccggcatcatctatgagaactacctgctgagcaggaagagggccctgtggttctctgtgtccaatgacctgaagtatgatgctgagcgggacctgcgggacatcggggccaagaacatcctggtgcacagcctgaacaagttcaagtatggcaagatcagcagcaagcacaatggatctgtgaagaagggcgtcatctttgccacctacagcagcctgattggagagagccagagcggcggcaagtacaagacccggctgaagcagctgctgcactggtgtggagatgactttgatggagtgattgtgtttgatgagtgccacaaggccaagaacctgtgccctgtgggcagcagcaagcccaccaagacaggcctggccgtgctggagctgcagaacaagctgcccaaggcccgggtggtgtatgccagcgccactggagccagcgagcccaggaacatggcctacatgaaccggctgggcatctggggcgagggcacccccttccgggagttcagtgacttcatccaggccgtggagcggcggggcgtgggcgccatggagatcgtggccatggacatgaagctgcggggcatgtacatcgcccggcagctgtccttcaccggggtgaccttcaagattgaggaggtgctgctgagccagagctatgtgaagatgtacaacaaggctgtgaagctgtgggtgattgcccgggagcgcttccagcaggccgctgacctgattgatgctgagcagaggatgaagaagtccatgtggggccagttctggagcgcccaccagcgcttcttcaagtacctgtgcatcgccagcaaggtgaagagggtggtgcagctggcccgggaggagatcaagaatggaaaatgtgtggtgattggcctgcagagcactggagaggcccggaccctggaggccctggaggagggcggcggggagctgaatgactttgtgtccacagccaagggcgtgctgcagagcctgattgagaagcacttccctgccccagacaggaagaagctgtacagcctgctgggcatcgacctgacagcccccagcaacaacagcagcccccgggacagcccctgcaaggagaacaagatcaagaagaggaagggggaggagatcacccgggaggccaagaaggccaggaaggtgggcggcctgaccggcagcagcagtgatgattctggcagcgagagtgatgccagtgacaatgaggagagtgactatgagagcagcaagaacatgagcagtggagatgatgatgacttcaaccccttcctggatgagagcaatgaagatgatgaaaatgacccctggctgatcaggaaggaccacaagaagaacaaggagaagaagaagaagaagagcattgatcctgacagcatccagagcgccctgctggccagcggcctgggcagcaagaggcccagcttcagcagcacccctgtgatcagccctgcccccaacagcaccccagccaacagcaacaccaacagcaacagcagcctcatcaccagccaggatgctgtggagcgggcccagcagatgaagaaggacctgctggacaagctggagaagctggccgaggacctgccccccaacaccctggatgagctgattgatgagctgggcggcccagaaaatgtggccgagatgactggaaggaagggccgggtggtgtccaatgatgatggcagcatctcctatgagagccgctctgagctggatgtgcctgtggagatcctgaacatcacagagaagcagcgcttcatggatggagacaagaacatcgccatcatcagcgaggccgccagcagcggcatcagcctgcaggccgaccggcgggccaagaaccagaggagaagagtgcacatgaccctggagctgccctggagcgctgaccgggccatccagcagtttggccgcacccacaggagcaaccaggtgacagccccagaatatgtgttcctgatcagcgagctggccggggagcagagatttgccagcatcgtggccaagaggctggagagcctgggcgccctgacccatggagaccggcgggccacagagagccgggacctgagccgcttcaactttgacaacaagtatggaagaaatgccctggagatcgtgatgaagagcatcgtgaacctggacagccccatggtgtccccacctccagactacccaggagagttcttcaaggatgtgcggcagggcctcatcggcgtgggcctcatcaacgtggaggacagaagtggcatcctgaccctggacaaggactacaacaacatcggcaagttcctgaaccgcatcctgggcatggaggtgcaccagcagaatgccctcttccagtactttgctgacaccctgacagctgtggtgcagaatgccaagaagaatggccgctatgacatgggcatcctggacctgggcagcggagatgagaaggtgaggaagagtgatgtgaagaagttcctgaccccaggctacagcaccagcggccacgtggagctgtacaccatctctgtggagcggggcatgtcctgggaggaggccaccaagatctgggccgagctgactggaccagatgatggcttctacctgagcctgcagatccggaacaacaagaagacagccatcctggtgaaggaggtgaaccccaagaagaagctgttcctggtgtaccggcccaacacaggcaagcagctgaagctggagatctatgctgacctgaagaagaagtacaagaaggtggtgtctgatgatgccctgatgcactggctggaccagtacaacagcagcgctgacacctgcacccacgcctactggaggggcaactgcaagaaggccagcctgggcctggtgtgtgaaattggcctgcgctgcaggacctactacgtgctgtgtggctctgtgctgtctgtgtggaccaaggtggagggcgtgctggcctctgtgtctggcaccaacgtgaagatgcagatcgtgcggctgaggacagaagatggccagagaattgtgggcctcatcatcccagccaactgtgtgagccccctggtgaacctgctgagcaccagtgaccagagccagcagctggccgtgcagcagaagcagctgtggcagcagcaccacccccagagcatcaccaacctgagcaatgcctag

SEQ ID NO: 171849 - DNA, 2199 bp, synthetic construct
  misc_feature 1..2199: note = Description of Artificial Sequence: Synthetic coding sequence
  source 1..2199: mol_type = other DNA
atggtggagcccggccaggacctgctgctggccgccctgtctgagagcggcatcagccccaatgacctgtttgatattgatggaggagatgctggcctggccacccccatgcccaccccatctgtgcagcagagcgtgcccctgagcgccctggagctgggcctggagacagaagctgctgtgcctgtgaagcaggagcctgagaccgtgcccaccccagccctgctgaatgtgcggcagccccccagcaccaccacctttgtgctgaaccagatcaaccacctgccccccctgggcagcaccatcgtgatgaccaagaccccacctgtgaccaccaaccggcagaccatcaccctgaccaagttcatccagaccacagccagcacccggcccagcgtgtctgcccccaccgtgagaaatgccatgaccagcgcccccagcaaggaccaggtgcagctgaaggacctgctgaagaacaacagcctgaatgagctgatgaagctgaagcccccagccaacatcgcccagcctgtggccacagctgccacagatgtgtccaatggaacagtgaagaaggagagcagcaacaaggagggcgccaggatgtggatcaatgacatgaagatgaggagcttcagccccaccatgaaggtgcctgtggtgaaggaggatgatgagcctgaggaggaggatgaggaggagatgggccacgccgagacctacgccgagtacatgcccatcaagctgaagattggcctgcggcacccagatgctgtggtggagaccagcagcctgagctctgtgaccccaccagatgtgtggtacaagaccagcatcagcgaggagaccatcgacaatggctggctgagcgccctgcagctggaggccatcacctacgccgcccagcagcacgagaccttcctgcccaacggggaccgggccggcttcctgattggagatggagctggggtgggcaagggccgcaccatcgccggcatcatctatgagaactacctgctgagcaggaagagggccctgtggttctctgtgtccaatgacctgaagtatgatgctgagcgggacctgcgggacattggagccaagaacatcctggtgcacagcctgaacaagttcaagtatggcaagatcagcagcaagcacaacggctctgtgaagaagggcgtcatctttgccacctacagcagcctcatcggggagagccagagcggcggcaagtacaagacccggctgaagcagctgctgcactggtgtggagatgactttgatggagtcatcgtgtttgatgagtgccacaaggccaagaacctgtgccctgtgggcagcagcaagcccaccaagacaggcctggccgtgctggagctgcagaacaagctgcccaaggcccgggtggtgtatgccagcgccaccggggccagcgagcccaggaacatggcctacatgaaccggctgggcatctggggcgagggcacccccttccgggagttcagtgacttcatccaggccgtggagaggagaggagtgggcgccatggagatcgtggccatggacatgaagctgcggggcatgtacatcgcccggcagctgtccttcaccggggtgaccttcaagattgaggaggtgctgctgagccagagctatgtgaagatgtacaacaaggctgtgaagctgtgggtgattgcccgggagcgcttccagcaggccgctgacctgattgatgctgagcagaggatgaagaagtccatgtggggccagttctggagcgcccaccagcgcttcttcaagtacctgtgcatcgccagcaaggtgaagagggtggtgcagctggcccgggaggagatcaagaatggaaaatgtgtggtgattggcctgcagagcactggagaggcccggaccctggaggccctggaggagggcggcggggagctgaatgactttgtgtccacagccaagggcgtgctgcagagcctcatcgagaagcacttccctgccccagacaggaagaagctgtacagcctgctgggcatcgacctgacagcccccagcaacaacagcagcccccgggacagcccctgcaaggagaacaagatcaagaagaggaaaggagaggagatcacccgggaggccaagaaggccaggaagatgagcctgatgaggatgatgaagatggtgagcagctag

SEQ ID NO: 171850 - DNA, 1632 bp, synthetic construct
  misc_feature 1..1632: note = Description of Artificial Sequence: Synthetic coding sequence
  source 1..1632: mol_type = other DNA
atggagcaggtgaatgagctgaaggagaagggcaacaaggccctgtctgtgggcaacattgatgatgccctgcagtgctacagcgaggccatcaagctggacccccacaaccacgtgctgtacagcaacagatctgctgcctatgccaagaagggggactaccagaaggcctatgaagatggctgcaagacagtggacctgaagccagactggggcaagggctacagcaggaaggccgccgccctggagttcctgaacagatttgaggaggccaagaggacctatgaggagggcctgaagcatgaggccaacaacccccagctgaaggagggcctgcagaacatggaggcccggctggccgagaggaagttcatgaaccccttcaacatgcccaacctgtaccagaagctggagagtgaccccaggaccaggaccctgctgagtgaccccacctaccgggagctgattgagcagctgaggaacaagcccagcgacctgggcaccaagctgcaggacccccgcatcatgaccaccctgtctgtgctgctgggcgtggacctgggctccatggatgaggaggaggagatcgccaccccacctcctcctcctccacccaagaaggagaccaagccagagcccatggaggaggacctgcctgagaacaagaagcaggccctgaaggagaaggagctgggcaatgatgcctacaagaagaaggactttgacacagccctgaagcactatgacaaggccaaggagctggaccccaccaacatgacctacatcaccaaccaggccgctgtgtactttgagaagggggactacaacaagtgccgggagctgtgtgagaaggccatcgaggtgggcagagaaaatcgggaggactaccggcagatcgccaaggcctatgcccgcatcggcaacagctacttcaaggaggagaagtacaaggatgccatccacttctacaacaagagcctggccgagcacaggaccccagatgtgctgaagaagtgccagcaggccgagaagatcctgaaggagcaggagcggctggcctacatcaacccagacctggccctggaggagaagaacaagggaaatgaatgcttccagaagggggactacccccaggccatgaagcactacacagaggccatcaagaggaaccccaaggatgccaagctgtacagcaacagagctgcctgctacaccaagctgctggagttccagctggccctgaaggactgtgaggagtgcatccagctggagcccaccttcatcaagggctacaccaggaaggccgccgccctggaggccatgaaggactacaccaaggccatggatgtgtaccagaaggccctggacctggacagcagctgcaaggaggccgcagatggctaccagcgctgcatgatggcccagtacaacagacatgacagcccagaagatgtgaagagaagagccatggctgaccctgaggtgcagcagatcatgtctgaccctgccatgaggctcatcctggagcagatgcagaaggacccccaggccctgtctgagcacctgaagaaccctgtgattgcccagaagatccagaagctgatggatgtgggcctcatcgccatcagatag

SEQ ID NO: 171851 - DNA, 1359 bp, synthetic construct
  misc_feature 1..1359: note = Description of Artificial Sequence: Synthetic coding sequence
  source 1..1359: mol_type = other DNA
atgaaccggcagctggtgaacatcctgacagccctgtttgccttcttcctggagaccaaccacttcagaacagccttctgcaaggaccatgacagccgcagcggcaagcagcccagccagaccctgagccccagcgacttcctggacaagctgatgggccgcaccagcggctatgatgcccgcatccggcccaacttcaagggcccccctgtgaatgtgacctgcaacatcttcatcaacagctttggatctgtgacagagaccaccatggactacagagtgaacatcttcctgcggcagcagtggaatgacagccggctggcctacagcgagtacccagatgacagcctggacctggaccccagcatgctggacagcatctggaagccagacctcttctttgccaatgagaagggggccaacttccatgatgtgaccacagacaacaagctgctgcgcatcagcaagaatggcaaggtgctgtacagcatccggctgaccctgaccctgagctgccccatggacctgaagaacttccccatggatgtgcagacctgcaccatgcagctggagagctttggctacaccatgaatgacctgatctttgagtggctgagtgatggccctgtgcaggtggccgagggcctgaccctgccccagttcatcctgaaggaggagaaggagctgggctactgcaccaagcactacaacacaggcaagttcacctgcatcgaggtgaagttccacctggagcggcagatgggctactacctgatccagatgtacatccccagcctgctgattgtcatcctgtcctgggtgtccttctggatcaacatggatgctgccccagcccgggtggccctgggcatcaccaccgtgctgaccatgaccacccagagcagcggcagccgggccagcctgcccaaggtgtcctatgtgaaggccatcgacatctggatggctgtgtgcctgctgtttgtgtttgctgccctgctggagtatgctgctgtgaactttgtgtcccggcagcacaaggagttcctgcggctgcggcggcggcagaagaggcagaacaaggaggaggatgtgacccgggagagccgcttcaacttcagcggctacggcatgggccactgcctgcaggtgaaggatggaacagctgtgaaggccaccccagccaaccccctgccccagccccccaaggatggagatgccatcaagaagaagtttgtggaccgggccaagagaattgacaccatcagccgggccgccttccccctggccttcctgatcttcaacatcttctactggatcacctacaagatcatcagacatgaagatgtgcacaagaagtag

SEQ ID NO: 171852 - DNA, 3489 bp, synthetic construct
  misc_feature 1..3489: note = Description of Artificial Sequence: Synthetic coding sequence
  source 1..3489: mol_type = other DNA
atgaatggccaccaccagcagaatggagtggagaacatgatgctgtttgaggtggtgaagatgggcaagagcgccatgcagagcgtggtggatgactggattgagagctacaagcatgaccgggacatcgccctgctggacctgatcaacttcttcatccagtgcagcggctgcaagggcgtggtgacagctgagatgttccgccacatgcagaacagcgagatcatcaggaagatgacagaggagtttgatgaagattctggggactaccccctgaccatggccggcccccagtggaagaagttcaagagcagcttctgtgagttcatcggcgtgctggtgcggcagtgccagtacagcatcatctatgatgagtacatgatggacaccgtcatcagcctgctgaccggcctgagtgacagccaggtgcgggccttccgccacaccagcaccctggccgccatgaagctgatgacagccctggtgaatgtggccctgaacctgagcatcaacatggacaacacccagaggcagtatgaagctgagaggaacaagatgattggcaagagggccaatgaaaggctggagctgctgctgcagaagaggaaggagctgcaggagaaccaggatgaaattgagaacatgatgaatgccatcttcaagggcgtgtttgtgcaccgctacagagatgccatcgccgagatccgggccatctgcatcgaggagatcggcatctggatgaagatgtacagtgatgccttcctgaatgacagctacctgaagtatgtgggctggaccatgcatgacaagcagggcgaggtgcggctgaagtgcctgacagccctgcagggcctgtactacaacaaggagctgaacagcaagctggagctgttcaccagccgcttcaaggaccgcatcgtgtccatgaccctggacaaggagtatgatgtggccgtgcaggccatcaagctgctgaccctggtgctgcagagcagcgaggaggtgctgacagctgaggactgtgaaaatgtgtaccacctggtgtacagcgcccacaggcctgtggccgtggccgccggggagttcctgtacaagaagctgttcagccggcgggaccctgaagaagatggcatgatgaagagaagaggccggcagggccccaatgccaacctggtgaagaccctggtgttcttcttcctggagagcgagctgcatgaacatgctgcctacctggtggacagcatgtgggactgtgccacagagctgctgaaggactgggagtgcatgaacagcctgctgctggaggagcccctgtctggagaggaggccctgacagaccggcaggagagcgccctgattgagatcatgctgtgcaccatccggcaggccgctgagtgccacccccctgtgggccggggcaccgggaagagggtgctgacagccaaggagaagaagacccagctggatgacaggaccaagatcacagagctgtttgctgtggccctgccccagctgctggccaagtacagcgtggatgctgagaaggtgaccaacctgctgcagctgccccagtactttgacctggagatctacaccaccggccgcctggagaagcacctggatgccctgctgcggcagatccggaacatcgtggagaagcacacagacacagatgtgctggaggcctgcagcaagacctaccacgccctgtgcaatgaggagttcaccatcttcaacagagtggacatcagccgcagccagctgattgatgagctggccgacaagttcaaccggctgctggaggacttcctgcaggagggggaggagccagatgaagatgatgcctaccaggtgctgagcaccctgaagaggatcacagccttccacaatgcccatgacctgagcaagtgggacctgtttgcctgcaactacaagctgctgaagacaggaattgaaaatggagacatgcctgagcagatcgtcatccacgccctgcagtgcacccactacgtgatcctgtggcagctggccaagatcacagagagcagcagcaccaaggaggacctgctgcggctgaagaagcagatgagggtcttctgccagatctgccagcactacctgaccaacgtgaacaccaccgtgaaggagcaggccttcaccatcctgtgtgacatcctgatgatcttcagccaccagatcatgtctgggggccgggacatgctggagcccctggtgtacaccccagacagcagcctgcagagcgagctgctgtccttcatcctggaccacgtgttcatcgagcaggatgatgacaacaacagcgcagatggccagcaggaggatgaggccagcaagattgaggccctgcacaagagaagaaacctgctggccgccttctgcaagctgattgtgtacacagtggtggagatgaacacagctgctgacatcttcaagcagtacatgaagtactacaatgactatggagacatcatcaaggagaccatgagcaagacccggcagattgacaagatccagtgtgccaagaccctcatcctgagcctgcagcagctgttcaatgagatgatccaggagaatggctacaactttgacaggagcagcagcaccttcagcggcatcaaggagctggccaggagatttgccctgaccttcggcctggaccagctgaagacccgggaggccatcgccatgctgcacaaggatggcattgaatttgccttcaaggagcccaacccccagggcgagagccacccccccctgaacctggccttcctggacatcctgtctgagttcagcagcaagctgctgcggcaggacaagaggacagtgtatgtgtacctggagaagttcatgaccttccagatgagcctgcggcgggaggatgtgtggctgcccctgatgagctacagaaacagcctgctggccggaggagatgatgacaccatgtctgtcatcagcggcatcagcagccggggcagcacagtgcgcagcaagaagagcaagcccagcacaggcaagaggaaggtggtggagggcatgcagctgagcctgacagaggagagcagcagcagtgacagcatgtggctgagccgggagcagaccctgcacacccctgtgatgatgcagaccccccagctgaccagcaccatcatgagggagcccaagaggctgcggcctgaggacagcttcatgtctgtgtaccccatgcagacagagcaccaccagacccccctggactacaacagaagaggcaccagcctgatggaggatgatgaggagcccatcgtggaggatgtgatgatgagcagcgagggcagaattgaggacctgaatgaaggcatggactttgacaccatggacatcgacctgccccccagcaagaacagaagagagaggacagagctgaagccagacttctttgatcctgccagcatcatggatgaatctgtgctgggcgtgtccatgttttag

SEQ ID NO: 171853 - DNA, 3696 bp, synthetic construct
  misc_feature 1..3696: note = Description of Artificial Sequence: Synthetic coding sequence
  source 1..3696: mol_type = other DNA
atgattgctgcccctgagatccccacagacttcaacctgctgcaggagagcgagacccacttcagcagtgacacagactttgaggacatcgagggcaagaaccagaagcagggcaagggcaagacctgcaagaagggcaagaagggccctgctgagaagggcaaaggaggaaatggaggcggcaagcccccatctggccccaacaggatgaatggccaccaccagcagaatggagtggagaacatgatgctgtttgaggtggtgaagatgggcaagagcgccatgcagagcgtggtggatgactggattgagagctacaagcatgaccgggacatcgccctgctggacctgatcaacttcttcatccagtgcagcggctgcaagggcgtggtgacagctgagatgttccgccacatgcagaacagcgagatcatcaggaagatgacagaggagtttgatgaggacagcggggactaccccctgaccatggccggcccccagtggaagaagttcaagagcagcttctgtgagttcatcggcgtgctggtgcggcagtgccagtacagcatcatctatgatgagtacatgatggacaccgtcatcagcctgctgaccggcctgagtgacagccaggtgcgggccttccgccacaccagcaccctggccgccatgaagctgatgacagccctggtgaatgtggccctgaacctgagcatcaacatggacaacacccagaggcagtatgaggccgagaggaacaagatgattggcaagagggccaatgaaaggctggagctgctgctgcagaagaggaaggagctgcaggagaaccaggatgaaattgagaacatgatgaatgccatcttcaagggcgtgtttgtgcaccgctacagagatgccatcgccgagatccgggccatctgcatcgaggagatcggcatctggatgaagatgtacagtgatgccttcctgaatgacagctacctgaagtatgtgggctggaccatgcatgacaagcagggcgaggtgcggctgaagtgcctgacagccctgcagggcctgtactacaacaaggagctgaacagcaagctggagctgttcaccagccgcttcaaggacagaattgtgtccatgaccctggacaaggagtatgatgtggccgtgcaggccatcaagctgctgaccctggtgctgcagagcagcgaggaggtgctgacagctgaggactgtgaaaatgtgtaccacctggtgtacagcgcccacaggcctgtggccgtggccgccggggagttcctgtacaagaagctgttcagcagaagagatcctgaggaggatggcatgatgaagaggcggggccggcagggccccaatgccaacctggtgaagaccctggtgttcttcttcctggagagcgagctgcacgagcacgccgcctacctggtggacagcatgtgggactgtgccacagagctgctgaaggactgggagtgcatgaacagcctgctgctggaggagcccctgagcggggaggaggccctgacagaccggcaggagagcgccctgattgagatcatgctgtgcaccatccggcaggccgctgagtgccacccccctgtgggccggggcaccgggaagagggtgctgacagccaaggagaagaagacccagctggatgacaggaccaagatcacagagctgtttgctgtggccctgccccagctgctggccaagtacagcgtggatgctgagaaggtgaccaacctgctgcagctgccccagtactttgacctggagatctacaccaccggccgcctggagaagcacctggatgccctgctgcggcagatcagaaatattgtggagaagcacacagacacagatgtgctggaggcctgcagcaagacctaccacgccctgtgcaatgaggagttcaccatcttcaacagagtggacatcagccgcagccagctgattgatgagctggccgacaagttcaaccggctgctggaggacttcctgcaggagggggaggagccagatgaagatgatgcctaccaggtgctgagcaccctgaagaggatcacagccttccacaatgcccatgacctgagcaagtgggacctgtttgcctgcaactacaagctgctgaagacaggaattgaaaatggagacatgcctgagcagatcgtcatccacgccctgcagtgcacccactacgtgatcctgtggcagctggccaagatcacagagagcagcagcaccaaggaggacctgctgcggctgaagaagcagatgagggtcttctgccagatctgccagcactacctgaccaacgtgaacaccaccgtgaaggagcaggccttcaccatcctgtgtgacatcctgatgatcttcagccaccagatcatgtctgggggccgggacatgctggagcccctggtgtacaccccagacagcagcctgcagagcgagctgctgtccttcatcctggaccacgtgttcatcgagcaggatgatgacaacaacagcgcagatggccagcaggaggatgaggccagcaagattgaggccctgcacaagagaagaaacctgctggccgccttctgcaagctgattgtgtacacagtggtggagatgaacacagctgctgacatcttcaagcagtacatgaagtactacaatgactatggagacatcatcaaggagaccatgagcaagacccggcagattgacaagatccagtgtgccaagaccctcatcctgagcctgcagcagctgttcaatgagatgatccaggagaatggctacaactttgacaggagcagcagcaccttcagcggcatcaaggagctggccaggagatttgccctgaccttcggcctggaccagctgaagacccgggaggccatcgccatgctgcacaaggatggcatcgagtttgccttcaaggagcccaacccccagggcgagagccacccccccctgaacctggccttcctggacatcctgtctgagttcagcagcaagctgctgcggcaggacaagaggacagtgtatgtgtacctggagaagttcatgaccttccagatgagcctgcggagagaagatgtgtggctgcccctgatgagctacagaaacagcctgctggccggaggagatgatgacaccatgtctgtcatcagcggcatcagcagccggggcagcacagtgcgcagcaagaagagcaagcccagcacaggcaagaggaaggtggtggagggcatgcagctgagcctgacagaggagagcagcagcagtgacagcatgtggctgagccgggagcagaccctgcacacccctgtgatgatgcagaccccccagctgaccagcaccatcatgagggagcccaagaggctgcggccagaagattccttcatgtctgtgtaccccatgcagacagagcaccaccagacccccctggactacaacagaagaggcaccagcctgatggaggatgatgaggagcccatcgtggaggatgtgatgatgagcagcgagggcagaattgaggacctgaatgaaggcatggactttgacaccatggacatcgacctgccccccagcaagaacagaagagagaggacagagctgaagccagacttctttgatcctgccagcatcatggatgagagcgtgctgggcgtgtccatgttttag

SEQ ID NO: 171854 - DNA, 3807 bp, synthetic construct
  misc_feature 1..3807: note = Description of Artificial Sequence: Synthetic coding sequence
  source 1..3807: mol_type = other DNA
atgattgctgcccctgagatccccacagacttcaacctgctgcaggagagcgagacccacttcagcagtgacacagactttgaggacatcgagggcaagaaccagaagcagggcaagggcaagacctgcaagaagggcaagaagggccctgctgagaagggcaaaggaggaaatggaggcggcaagcccccatctggccccaacaggatgaatggccaccaccagcagaatggagtggagaacatgatgctgtttgaggtggtgaagatgggcaagagcgccatgcagagcgtggtggatgactggattgagagctacaagcatgaccgggacatcgccctgctggacctgatcaacttcttcatccagtgcagcggctgcaagggcgtggtgacagctgagatgttccgccacatgcagaacagcgagatcatcaggaagatgacagaggagtttgatgaggacagcggggactaccccctgaccatggccggcccccagtggaagaagttcaagagcagcttctgtgagttcatcggcgtgctggtgcggcagtgccagtacagcatcatctatgatgagtacatgatggacaccgtcatcagcctgctgaccggcctgagtgacagccaggtgcgggccttccgccacaccagcaccctggccgccatgaagctgatgacagccctggtgaatgtggccctgaacctgagcatcaacatggacaacacccagaggcagtatgaggccgagaggaacaagatgattggcaagagggccaatgaaaggctggagctgctgctgcagaagaggaaggagctgcaggagaaccaggatgaaattgagaacatgatgaatgccatcttcaagggcgtgtttgtgcaccgctacagagatgccatcgccgagatccgggccatctgcatcgaggagatcggcatctggatgaagatgtacagtgatgccttcctgaatgacagctacctgaagtatgtgggctggaccatgcatgacaagcagggcgaggtgcggctgaagtgcctgacagccctgcagggcctgtactacaacaaggagctgaacagcaagctggagctgttcaccagccgcttcaaggacagaattgtgtccatgaccctggacaaggagtatgatgtggccgtgcaggccatcaagctgctgaccctggtgctgcagagcagcgaggaggtgctgacagctgaggactgtgaaaatgtgtaccacctggtgtacagcgcccacaggcctgtggccgtggccgccggggagttcctgtacaagaagctgttcagcagaagagatcctgaggaggatggcatgatgaagaggcggggccggcagggccccaatgccaacctggtgaagaccctggtgttcttcttcctggagagcgagctgcacgagcacgccgcctacctggtggacagcatgtgggactgtgccacagagctgctgaaggactgggagtgcatgaacagcctgctgctggaggagcccctgagcggggaggaggccctgacagaccggcaggagagcgccctgattgagatcatgctgtgcaccatccggcaggccgctgagtgccacccccctgtgggccggggcaccgggaagagggtgctgacagccaaggagaagaagacccagctggatgacaggaccaagatcacagagctgtttgctgtggccctgccccagctgctggccaagtacagcgtggatgctgagaaggtgaccaacctgctgcagctgccccagtactttgacctggagatctacaccaccggccgcctggagaagcacctggatgccctgctgcggcagatcagaaatattgtggagaagcacacagacacagatgtgctggaggcctgcagcaagacctaccacgccctgtgcaatgaggagttcaccatcttcaacagagtggacatcagccgcagccagctgattgatgagctggccgacaagttcaaccggctgctggaggacttcctgcaggagggggaggagccagatgaagatgatgcctaccaggtgctgagcaccctgaagaggatcacagccttccacaatgcccatgacctgagcaagtgggacctgtttgcctgcaactacaagctgctgaagacaggaattgaaaatggagacatgcctgagcagatcgtcatccacgccctgcagtgcacccactacgtgatcctgtggcagctggccaagatcacagagagcagcagcaccaaggaggacctgctgcggctgaagaagcagatgagggtcttctgccagatctgccagcactacctgaccaacgtgaacaccaccgtgaaggagcaggccttcaccatcctgtgtgacatcctgatgatcttcagccaccagatcatgtctgggggccgggacatgctggagcccctggtgtacaccccagacagcagcctgcagagcgagctgctgtccttcatcctggaccacgtgttcatcgagcaggatgatgacaacaacagcgcagatggccagcaggaggatgaggccagcaagattgaggccctgcacaagagaagaaacctgctggccgccttctgcaagctgattgtgtacacagtggtggagatgaacacagctgctgacatcttcaagcagtacatgaagtactacaatgactatggagacatcatcaaggagaccatgagcaagacccggcagattgacaagatccagtgtgccaagaccctcatcctgagcctgcagcagctgttcaatgagatgatccaggagaatggctacaactttgacaggagcagcagcaccttcagcggcatcaaggagctggccaggagatttgccctgaccttcggcctggaccagctgaagacccgggaggccatcgccatgctgcacaaggatggcatcgagtttgccttcaaggagcccaacccccagggcgagagccacccccccctgaacctggccttcctggacatcctgtctgagttcagcagcaagctgctgcggcaggacaagaggacagtgtatgtgtacctggagaagttcatgaccttccagatgagcctgcggagagaagatgtgtggctgcccctgatgagctacagaaacagcctgctggccggaggagatgatgacaccatgtctgtcatcagcggcatcagcagccggggcagcacagtgcgcagcaagaagagcaagcccagcacaggcaagaggaaggtggtggagggcatgcagctgagcctgacagaggagagcagcagcagtgacagcatgtggctgagccgggagcagaccctgcacacccctgtgatgatgcagaccccccagctgaccagcaccatcatgagggagcccaagaggctgcggccagaagattccttcatgtctgtgtaccccatgcagacagagcaccaccagacccccctggactacaacacccaggtgacctggatgctggcccagaggcagcaggaggaggcccggcagcagcaggagcgggccgccatgtcctatgtgaagctgcggaccaacctgcagcacgccatccggcggggcaccagcctgatggaggatgatgaggagcccatcgtggaggatgtgatgatgagcagcgagggcagaattgaggacctgaatgaaggcatggactttgacaccatggacatcgacctgccccccagcaagaacagaagagagaggacagagctgaagccagacttctttgatcctgccagcatcatggatgaatctgtgctgggcgtgtccatgttttag

SEQ ID NO: 171855 - DNA, 3696 bp, synthetic construct; identical to SEQ ID NO: 171853
  misc_feature 1..3696: note = Description of Artificial Sequence: Synthetic coding sequence
  source 1..3696: mol_type = other DNA

SEQ ID NO: 171856 - DNA, 3696 bp, synthetic construct; identical to SEQ ID NO: 171853
  misc_feature 1..3696: note = Description of Artificial Sequence: Synthetic coding sequence
  source 1..3696: mol_type = other DNA

SEQ ID NO: 171857 - DNA, 213 bp, synthetic construct
  misc_feature 1..213: note = Description of Artificial Sequence: Synthetic coding sequence
  source 1..213: mol_type = other DNA
atgattgctgcccctgagatccccacagacttcaacctgctgcaggagagcgagacccacttcagcagtgacacagactttgaggacatcgagggcaagaaccagaagcagggcaagggcaagacctgcaagaagggcaagaagggccctgctgagaagggcaaaggaggaaatggaggcggcaagcccccatctggccccaacaggatgtag

SEQ ID NO: 171858 - DNA, 348 bp, synthetic construct
  misc_feature 1..348: note = Description of Artificial Sequence: Synthetic coding sequence
  source 1..348: mol_type = other DNA
atgattgctgcccctgagatccccacagacttcaacctgctgcaggagagcgagacccacttcagcagtgacacagactttgaggacatcgagggcaagaaccagaagcagggcaagggcaagacctgcaagaagggcaagaagggccctgctgagaagggcaaaggaggaaatggaggcggcaagcccccatctggccccaacaggatgaatggccaccaccagcagaatggagtggagaacatgatgctgtttgaggtggtgaagatgggcaagagcgccatgcagagcgtggtggatgactggattgagagctacaagcatgaccgggacatcgccctgctgtag

SEQ ID NO: 171859 - DNA, 510 bp, synthetic construct
  misc_feature 1..510: note = Description of Artificial Sequence: Synthetic coding sequence
  source 1..510: mol_type = other DNA
atgattgctgcccctgagatccccacagacttcaacctgctgcaggagagcgagacccacttcagcagtgacacagactttgaggacatcgagggcaagaaccagaagcagggcaagggcaagacctgcaagaagggcaagaagggccctgctgagaagggcaaaggaggaaatggaggcggcaagcccccatctggccccaacaggatgaatggccaccaccagcagaatggagtggagaacatgatgctgtttgaggtggtgaagatgggcaagagcgccatgcagagcgtggtggatgactggattgagagctacaagcatgaccgggacatcgccctgctggacctgatcaacttcttcatccagtgcagcggctgcaagggcgtggtgacagctgagatgttccgccacatgcagaacagcgagatcatcaggaagatgacagaggagtttgatgaggacagcggggactaccccctgaccatggccggcccccagtggaagtag

SEQ ID NO: 171860 - DNA, 465 bp, synthetic construct
  misc_feature 1..465: note = Description of Artificial Sequence: Synthetic coding sequence
  source 1..465: mol_type = other DNA
atgattgctgcccctgagatccccacagacttcaacctgctgcaggagagcgagacccacttcagcagtgacacagactttgaggacatcgagggcaagaaccagaagcagggcaagggcaagacctgcaagaagggcaagaagggccctgctgagaagggcaaaggaggaaatggaggcggcaagcccccatctggccccaacaggatgaatggccaccaccagcagaatggagtggagaacatgatgctgtttgaggtggtgaagatgggcaagagcgccatgcagagcgtggtggatgactggattgagagctacaagcatgaccgggacatcgccctgctggacctgatcaacttcttcatccagtgcagcggctgcaagggcgtggtgacagctgagatgttccgccacatgcagaacagcgagatcatcaggaagatgacagaggagtttgatgaatag

SEQ ID NO: 171861 - DNA, 627 bp, synthetic construct
  misc_feature 1..627: note = Description of Artificial Sequence: Synthetic coding sequence
  source 1..627: mol_type = other DNA
atgattgctgcccctgagatccccacagacttcaacctgctgcaggagagcgagacccacttcagcagtgacacagactttgaggacatcgagggcaagaaccagaagcagggcaagggcaagacctgcaagaagggcaagaagggccctgctgagaagggcaaaggaggaaatggaggcggcaagcccccatctggccccaacaggatgaatggccaccaccagcagaatggagtggagaacatgatgctgtttgaggtggtgaagatgggcaagagcgccatgcagagcgtggtggatgactggattgagagctacaagcatgaccgggacatcgccctgctggacctgatcaacttcttcatccagtgcagcggctgcaagggcgtggtgacagctgagatgttccgccacatgcagaacagcgagatcatcaggaagatgacagaggagtttgatgaggacagcggggactaccccctgaccatggccggcccccagtggaagaagttcaagagcagcttctgtgagttcatcggcgtgctggtgcggcagtgccagtacagcatcatctatgatgagtacatgatggacaccgtcatcagcctgctgaccggcctgtcctag

SEQ ID NO: 171862 - DNA, 1647 bp, synthetic construct
  misc_feature 1..1647: note = Description of Artificial Sequence: Synthetic coding sequence
  source 1..1647: mol_type = other DNA
atgattgctgcccctgagatccccacagacttcaacctgctgcaggagagcgagacccacttcagcagtgacacagactttgaggacatcgagggcaagaaccagaagcagggcaagggcaagacctgcaagaagggcaagaagggccctgctgagaagggcaaaggaggaaatggaggcggcaagcccccatctggccccaacaggatgaatggccaccaccagcagaatggagtggagaacatgatgctgtttgaggtggtgaagatgggcaagagcgccatgcagagcgtggtggatgactggattgagagctacaagcatgaccgggacatcgccctgctggacctgatcaacttcttcatccagtgcagcggctgcaagggcgtggtgacagctgagatgttccgccacatgcagaacagcgagatcatcaggaagatgacagaggagtttgatgaggacagcggggactaccccctgaccatggccggcccccagtggaagaagttcaagagcagcttctgtgagttcatcggcgtgctggtgcggcagtgccagtacagcatcatctatgatgagtacatgatggacaccgtcatcagcctgctgaccggcctgagtgacagccaggtgcgggccttccgccacaccagcaccctggccgccatgaagctgatgacagccctggtgaatgtggccctgaacctgagcatcaacatggacaacacccagaggcagtatgaggccgagaggaacaagatgattggcaagagggccaatgaaaggctggagctgctgctgcagaagaggaaggagctgcaggagaaccaggatgaaattgagaacatgatgaatgccatcttcaagggcgtgtttgtgcaccgctacagagatgccatcgccgagatccgggccatctgcatcgaggagatcggcatctggatgaagatgtacagtgatgccttcctgaatgacagctacctgaagtatgtgggctggaccatgcatgacaagcagggcgaggtgcggctgaagtgcctgacagccctgcagggcctgtactacaacaaggagctgaacagcaagctggagctgttcaccagccgcttcaaggacagaattgtgtccatgaccctggacaaggagtatgatgtggccgtgcaggccatcaagctgctgaccctggtgctgcagagcagcgaggaggtgctgacagctgaggactgtgaaaatgtgtaccacctggtgtacagcgcccacaggcctgtggccgtggccgccggggagttcctgtacaagaagctgttcagcagaagagatcctgaggaggatggcatgatgaagaggcggggccggcagggccccaatgccaacctggtgaagaccctggtgttcttcttcctggagagcgagctgcacgagcacgccgcctacctggtggacagcatgtgggactgtgccacagagctgctgaaggactgggagtgcatgaacagcctgctgctggaggagcccctgagcggggaggaggccctgacagaccggcaggagagcgccctgattgagatcatgctgtgcaccatccggcaggccgctgagtgccacccccctgtgggccggggcaccgggaagagggtgctgtag

SEQ ID NO: 171863 - DNA, 123 bp, synthetic construct
  misc_feature 1..123: note = Description of Artificial Sequence: Synthetic coding sequence
  source 1..123: mol_type = other DNA
atgattgctgcccctgagatccccacagacttcaacctgctgcaggagagcgagacccacttcagcagtgacacagactttgaggacatcgagggcaagaaccagaagcagggcaaaggatag

SEQ ID NO: 171864 - DNA, 3678 bp, synthetic construct
  misc_feature 1..3678: note = Description of Artificial Sequence: Synthetic coding sequence
  source 1..3678: mol_type = other DNA
atgagcagccccctgcagagagctgtgggggacaccaagagggccctgagcgccagcagcagcagcagcgccagcctgccctttgatgaccgggacagcaaccacaccagcgagggcaatggagacagcctgctggctgatgaggacacagactttgaggacagcctgaacagaaatgtgaagaagagagctgccaagaggcctcccaagaccacccctgtggccaagcaccccaagaagggcagccgggtggtgcaccgccacagcaggaagcagagcgagcccccagccaatgacctcttcaatgctgtgaaggccgccaagagtgacatgcagagcctggtggatgagtggctggacagctacaagcaggaccaggatgctggcttcctggagctggtgaacttcttcatccagagctgtggctgcaagggcatcgtgaccccagagatgttcaagaagatgagcaacagcgagatcatccagcacctgacagagcagttcaatgaagacagcggggactaccccctcatcgcccctggccccagctggaagaagttccagggcagcttctgtgaatttgtgaggaccctggtgtgccagtgccagtacagcctgctgtatgatggcttccccatggatgacctgatcagcctgctgaccggcctgagtgacagccaggtgcgggccttccgccacaccagcaccctggccgccatgaagctgatgaccagcctggtgaaggtggccctgcagctgtctgtgcaccaggacaacaaccagaggcagtatgaggccgagaggaacaagggccctggccagagggcccctgagcggctggagagcctgctggagaagaggaaggagctgcaggagcaccaggaggagattgagggcatgatgaatgccctcttccggggcgtgtttgtgcaccgctacagagatgtgctgcctgagatccgggccatctgcatcgaggagatcggctgctggatgcagagctacagcaccagcttcctgacagacagctacctgaagtacatcggctggaccctgcatgacaagcaccgggaggtgcggctgaagtgtgtgaaggccctgaagggcctgtatggcaacagagacctgaccacccggctggagctgttcaccagccgcttcaaggacaggatggtgtccatggtgatggaccgggagtatgatgtggccgtggaggccgtgcggctgctgatcctgatcctgaagaacatggagggcgtgctgacagatgctgactgtgagagcgtgtaccctgtggtgtatgccagccaccggggcctggccagcgctgctggggagttcctgtactggaagctgttctacccagaatgtgagatccgcatgatgggcggccgggagcagaggcagagccctggggcccagaggaccttcttccagctgctgctgtccttctttgtggagagcgagctgcatgaccacgccgcctacctggtggacagcctgtgggactgtgccggggcccggctgaaggactgggagggcctgaccagcctgctgctggagaaggaccagaacctgggagatgtgcaggagagcaccctgattgagatcctggtgtcctctgcccggcaggccagcgagggccacccccctgtgggccgggtgacaggcaggaagggcctgaccagcaaggagaggaagacccaggctgatgacagagtgaagctgacagagcacctgatccccctgctgccccagctgctggccaagttcagcgcagatgctgagaaggtgacccccctgctgcagctgctgagctgctttgacctgcacatctactgcaccggccgcctggagaagcacctggagctgttcctgcagcagctgcaggaggtggtggtgaagcatgctgagcctgctgtgctggaggccggggcccacgccctgtacctgctgtgcaaccctgagttcaccttcttcagcagagctgactttgcccggagccagctggtggacctgctgacagaccgcttccagcaggagctggaggagctgctgcagagcagcttcctggatgaagatgaggtgtacaacctggccgccaccctgaagaggctgagcgccttctacaacacccatgacctgacccgctgggagctgtatgagccctgctgccagctgctgcagaaggctgtggacaccggggaggtgccccaccaggtgatcctgcctgccctgaccctggtgtacttcagcatcctgtggaccctgacccacatcagcaagagtgatgccagccagaagcagctgagcagcctgcgggacaggatggtggccttctgtgagctgtgccagagctgcctgagtgatgtggacacagagatccaggagcaggcctttgtgctgctgagtgacctgctgctgatcttcagcccccagatgattgtgggcggccgggacttcctgcggcccctggtgttcttccctgaggccaccctgcagagcgagctggccagcttcctgatggaccacgtgttcatccagcccggggacctgggcagcggggacagccaggaggaccacctgcagatcgagcggctgcaccagaggcggcggctgctggccggcttctgcaagctgctgctgtatggagtgctggagatggatgctgccagtgatgtgttcaagcactacaacaagttctacaatgactatggagacatcatcaaggagaccctgacccgggcccggcagattgacaggagccactgcagccgcatcctgctgctgagcctgaagcagctgtacacagagctgctgcaggagcacggcccccagggcctgaatgagctgcctgccttcatcgagatgagggacctggccaggagatttgccctgagctttggcccccagcagctgcagaacagagacctggtggtgatgctgcacaaggagggcatccagttcagcctgtctgagctgcccccagctggcagcagcaaccagccccccaacctggccttcctggagctgctgtctgagttcagccccaggctcttccaccaggacaagcagctgctgctgagctacctggagaagtgcctgcagcacgtgtcccaggcccctggccacccctggggccctgtgaccacctactgccacagcctgagccctgtggagaacacagctgagaccagcccccaggtgctgcccagcagcaagagaagaagagtggagggccctgccaagcccaacagagaagatgtgagcagcagccaggaggagagcctgcagctgaacagcatcccccccacccccaccctgaccagcacagctgtgaagagccggcagcccctgtggggcctgaaggagatggaggaggaggatggcagcgagctggactttgcccagggccagcctgtggccggcacagagaggagccgcttcctgggcccccagtacttccagaccccccacaaccccagcggccctggcctgggcaaccagctgatgaggctgagcctgatggaggaggatgaggaggaggagctggagatccaggatgagagcaatgaggagcggcaggacacagacatgcaggccagcagctacagcagcaccagcgagcggggcctggacctgctggacagcacagagctggacatcgaggacttctag

SEQ ID NO: 171865 - DNA, 2667 bp, synthetic construct
  misc_feature 1..2667: note = Description of Artificial Sequence: Synthetic coding sequence
  source 1..2667: mol_type = other DNA
atgagcagccccctgcagagagctgtgggggacaccaagagggccctgagcgccagcagcagcagcagcgccagcctgccctttgatgaccgggacagcaaccacaccagcgagggcaatggagacagcctgctggctgatgaggacacagactttgaggacagcctgaacagaaatgtgaagaagagagctgccaagaggcctcccaagaccacccctgtggccaagcaccccaagaagggcagccgggtggtgcaccgccacagcaggaagcagagcgagcccccagccaatgacctcttcaatgctgtgaaggccgccaagagtgacatgcagagcctggtggatgagtggctggacagctacaagcaggaccaggatgctggcttcctggagctggtgaacttcttcatccagagctgtggctgcaagggcatcgtgaccccagagatgttcaagaagatgagcaacagcgagatcatccagcacctgacagagcagttcaatgagatggatgacctgatcagcctgctgaccggcctgagtgacagccaggtgcgggccttccgccacaccagcaccctggccgccatgaagctgatgaccagcctggtgaaggtggccctgcagctgtctgtgcaccaggacaacaaccagaggcagtatgaggccgagaggaacaagggccctggccagagggcccctgagcggctggagagcctgctggagaagaggaaggagctgcaggagcaccaggaggagattgagggcatgatgaatgccctcttccggggcgtgtttgtgcaccgctacagagatgtgctgcctgagatccgggccatctgcatcgaggagatcggctgctggatgcagagctacagcaccagcttcctgacagacagctacctgaagtacatcggctggaccctgcatgacaagcaccgggaggtgcggctgaagtgtgtgaaggccctgaagggcctgtatggcaacagagacctgaccacccggctggagctgttcaccagccgcttcaaggacaggatggtgtccatggtgatggaccgggagtatgatgtggccgtggaggccgtgcggctgctgatcctgatcctgaagaacatggagggcgtgctgacagatgctgactgtgagagcgtgtaccctgtggtgtatgccagccaccggggcctggccagcgctgctggggagttcctgtactggaagctgttctacccagaatgtgagatccgcatgatgggcggccgggagcagaggcagagccctggggcccagaggaccttcttccagctgctgctgtccttctttgtggagagcgagctgcatgaccacgccgcctacctggtggacagcctgtgggactgtgccggggcccggctgaaggactgggagggcctgaccagcctgctgctggagaaggaccagaacctgggagatgtgcaggagagcaccctgattgagatcctggtgtcctctgcccggcaggccagcgagggccacccccctgtgggccgggtgacaggcaggaagggcctgaccagcaaggagaggaagacccaggctgatgacagagtgaagctgacagagcacctgatccccctgctgccccagctgctggccaagttcagcgcagatgctgagaaggtgacccccctgctgcagctgctgagctgctttgacctgcacatctactgcaccggccgcctggagaagcacctggagctgttcctgcagcagctgcaggaggtggtggtgaagcatgctgagcctgctgtgctggaggccggggcccacgccctgtacctgctgtgcaaccctgagttcaccttcttcagcagagctgactttgcccggagccagctggtggacctgctgacagaccgcttccagcaggagctggaggagctgctgcagagcagcttcctggatgaagatgaggtgtacaacctggccgccaccctgaagaggctgagcgccttctacaacacccatgacctgacccgctgggagctgtatgagccctgctgccagctgctgcagaaggctgtggacaccggggaggtgccccaccaggtgatcctgcctgccctgaccctggtgtacttcagcatcctgtggaccctgacccacagcctgagccctgtggagaacacagctgagaccagcccccaggtgctgcccagcagcaagagaagaagagtggagggccctgccaagcccaaccgggaggatgtgagcagcagccaggaggagagcctgcagctgaacagcatcccccccacccccaccctgaccagcacagctgtgaagagccggcagcccctgtggggcctgaaggagatggaggaggaggatggcagcgagctggactttgcccagggccagcctgtggccggcacagagaggagccgcttcctgggcccccagtacttccagaccccccacaaccccagcggccctggcctgggcaaccagctgatgaggctgagcctgatggaggaggatgaggaggaggagctggagatccaggatgagagcaatgaggagcggcaggacacagacatgcaggccagcagctacagcagcaccagcgagcggggcctggacctgctggacagcacagagctggacatcgaggacttctag

SEQ ID NO: 171866 - DNA, 789 bp, synthetic construct
  misc_feature 1..789: note = Description of Artificial Sequence: Synthetic coding sequence
  source 1..789: mol_type = other DNA
atgctgcacaaggagggcatccagttcagcctgtctgagctgcccccagctggcagcagcaaccagccccccaacctggccttcctggagctgctgtctgagttcagccccaggctcttccaccaggacaagcagctgctgctgagctacctggagaagtgcctgcagcacgtgtcccaggcccctggccacccctggggccctgtgaccacctactgccacagcctgagccctgtggagaacacagctgagaccagcccccaggtgctgcccagcagcaagagaagaagagtggagggccctgccaagcccaacagagaagatgtgagcagcagccaggaggagagcctgcagctgaacagcatcccccccacccccaccctgaccagcacagctgtgaagagccggcagcccctgtggggcctgaaggagatggaggaggaggatggcagcgagctggactttgcccagggcagccagcctgtggccggcacagagaggagccgcttcctgggcccccagtacttccagaccccccacaaccccagcggccctggcctgggcaaccagctgatgaggctgagcctgatggaggaggatgaggaggaggagctggagatccaggatgagagcaatgaggagcggcaggacacagacatgcaggccagcagctacagcagcaccagcgagcggggcctggacctgctggacagcacagagctggacatcgagatcacagagagcctgcccctgctgggcaagagcccccacccctacaacagcaggtag

SEQ ID NO: 171867 - DNA, 438 bp, synthetic construct
  misc_feature 1..438: note = Description of Artificial Sequence: Synthetic coding sequence
  source 1..438: mol_type = other DNA
atgagcagccccctgcagagagctgtgggggacaccaagagggccctgagcgccagcagcagcagcagcgccagcctgccctttgatgaccgggacagcaaccacaccagcgagggcaatggagacagcctgctggctgatgaggacacagactttgaggacagcctgaacagaaatgtgaagaagagagctgccaagaggcctcccaagaccacccctgtggccaagcaccccaagaagggcagccgggtggtgcaccgccacagcaggaagcagagcgagcccccagccaatgacctcttcaatgctgtgaaggccgccaagagtgacatgcagagcctggtggatgagtggctggacagctacaagcaggaccaggatgctggcttcctggagctggtgaacttcttcatccagagctgtggctgcaagggctag

SEQ ID NO: 171868 - DNA, 339 bp, synthetic construct
  misc_feature 1..339: note = Description of Artificial Sequence: Synthetic coding sequence
  source 1..339: mol_type = other DNA
atgagcagccccctgcagagagctgtgggggacaccaagagggccctgagcgccagcagcagcagcagcgccagcctgccctttgatgaccgggacagcaaccacaccagcgagggcaatggagacagcctgctggctgatgaggacacagactttgaggacagcctgaacagaaatgtgaagaagagagctgccaagaggcctcccaagaccacccctgtggccaagcaccccaagaagggcagccgggtggtgcaccgccacagcaggaagcagagcgagcccccagccaatgacctcttcaatgctgtgaaggccgccaagagtgacatgcagtag

SEQ ID NO: 171869 - DNA, 3678 bp, synthetic construct; identical to SEQ ID NO: 171864
  misc_feature 1..3678: note = Description of Artificial Sequence: Synthetic coding sequence
  source 1..3678: mol_type = other DNA

SEQ ID NO: 171870 - DNA, 567 bp, synthetic construct
  misc_feature 1..567: note = Description of Artificial Sequence: Synthetic coding sequence
  source 1..567: mol_type = other DNA
atgagcagccccctgcagagagctgtgggggacaccaagagggccctgagcgccagcagcagcagcagcgccagcctgccctttgatgaccgggacagcaaccacaccagcgagggcaatggagacagcctgctggctgatgaggacacagactttgaggacagcctgaacagaaatgtgaagaagagagctgccaagaggcctcccaagaccacccctgtggccaagcaccccaagaagggcagccgggtggtgcaccgccacagcaggaagcagagcgagcccccagccaatgacctcttcaatgctgtgaaggccgccaagagtgacatgcaggacagcggggactaccccctcatcgcccctggccccagctggaagaagttccagggcagcttctgtgaatttgtgaggaccctggtgtgccagtgccagtacagcctgctgtatgatggcttccccatggatgacctgatcagcctgctgaccggcctgagtgacagccaggtgcgggccttccgccacaccagcaccctggccgccatgaagctgatgaccagcctgtag

SEQ ID NO: 171871 - DNA, 1047 bp, synthetic construct
  misc_feature 1..1047: note = Description of Artificial Sequence: Synthetic coding sequence
  source 1..1047: mol_type = other DNA
atggtgtggccctgggtggccatggccagccgctggggccccctcatcggcctggccccctgctgcctgtggctgctgggcgctgtgctgctgatggatgccagcgcccggcctgccaaccacagcagcacccgggagcgggtggccaaccgggaggagaatgagatcctgcccccagaccacctgaatggagtgaagctggagatggatggccacctgaacagaggcttccaccaggaggtgttcctgggcaaggacctgggcggctttgatgaagatgctgagcccaggaggagcaggaggaagctgatggtgatcttcagcaaggtggatgtgaacacagacaggaagatcagcgccaaggagatgcagcgctggatcatggagaagacagctgagcacttccaggaggccatggaggagagcaagacccacttccgggctgtggaccctgatggagatggccacgtgtcctgggatgagtacaaggtgaagttcctggccagcaagggccacagcgagaaggaggtggctgatgccatccggctgaatgaggagctgaaggtggatgaggagacccaggaggtgctggagaacctgaaggaccgctggtaccaggccgacagccccccagctgacctgctgctgacagaggaggagttcctgtccttcctgcaccctgagcacagccggggcatgctgcgcttcatggtgaaggagatcgtgcgggacctggaccaggatggagacaagcagctgtctgtgcctgagttcatcagcctgcctgtgggcaccgtggagaaccagcagggccaggacattgatgacaactgggtgaaggacaggaagaaggagtttgaggagctgattgacagcaaccatgatggcatcgtgacagctgaggagctggagaatgtgcccaccctgcccctgcagcccatcggcaccctgaacagccactttgtgcggctggccgctgagctgggcggcggcaaggccaccctgacctgtgcccccctggcccggcgggccacctggaccccctag

SEQ ID NO: 171872 - DNA, 1089 bp, synthetic construct
  misc_feature 1..1089: note = Description of Artificial Sequence: Synthetic coding sequence
  source 1..1089: mol_type = other DNA
atggtgtggccctgggtggccatggccagccgctggggccccctcatcggcctggccccctgctgcctgtggctgctgggcgctgtgctgctgatggatgccagcgcccggcctgccaaccacagcagcacccgggagcgggtggccaaccgggaggagaatgagatcctgcccccagaccacctgaatggagtgaagctggagatggatggccacctgaacagaggcttccaccaggaggtgttcctgggcaaggacctgggcggctttgatgaagatgctgagcccaggaggagcaggaggaagctgatggtgatcttcagcaaggtggatgtgaacacagacaggaagatcagcgccaaggagatgcagcgctggatcatggagaagacagctgagcacttccaggaggccatggaggagagcaagacccacttccgggctgtggaccctgatggagatggccacgtgtcctgggatgagtacaaggtgaagttcctggccagcaagggccacagcgagaaggaggtggctgatgccatccggctgaatgaggagctgaaggtggatgaggagacccaggaggtgctggagaacctgaaggaccgctggtaccaggccgacagccccccagctgacctgctgctgacagaggaggagttcctgtccttcctgcaccctgagcacagccggggcatgctgcgcttcatggtgaaggagatcgtgcgggacctggaccaggatggagacaagcagctgtctgtgcctgagttcatcagcctgcctgtgggcaccgtggagaaccagcagggccaggacattgatgacaactgggtgaaggacaggaagaaggagtttgaggagctgattgacagcaaccatgatggcatcgtgacagctgaggagctggagagctacatggaccccatgaatgagtacaatgccctgaatgaggccaagcagatgattgctgtggctgatgagaaccagaaccaccacctggagcctgaggaggtgctgaagtacagcgagttcttcaccggcagcaagctggtggactatgcccggtctgtgcatgaggagttctag

SEQ ID NO: 171873 - DNA, 732 bp, synthetic construct
  misc_feature 1..732: note = Description of Artificial Sequence: Synthetic coding sequence
  source 1..732: mol_type = other DNA
tgactggagatggatggccacctgaacagaggcttccaccaggaggtgttcctgggcaaggacctgggcggctttgatgaagatgctgagccccggcgcagcaggaggaagctgatggtgatcttcagcaaggtggatgtgaacacagacaggaagatcagcgccaaggagatgcagcgctggatcatggagaagacagctgagcacttccaggaggccatggaggagagcaagacccacttccgggctgtggaccctgatggagatggccacgtgtcctgggatgagtacaaggtgaagttcctggccagcaagggccacagcgagaaggaggtggctgatgccatccggctgaatgaggagctgaaggtggatgaggagagcagcaccagcaggaacttcctggacctgcgggccggcgtgtgccggccccgctacccccaggccgcccccctgagcgcccaggaggtgctggagaacctgaaggaccgctggtaccaggccgacagccccccagctgacctgctgctgacagaggaggagttcctgtccttcctgcaccctgagcacagccggggcatgctgcgcttcatggtgaaggagatcgtgcgggacctggaccaggatggagacaagcagctgtctgtgcctgagttcatcagcctgcctgtgggcaccgtggagaaccagcagggccaggacattgatgacaactgggtgaaggacagatag

SEQ ID NO: 171874 - DNA, 609 bp, synthetic construct
  misc_feature 1..609: note = Description of Artificial Sequence: Synthetic coding sequence
  source 1..609: mol_type = other DNA
atggtgtggccctgggtggccatggccagccgctggggccccctcatcggcctggccccctgctgcctgtggctgctgggcgctgtgctgctgatggatgccagcgcccggcctgccaaccacagcagcacccgggagcgggtggccaaccgggaggagaatgagatcctgcccccagaccacctgaatggagtgaagctggagatggatggccacctgaacagaggcttccaccaggaggtgttcctgggcaaggacctgggcggctttgatgaagatgctgagcccaggaggagcaggaggaagctgatggtgatcttcagcaaggtggatgtgaacacagacaggaagatcagcgccaaggagatgcagcgctggatcatggagaagacagctgagcacttccaggaggccatggaggagagcaagacccacttccgggctgtggaccctgatggagatggccacgtgtcctgggatgagtacaaggtgaagttcctggccagcaagggccacagcgagaaggaggtggctgatgccatccggctgaatgaggagctgaaggtggatgaggagcggcacggccccccaggcccccgggccctgtag

SEQ ID NO: 171875 - DNA, 636 bp, synthetic construct
  misc_feature 1..636: note = Description of Artificial Sequence: Synthetic coding sequence
  source 1..636: mol_type = other DNA
atggctgtggtgcccctgctgctgctgggcggcctgtggagcgctgtgggcgccagcagcctgggcgtggtgacctgtggctctgtggtgaagctgctgaacaccaggcacaacgtgcggctgcacagccatgatgtgcgctatggcagcggcagcggccagcagagcgtgactggagtgacctctgtggatgacagcaacagctactggaggatccggggcaagagcgccaccgtgtgtgagcggggcacccccatcaagtgtggccagcccatccggctgacccacgtgaacacaggaagaaacctgcacagccaccacttcaccagccccctgagcggcaaccaggaggtgtctgcctttggagaggagggggagggggactacctggatgactggacagtgctgtgcaatggcccctactgggtgagagatggagaggtgcgcttcaagcacagcagcacagaggtgctgctgtctgtgactggagagcagtatggccggcccatcagcggccagaaggaggtgcacggcatggcccagcccagccagaacaactactggaaggccatggagggcatcttcatgaagcccagcgagctgctgaaggccgaggcccaccacgccgagctgtag

SEQ ID NO: 171876 - DNA, 666 bp, synthetic construct
  misc_feature 1..666: note = Description of Artificial Sequence: Synthetic coding sequence
  source 1..666: mol_type = other DNA
atgtggagcgctggccggggcggggccgcctggcctgtgctgctgggcctgctgctggccctgctggtgcctgggggcggggccgccaagacaggagctgagctggtgacctgtggctctgtgctgaagctgctgaacacccaccaccgggtgcggctgcacagccatgacatcaagtatggcagcggcagcggccagcagagcgtgactggagtggaggccagtgatgatgccaacagctactggaggatccggggcggcagcgagggcggctgcccccggggcagccctgtgcgctgtggccaggccgtgcggctgacccacgtgctgaccgggaagaacctgcacacccaccacttccccagccccctgagcaacaaccaggaggtgtctgcctttggagaagatggagaaggagatgacctggacctgtggacagtgcgctgcagcggccagcactgggagcgggaggccgctgtgcgcttccagcacgtgggcaccagcgtcttcctgtctgtgactggagagcagtatggcagccccatccggggccagcacgaggtgcacggcatgcccagcgccaacacccacaacacctggaaggccatggagggcatcttcatcaagcccagcgtggagcccagcgctggccatgatgagctgtag

SEQ ID NO: 171877 - DNA, 2058 bp, synthetic construct
  misc_feature 1..2058: note = Description of Artificial Sequence: Synthetic coding sequence
  source 1..2058: mol_type = other DNA
atggatgtgtgtgtgcggctggccctgtggctgctgtggggcctgctgctgcaccagggccagagcctgagccacagccacagcgagaaggccaccggcaccagcagcggggccaacagcgaggagagcacagctgctgagttctgcagaattgacaagcccctgtgccacagtgaagatgagaagctgagctttgaagctgtgaggaacatccacaagctgatggatgatgatgccaatggagatgtggatgtggaggagagtgatgagttcctgcgggaggacctgaactaccatgaccccaccgtgaagcacagcaccttccatggagaggacaagctgatctctgtggaggacctgtggaaggcctggaagagcagcgaggtgtacaactggacagtggatgaggtggtgcagtggctgatcacctacgtggagctgccccagtatgaggagaccttcaggaagctgcagctgagcggccacgccatgccccggctggccgtgaccaacaccaccatgactggaacagtgctgaagatgacagacaggagccaccggcagaagctgcagctgaaggccctggacacagtgctgtttggcccccccctgctgaccaggcacaaccacctgaaggacttcatgctggtggtgtccatcgtcatcggcgtgggcggctgctggtttgcctacatccagaaccgctacagcaaggagcacatgaagaagatgatgaaggacctggagggcctgcacagagctgagcagagcctgcatgacctgcaggagcggctgcacaaggcccaggaggagcacaggacagtggaggtggagaaggtgcacctggagaagaagctgagagatgagatcaacctggccaagcaggaggcccagaggctgaaggagctgcgggagggcacagaaaatgaaagaagccggcagaagtatgcagaggaggagctggagcaggtgcgggaggccctgaggaaggccgagaaggagctggagagccacagctcctggtacgcccctgaggccctgcagaagtggctgcagctgacccatgaggtggaggtgcagtactacaacatcaagaagcagaatgctgagaagcagctgctggtggccaaggagggcgctgagaagatcaagaagaagaggaacaccctgtttggcaccttccacgtggcccacagcagcagcctggatgatgtggaccacaagatcctgacagccaagcaggccctgtctgaggtgacagctgccctgcgggagcggctgcaccgctggcagcagatcgagatcctgtgtggcttccagatcgtgaacaaccctggcatccacagcctggtggccgccctgaacatcgaccccagctggatgggcagcacccggcccaacccagcccacttcatcatgacagatgatgtggatgacatggatgaggagatcgtgagccccctgtccatgcagagccccagcctgcagagctctgtgcggcagaggctgacagagccccagcacggcctgggcagccagagggacctgacccacagcgacagcgagagcagcctgcacatgtctgaccggcagagggtggcccccaagccaccccagatgagcagagctgctgatgaggccctgaatgccatgaccagcaatggcagccacaggctcatcgagggcgtgcaccctggcagcctggtggagaagctgcctgacagccctgccctggccaagaaggccctgctggccctgaaccacggcctggacaaggcccacagcctgatggagctgagccccagcgcccctcctgggggcagcccccacctggacagcagccgcagccacagccccagcagcccagaccctgacacccccagccctgtgggggacagccgggccctgcaggccagcaggaacacccgcatcccccacctggccggcaagaaggctgtggccgaggaggacaatggcagcattggagaggagacagacagcagccctggcaggaagaagttccccctgaagatcttcaagaagcccctgaagaagtag

SEQ ID NO: 171878 - DNA, 2502 bp, synthetic construct
  misc_feature 1..2502: note = Description of Artificial Sequence: Synthetic coding sequence
  source 1..2502: mol_type = other DNA
atgaatgctgctggcatccgggcccctgaggccgccggggctgatggcacccggctggcccctgggggcagcccctgcctgcggcggcggggccggcctgaggagagccctgctgctgtggtggcccccaggggggccggggagctgcaggccgccggggcccccctgcgcttccacccagccagcccccggcggctgcacccagccagcaccccaggccctgcctggggctggctgctgcggcggcggcgctgggccgccctgctggtgctgggcctgctggtggccggggctgctgatggctgtgagctggtgcccaggcacctgcggggccggcgggccactggatctgctgccacagctgccagcagccctgctgctgctgctggggacagccctgccctgatgacagacccctgcatgagcctgagccccccctgcttcacagaagaagatcgcttcagcctggaggccctgcagaccatccacaagcagatggatgatgacaaggatggcggcatcgaggtggaggagagtgatgagttcatccgggaggacatgaagtacaaggatgccaccaacaagcacagccacctgcaccgggaggacaagcacatcaccatcgaggacctgtggaagcgctggaagaccagcgaggtgcacaactggaccctggaggacaccctgcagtggctgattgaatttgtggagctgccccagtatgagaagaacttccgggacaacaacgtgaagggcaccaccctgcccagaattgctgtgcatgagcccagcttcatgatcagccagctgaagatcagtgacaggagccaccggcagaagctgcagctgaaggccctggatgtggtgctgtttggccccctgaccaggcctccccacaactggatgaaggacttcatcctgactgtgtccatcgtgattggagtgggcggctgctggtttgcctacacccagaacaagaccagcaaggagcacgtggccaagatgatgaaggacctggagagcctgcagacagctgagcagagcctgatggacctgcaggagcggctggagaaggcccaggaggagaacagaaatgtggccgtggagaagcagaacctggagaggaagatgatggatgagatcaactatgccaaggaggaggcctgccgcctgcgggagctgcgggagggcgcagaatgtgagctgagccggcggcagtatgcagagcaggagctggagcaggtgaggatggccctgaagaaggccgagaaggagtttgagctgcggagctcctggagcgtgcctgatgccctgcagaagtggctgcagctgacccatgaggtggaggtgcagtactacaacatcaagaggcagaatgctgagatgcagctggccatcgccaaggatgaagctgagaagatcaagaagaagaggagcacagtgtttggcaccctgcacgtggcccacagcagcagcctggatgaggtggaccacaagatcctggaggccaagaaggccctgtctgagctgaccacctgcctgcgggagcggctcttccgctggcagcagatcgagaagatctgtggcttccagatcgcccacaacagcggcctgcccagcctgaccagcagcctgtacagcgaccacagctgggtggtgatgccccgggtgtccatccccccctaccccatcgccggcggcgtggatgacctggatgaggacaccccacccatcgtgtcccagtttcctggcaccatggccaagcccccaggcagcctggcccggagcagcagcctgtgccgcagcagaagaagcatcgtgcccagcagcccccagccccagagggcccagctggcccctcatgccccccaccccagccaccccaggcacccccaccacccccagcacaccccccacagcctgcccagcccagaccctgacatcctgtctgtgagcagctgcccagccctgtacagaaatgaggaggaggaggaggccatctacttctctgctgagaagcagtgggaggtgcctgacacagcctctgaatgtgacagcctgaacagcagcattggaaggaagcagagcccccccctgagcctggagatctaccagaccctgagccccaggaagatcagcagagatgaggtgtccctggaggacagcagcagaggagacagccctgtgacagtggatgtgtcctggggcagcccagactgtgtgggcctgacagagaccaagtccatgatcttctccccagccagcaaggtgtacaacggcatcctggagaagagctgcagcatgaaccagctgagcagcggcatccctgtgcccaagcccaggcacaccagctgcagcagcgctggaaatgacagcaagcctgtgcaggaggcccccagcgtggcccgcatcagcagcatcccccatgacctgtgccacaacggggagaagagcaagaagcccagcaagatcaagagcctcttcaagaagaagagcaagtag

SEQ ID NO: 171879 - DNA, 2526 bp, synthetic construct
  misc_feature 1..2526: note = Description of Artificial Sequence: Synthetic coding sequence
  source 1..2526: mol_type = other DNA
atgaatgctgctggcatccgggcccctgaggccgccggggctgatggcacccggctggcccctgggggcagcccctgcctgcggcggcggggccggcctgaggagagccctgctgctgtggtggcccccaggggggccggggagctgcaggccgccggggcccccctgcgcttccacccagccagcccccggcggctgcacccagccagcaccccaggccctgcctggggctggctgctgcggcggcggcgctgggccgccctgctggtgctgggcctgctggtggccggggctgctgatggctgtgagctggtgcccaggcacctgcggggccggcgggccactggatctgctgccacagctgccagcagccctgctgctgctgctggggacagccctgccctgatgacagacccctgcatgagcctgagccccccctgcttcacagaagaagatcgcttcagcctggaggccctgcagaccatccacaagcagatggatgatgacaaggatggcggcatcgaggtggaggagagtgatgagttcatccgggaggacatgaagtacaaggatgccaccaacaagcacagccacctgcaccgggaggacaagcacatcaccatcgaggacctgtggaagcgctggaagaccagcgaggtgcacaactggaccctggaggacaccctgcagtggctgattgaatttgtggagctgccccagtatgagaagaacttccgggacaacaacgtgaagggcaccaccctgcccagaattgctgtgcatgagcccagcttcatgatcagccagctgaagatcagtgacaggagccaccggcagaagctgcagctgaaggccctggatgtggtgctgtttggccccctgaccaggcctccccacaactggatgaaggacttcatcctgactgtgtccatcgtgattggagtgggcggctgctggtttgcctacacccagaacaagaccagcaaggagcacgtggccaagatgatgaaggacctggagagcctgcagacagctgagcagagcctgatggacctgcaggagcggctggagaaggcccaggaggagaacagaaatgtggccgtggagaagcagaacctggagaggaagatgatggatgagatcaactatgccaaggaggaggcctgccgcctgcgggagctgcgggagggcgcagaatgtgagctgagccggcggcagtatgcagagcaggagctggagcaggtgaggatggccctgaagaaggccgagaaggagtttgagctgcggagctcctggagcgtgcctgatgccctgcagaagtggctgcagctgacccatgaggtggaggtgcagtactacaacatcaagaggcagaatgctgagatgcagctggccatcgccaaggatgaggtggccgccagctacctgatccaggccgagaagatcaagaagaagaggagcacagtgtttggcaccctgcacgtggcccacagcagcagcctggatgaggtggaccacaagatcctggaggccaagaaggccctgtctgagctgaccacctgcctgcgggagcggctcttccgctggcagcagatcgagaagatctgtggcttccagatcgcccacaacagcggcctgcccagcctgaccagcagcctgtacagcgaccacagctgggtggtgatgccccgggtgtccatccccccctaccccatcgccggcggcgtggatgacctggatgaggacaccccacccatcgtgtcccagtttcctggcaccatggccaagcccccaggcagcctggcccggagcagcagcctgtgccgcagcagaagaagcatcgtgcccagcagcccccagccccagagggcccagctggcccctcatgccccccaccccagccaccccaggcacccccaccacccccagcacaccccccacagcctgcccagcccagaccctgacatcctgtctgtgagcagctgcccagccctgtacagaaatgaggaggaggaggaggccatctacttctctgctgagaagcagtgggaggtgcctgacacagcctctgaatgtgacagcctgaacagcagcattggaaggaagcagagcccccccctgagcctggagatctaccagaccctgagccccaggaagatcagcagagatgaggtgtccctggaggacagcagcagaggagacagccctgtgacagtggatgtgtcctggggcagcccagactgtgtgggcctgacagagaccaagtccatgatcttctccccagccagcaaggtgtacaacggcatcctggagaagagctgcagcatgaaccagctgagcagcggcatccctgtgcccaagcccaggcacaccagctgcagcagcgctggaaatgacagcaagcctgtgcaggaggcccccagcgtggcccgcatcagcagcatcccccatgacctgtgccacaacggggagaagagcaagaagcccagcaagatcaagagcctcttcaagaagaagagcaagtag

SEQ ID NO: 171880 - DNA, 2061 bp, synthetic construct
  misc_feature 1..2061: note = Description of Artificial Sequence: Synthetic coding sequence
  source 1..2061: mol_type = other DNA
atgaatgctgctggcatccgggcccctgaggccgccggggctgatggcacccggctggcccctgggggcagcccctgcctgcggcggcggggccggcctgaggagagccctgctgctgtggtggcccccaggggggccggggagctgcaggccgccggggcccccctgcgcttccacccagccagcccccggcggctgcacccagccagcaccccaggccctgcctggggctggctgctgcggcggcggcgctgggccgccctgctggtgctgggcctgctggtggccggggctgctgatggctgtgagctggtgcccaggcacctgcggggccggcgggccactggatctgctgccacagctgccagcagccctgctgctgctgctggggacagccctgccctgatgacagacccctgcatgagcctgagccccccctgcttcacagaagaagatcgcttcagcctggaggccctgcagaccatccacaagcagatggatgatgacaaggatggcggcatcgaggtggaggagagtgatgagttcatccgggaggacatgaagtacaaggatgccaccaacaagcacagccacctgcaccgggaggacaagcacatcaccatcgaggacctgtggaagcgctggaagaccagcgaggtgcacaactggaccctggaggacaccctgcagtggctgattgaatttgtggagctgccccagtatgagaagaacttccgggacaacaacgtgaagggcaccaccctgcccagaattgctgtgcatgagcccagcttcatgatcagccagctgaagatcagtgacaggagccaccggcagaagctgcagctgaaggccctggatgtggtgctgtttggccccctgaccaggcctccccacaactggatgaaggacttcatcctgactgtgtccatcgtgattggagtgggcggctgctggtttgcctacacccagaacaagaccagcaaggagcacgtggccaagatgatgaaggacctggagagcctgcagacagctgagcagagcctgatggacctgcaggagcggctggagaaggcccaggaggagaacagaaatgtggccgtggagaagcagaacctggagaggaagatgatggatgagatcaactatgccaaggaggaggcctgccgcctgcgggagctgcgggagggcgcagaatgtgagctgagccggcggcagtatgcagagcaggagctggagcaggtgaggatggccctgaagaaggccgagaaggagtttgagctgcggagctcctggagcgtgcctgatgccctgcagaagtggctgcagctgacccatgaggtggaggtgcagtactacaacatcaagaggcagaatgctgagatgcagctggccatcgccaaggatgaagctgagaagatcaagaagaagaggagcacagtgtttggcaccctgcacgtggcccacagcagcagcctggatgaggtggaccacaagatcctggaggccaagaaggccctgtctgagctgaccacctgcctgcgggagcggctcttccgctggcagcagatcgagaagatctgtggcttccagatcgcccacaacagcggcctgcccagcctgaccagcagcctgtacagcgaccacagctgggtggtgatgccccgggtgtccatccccccctaccccatcgccggcggcgtggatgacctggatgaggacaccccacccatcgtgtcccagtttcctggcaccatggccaagcccccaggcagcctggcccggagcagcagcctgtgccgcagcagaagaagcatcgtgcccagcagcccccagccccagagggcccagctggcccctcatgccccccaccccagccaccccaggcacccccaccacccccagcacaccccccacagcctgcccagcccagaccctgacatcctgtctgtgagcagctgcccagccctgtacagaaatgaggaggaggaggaggccatctacttctctgctgagaagcagtgcatccacctgggcctgggcgcctgcaagtctgagtag

SEQ ID NO: 171881 - DNA, 2241 bp, synthetic construct
  misc_feature 1..2241: note = Description of Artificial Sequence: Synthetic coding sequence
  source 1..2241: mol_type = other DNA
ctgctggtgctgggcctgctggtggccggggctgctgatggctgtgagctggtgcccaggcacctgcggggcagaagagccaccggcagcgctgccacagctgccagcagccctgctgctgctgctggggacagccctgccctgatgacagacccctgcatgagcctgagccccccctgcttcacagaggaggaccgcttcagcctggaggccctgcagaccatccacaagcagatggatgatgacaaggatggcggcatcgaggtggaggagagtgatgagttcatccgggaggacatgaagtacaaggatgccaccaacaagcacagccacctgcaccgggaggacaagcacatcaccatcgaggacctgtggaagcgctggaagaccagcgaggtgcacaactggaccctggaggacaccctgcagtggctgattgaatttgtggagctgccccagtatgagaagaacttccgggacaacaacgtgaagggcaccaccctgcccagaattgctgtgcatgagcccagcttcatgatcagccagctgaagatcagtgacaggagccaccggcagaagctgcagctgaaggccctggatgtggtgctgtttggccccctgacccggcccccccacaactggatgaaggacttcatcctgactgtgtccatcgtcatcggcgtgggcggctgctggtttgcctacacccagaacaagaccagcaaggagcacgtggccaagatgatgaaggacctggagagcctgcagacagctgagcagagcctgatggacctgcaggagcggctggagaaggcccaggaggagaacagaaatgtggccgtggagaagcagaacctggagaggaagatgatggatgagatcaactatgccaaggaggaggcctgccgcctgcgggagctgcgggagggcgcagaatgtgagctgagccggcggcagtatgcagagcaggagctggagcaggtgaggatggccctgaagaaggccgagaaggagtttgagctgcggagctcctggagcgtgcctgatgccctgcagaagtggctgcagctgacccatgaggtggaggtgcagtactacaacatcaagaggcagaatgctgagatgcagctggccatcgccaaggatgaggccgagaagatcaagaagaagaggagcacagtgtttggcaccctgcacgtggcccacagcagcagcctggatgaggtggaccacaagatcctggaggccaagaaggccctgtctgagctgaccacctgcctgcgggagcggctcttccgctggcagcagatcgagaagatctgtggcttccagatcgcccacaacagcggcctgcccagcctgaccagcagcctgtacagcgaccacagctgggtggtgatgccccgggtgtccatccccccctaccccatcgccggcggcgtggatgacctggatgaggacaccccacccatcgtgtcccagtttcctggcaccatggccaagcccccaggcagcctggcccggagcagcagcctgtgccgcagccgccgcagcatcgtgcccagcagcccccagccccagagggcccagctggccccccacgccccccaccccagccaccccaggcacccccaccacccccagcacaccccccacagcctgcccagcccagaccctgacatcctgtctgtgagcagctgcccagccctgtacagaaatgaggaggaggaggaggccatctacttctctgctgagaagcagtgggaggtgcctgacacagcctctgaatgtgacagcctgaacagcagcatcggcaggaagcagagcccccccctgagcctggagatctaccagaccctgagccccaggaagatcagcagagatgaggtgtccctggaggacagcagcagaggagacagccctgtgacagtggatgtgtcctggggcagcccagactgtgtgggcctgacagagaccaagtccatgatcttcagccctgccagcaaggtgtacaacggcatcctggagaagagctgcagcatgaaccagctgagcagcggcatccctgtgcccaagcccaggcacaccagctgcagcagcgctggaaatgacagcaagcctgtgcaggaggcccccagcgtggcccgcatcagcagcatcccccatgacctgtgccacaatggagagaagagcaagaagcccagcaagatcaagagcctcttcaagaagaagagcaagtag

SEQ ID NO: 171882 - DNA, 2265 bp, synthetic construct
  misc_feature 1..2265: note = Description of Artificial Sequence: Synthetic coding sequence
  source 1..2265: mol_type = other DNA
ctgctggtgctgggcctgctggtggccggggctgctgatggctgtgagctggtgcccaggcacctgcggggcagaagagccaccggcagcgctgccacagctgccagcagccctgctgctgctgctggggacagccctgccctgatgacagacccctgcatgagcctgagccccccctgcttcacagaggaggaccgcttcagcctggaggccctgcagaccatccacaagcagatggatgatgacaaggatggcggcatcgaggtggaggagagtgatgagttcatccgggaggacatgaagtacaaggatgccaccaacaagcacagccacctgcaccgggaggacaagcacatcaccatcgaggacctgtggaagcgctggaagaccagcgaggtgcacaactggaccctggaggacaccctgcagtggctgattgaatttgtggagctgccccagtatgagaagaacttccgggacaacaacgtgaagggcaccaccctgcccagaattgctgtgcatgagcccagcttcatgatcagccagctgaagatcagtgacaggagccaccggcagaagctgcagctgaaggccctggatgtggtgctgtttggccccctgacccggcccccccacaactggatgaaggacttcatcctgactgtgtccatcgtcatcggcgtgggcggctgctggtttgcctacacccagaacaagaccagcaaggagcacgtggccaagatgatgaaggacctggagagcctgcagacagctgagcagagcctgatggacctgcaggagcggctggagaaggcccaggaggagaacagaaatgtggccgtggagaagcagaacctggagaggaagatgatggatgagatcaactatgccaaggaggaggcctgccgcctgcgggagctgcgggagggcgcagaatgtgagctgagccggcggcagtatgcagagcaggagctggagcaggtgaggatggccctgaagaaggccgagaaggagtttgagctgcggagctcctggagcgtgcctgatgccctgcagaagtggctgcagctgacccatgaggtggaggtgcagtactacaacatcaagaggcagaatgctgagatgcagctggccatcgccaaggatgaggtggccgccagctacctgatccaggccgagaagatcaagaagaagaggagcacagtgtttggcaccctgcacgtggcccacagcagcagcctggatgaggtggaccacaagatcctggaggccaagaaggccctgtctgagctgaccacctgcctgcgggagcggctcttccgctggcagcagatcgagaagatctgtggcttccagatcgcccacaacagcggcctgcccagcctgaccagcagcctgtacagcgaccacagctgggtggtgatgccccgggtgtccatccccccctaccccatcgccggcggcgtggatgacctggatgaggacaccccacccatcgtgtcccagtttcctggcaccatggccaagcccccaggcagcctggcccggagcagcagcctgtgccgcagccgccgcagcatcgtgcccagcagcccccagccccagagggcccagctggccccccacgccccccaccccagccaccccaggcacccccaccacccccagcacaccccccacagcctgcccagcccagaccctgacatcctgtctgtgagcagctgcccagccctgtacagaaatgaggaggaggaggaggccatctacttctctgctgagaagcagtgggaggtgcctgacacagcctctgaatgtgacagcctgaacagcagcatcggcaggaagcagagcccccccctgagcctggagatctaccagaccctgagccccaggaagatcagcagagatgaggtgtccctggaggacagcagcagaggagacagccctgtgacagtggatgtgtcctggggcagcccagactgtgtgggcctgacagagaccaagtccatgatcttcagccctgccagcaaggtgtacaacggcatcctggagaagagctgcagcatgaaccagctgagcagcggcatccctgtgcccaagcccaggcacaccagctgcagcagcgctggaaatgacagcaagcctgtgcaggaggcccccagcgtggcccgcatcagcagcatcccccatgacctgtgccacaatggagagaagagcaagaagcccagcaagatcaagagcctcttcaagaagaagagcaagtag

SEQ ID NO: 171883 - DNA, 1800 bp, synthetic construct
  misc_feature 1..1800: note = Description of Artificial Sequence: Synthetic coding sequence
  source 1..1800: mol_type = other DNA
ctgctggtgctgggcctgctggtggccggggctgctgatggctgtgagctggtgcccaggcacctgcggggcagaagagccaccggcagcgctgccacagctgccagcagccctgctgctgctgctggggacagccctgccctgatgacagacccctgcatgagcctgagccccccctgcttcacagaggaggaccgcttcagcctggaggccctgcagaccatccacaagcagatggatgatgacaaggatggcggcatcgaggtggaggagagtgatgagttcatccgggaggacatgaagtacaaggatgccaccaacaagcacagccacctgcaccgggaggacaagcacatcaccatcgaggacctgtggaagcgctggaagaccagcgaggtgcacaactggaccctggaggacaccctgcagtggctgattgaatttgtggagctgccccagtatgagaagaacttccgggacaacaacgtgaagggcaccaccctgcccagaattgctgtgcatgagcccagcttcatgatcagccagctgaagatcagtgacaggagccaccggcagaagctgcagctgaaggccctggatgtggtgctgtttggccccctgacccggcccccccacaactggatgaaggacttcatcctgactgtgtccatcgtcatcggcgtgggcggctgctggtttgcctacacccagaacaagaccagcaaggagcacgtggccaagatgatgaaggacctggagagcctgcagacagctgagcagagcctgatggacctgcaggagcggctggagaaggcccaggaggagaacagaaatgtggccgtggagaagcagaacctggagaggaagatgatggatgagatcaactatgccaaggaggaggcctgccgcctgcgggagctgcgggagggcgcagaatgtgagctgagccggcggcagtatgcagagcaggagctggagcaggtgaggatggccctgaagaaggccgagaaggagtttgagctgcggagctcctggagcgtgcctgatgccctgcagaagtggctgcagctgacccatgaggtggaggtgcagtactacaacatcaagaggcagaatgctgagatgcagctggccatcgccaaggatgaggccgagaagatcaagaagaagaggagcacagtgtttggcaccctgcacgtggcccacagcagcagcctggatgaggtggaccacaagatcctggaggccaagaaggccctgtctgagctgaccacctgcctgcgggagcggctcttccgctggcagcagatcgagaagatctgtggcttccagatcgcccacaacagcggcctgcccagcctgaccagcagcctgtacagcgaccacagctgggtggtgatgccccgggtgtccatccccccctaccccatcgccggcggcgtggatgacctggatgaggacaccccacccatcgtgtcccagtttcctggcaccatggccaagcccccaggcagcctggcccggagcagcagcctgtgccgcagccgccgcagcatcgtgcccagcagcccccagccccagagggcccagctggccccccacgccccccaccccagccaccccaggcacccccaccacccccagcacaccccccacagcctgcccagcccagaccctgacatcctgtctgtgagcagctgcccagccctgtacagaaatgaggaggaggaggaggccatctacttctctgctgagaagcagtgcatccacctgggcctgggcgcctgcaagtctgagtag

SEQ ID NO: 171884 - DNA, 3654 bp, synthetic construct
  misc_feature 1..3654: note = Description of Artificial Sequence: Synthetic coding sequence
  source 1..3654: mol_type = other DNA
atgtacatcaagcaggtgatcatccagggcttccgcagctacagagaccagaccatcgtggaccccttcagcagcaagcacaacgtcatcgtgggcagaaatggcagcggcaagagcaacttcttctacgccatccagtttgtgctgagtgatgagttcagccacctgcggcctgagcagaggctggccctgctgcacgagggcaccggccccagggtcatcagcgcctttgtggagatcatctttgacaacagcgacaaccggctgcccatcgacaaggaggaggtgtccctgcggcgggtcatcggggccaagaaggaccagtacttcctggacaagaagatggtgaccaagaatgatgtgatgaacctgctggagagcgctggcttcagccgcagcaacccctactacatcgtgaagcagggcaagatcaaccagatggccacagccccagacagccagaggctgaagctgctgcgggaggtggccggcaccagggtgtatgatgagaggaaggaggagagcatcagcctgatgaaggagacagagggcaagcgggagaagatcaatgagctgctgaagtacatcgaggagcggctgcacaccctggaggaggagaaggaggagctggcccagtaccagaagtgggacaagatgaggcgggccctggagtacaccatctacaaccaggagctgaatgagacccgggccaagctggatgagctgagcgccaagcgggagaccagcggggagaagagccggcagctgagagatgcccagcaggatgcccgggacaagatggaggacatcgagcggcaggtgcgggagctgaagaccaagatcagcgccatgaaggaggagaaggagcagctgtctgctgagcggcaggagcagatcaagcagaggaccaagctggagctgaaggccaaggacctgcaggatgagctggccggcaacagcgagcagaggaagaggctgctgaaggagcggcagaagctgctggagaagattgaggagaagcagaaggagctggccgagacagagcccaagttcaacagcgtgaaggagaaggaggagcggggcatcgcccggctggcccaggccacccaggagaggacagacctgtatgccaagcagggccggggcagccagttcaccagcaaggaggagcgggacaagtggatcaagaaggagctgaagagcctggaccaggccatcaatgacaagaagaggcagattgctgccatccacaaggacctggaggacacagaggccaacaaggagaagaacctggagcagtacaacaagctggaccaggacctgaatgaggtgaaggcccgggtggaggagctggacaggaagtactatgaggtgaagaacaagaaggatgagctgcagagcgagaggaactacctgtggagggaggagaatgctgagcagcaggccctggccgccaagcgggaggacctggagaagaagcagcagctgctgcgggccgccaccgggaaggccatcctgaatggaattgacagcatcaacaaggtgctggaccacttccggaggaagggcatcaaccagcacgtgcagaatggctaccatggaattgtgatgaacaactttgaatgtgagcccgccttctacacctgtgtggaggtgacagctggcaacagactcttctaccacatcgtggacagtgatgaggtgtccaccaagatcctgatggagttcaacaagatgaacctgcccggggaggtgaccttcctgcccctgaacaagctggatgtgcgggacacagcctacccagagaccaatgatgccatccccatgatcagcaagctgcgctacaaccccaggtttgacaaggccttcaagcacgtgtttgggaagaccctcatctgccgctccatggaggtgtccacccagctggcccgggccttcaccatggactgcatcaccctggagggggaccaggtgagccacagaggagccctgactggaggctactatgacaccaggaagagccggctggagctgcagaaggatgtgaggaaggccgaggaggagctgggggagctggaggccaagctgaatgaaaacctgcggaggaacatcgagcgcatcaacaatgaaattgaccagctgatgaaccagatgcagcagatcgagacccagcagaggaagttcaaggccagccgggacagcatcctgtctgagatgaagatgctgaaggagaagaggcagcagagcgagaagaccttcatgcccaagcagaggagcctgcagagcctggaggccagcctgcacgccatggagagcacccgggagagcctgaaggccgagctgggcacagacctgctgagccagctgagcctggaggaccagaagagggtggatgccctgaatgatgagatccggcagctgcagcaggagaaccggcagctgctgaatgaaagaatcaagctggagggcatcatcaccagggtggagacctacctgaatgaaaacctgaggaagaggctggaccaggtggagcaggagctgaatgagctgcgggagacagaaggaggcaccgtgctgacagccaccaccagcgagctggaggccatcaacaagagggtgaaggacaccatggcccggtctgaggacctggacaacagcattgacaagacagaggccggcatcaaggagctgcagaagtccatggagcgctggaagaacatggagaaggagcacatggatgccatcaaccacgacaccaaggagctggagaagatgaccaaccggcagggcatgctgctgaagaagaaggaggagtgcatgaagaagatccgggagctgggcagcctgccccaggaggcctttgagaagtaccagaccctgagcctgaagcagctgttcaggaagctggagcagtgcaacacagagctgaagaagtacagccacgtgaacaagaaggccctggaccagtttgtgaacttcagcgagcagaaggagaagctgatcaagaggcaggaggagctggaccggggctacaagagcatcatggagctgatgaatgtgctggagctgaggaaatatgaggccatccagctgaccttcaagcaggtgtccaagaacttcagcgaggtgttccagaagctggtgcctgggggcaaggccaccctggtgatgaagaagggagatgtggagggcagccagagccaggatgaaggagagggcagcggggagagcgagcggggcagcggcagccagagctctgtgcccagcgtggaccagttcaccggggtgggcatccgggtgtccttcaccgggaagcagggcgagatgagggagatgcagcagctgagcggcggccagaagagcctggtggccctggccctgatctttgccatccagaagtgtgaccctgcccccttctacctgtttgatgaaattgaccaggccctggatgcccagcacaggaaggctgtgtctgacatgatcatggagctggccgtgcacgcccagttcatcaccaccaccttccggcctgagctgctggagagcgctgacaagttctatggagtgaagttcaggaacaaggtgagccacattgatgtgatcacagctgagatggccaaggactttgtggaggatgacaccacccacggctag

SEQ ID NO: 171885 - DNA, 3306 bp, synthetic construct
  misc_feature 1..3306: note = Description of Artificial Sequence: Synthetic coding sequence
  source 1..3306: mol_type = other DNA
atggccacccccagcaagaagaccagcacccccagcccccagcccagcaagagggccctgccccgggaccccagcagcgaggtgcccagcaagaggaagaacagcgccccccagctgcccctgctgcagagcagcggcccctttgtggagggcagcatcgtgcgcatctccatggagaacttcctgacctatgacatctgtgaggtgtccccaggcccccacctgaacatgattgtgggcgccaacggcaccgggaagagcagcatcgtgtgtgccatctgcctgggcctggccggcaagccagccttcatgggccgggctgacaaggtgggcttctttgtgaagaggggctgcagccggggcatggtggagattgagctgttccgggccagcggcaacctggtgatcacccgggagattgatgtggccaagaaccagagcttctggttcatcaacaagaagagcaccacccagaagatcgtggaggagaaggtggccgccctgaacatccaggtgggcaacctgtgccagttcctgccccaggacaaggtgggggagtttgccaagctgagcaagattgagctgctggaggccacagagaagagcatcggccccccagagatgcacaagtaccactgtgagctgaagaacctgcgggagaaggagaagcagctggagaccagctgcaaggagaagacagagtacctgcagaagatggtgcagagaaatgaaagatacaagcaggatgtggagcgcttctatgaaaggaagaggcacctggacctgattgagatgctggaggccaagaggccctgggtggagtatgaaaatgtgcggcaggagtatgaggaggtgaagctggtgcgggacagagtgaaggaggaggtgaggaagctgaaggagggccagatccctgtgacctgccgcatcgaggagatggagaatgaaagacacaacctggaggcccgcatcaaggagaaggccacagacatcaaggaggccagccagaagtgcaagcagaagcaggatgtgattgaaaggaaggacaagcacatcgaggagctgcagcaggccctgattgtgaagcagaatgaggagctggaccggcagaggagaattggcaacaccaggaagatgattgaggacctgcagaatgagctgaagaccacagagaactgtgagaacctgcagccccagattgatgccatcaccaatgacctgcggcgcatccaggatgagaaggccctgtgtgagggggagatcatcgacaagagaagagagcgggagaccctggagaaggagaagaagtctgtggatgaccacatcgtgcgctttgacaacctgatgaaccagaaggaggacaagctgcggcagcgcttccgggacacctatgatgctgtgctgtggctgaggaacaacagagacaagttcaagcagagggtgtgtgagcccatcatgctgaccatcaacatgaaggacaacaagaatgccaagtacatcgagaaccacatccccagcaatgacctgcgggcctttgtgtttgagagccaggaggacatggaggtgttcctgaaggaggtgcgggacaacaagaagctgcgggtgaatgctgtgattgcccccaagagcagctatgctgacaaggcccccagccgcagcctgaatgagctgaagcagtatggcttcttctcctacctgcgggagctgtttgatgccccagaccctgtgatgagctacctgtgctgccagtaccacatccacgaggtgcctgtgggcacagagaagacccgggagcgcatcgagagggtcatccaggagacccggctgaagcagatctacacagctgaggagaagtatgtggtgaagaccagcttctacagcaacaaggtgatcagcagcaacaccagcctgaaggtggcccagttcctgactgtgacagtggacctggagcagaggaggcacctggaggagcagctgaaggagatccacaggaagctgcaggccgtggacagcggcctcatcgccctgcgggagaccagcaagcacctggagcacaaggacaatgagctgcggcagaagaagaaggagctgctggagaggaagaccaagaagaggcagctggagcagaagatcagcagcaagctgggcagcctgaagctgatggagcaggacacctgcaacctggaggaggaggagaggaaggccagcaccaagatcaaggagatcaacgtgcagaaggccaagctggtgacagagctgaccaacctgatcaagatctgcaccagcctgcacatccagaaggtggacctgatcctgcagaacaccaccgtcatcagcgagaagaacaagctggagagtgactacatggccgccagcagccagctgcggctgacagagcagcacttcatcgagctggatgaaaatcggcagaggctgctgcagaagtgcaaggagctgatgaagagggcccggcaggtgtgcaacctgggcgctgagcagaccctgccccaggagtaccagacccaggtgcccaccatccccaacggccacaacagcagcctgcccatggtgttccaggacctgcccaacaccctggatgaaattgatgccctgctgacagaggagaggagccgggccagctgcttcaccggcctgaaccccaccatcgtgcaggagtacaccaagcgggaggaggagattgagcagctgacagaggagctgaagggcaagaaggtggagctggaccagtaccgggagaacatcagccaggtgaaggagcgctggctgaaccccctgaaggagctggtggagaagatcaatgagaagttcagcaacttcttcagctccatgcagtgtgccggggaggtggacctgcacacagaaaatgaggaggactatgacaagtatggcatccgcatccgggtgaagttccgcagcagcacccagctgcacgagctgaccccccaccaccagagcggcggggagaggtctgtgtccaccatgctgtacctgatggccctgcaggagctgaaccgctgccccttccgggtggtggatgagatcaaccagggcatggaccccatcaatgaaagaagagtgtttgagatggtggtgaacacagcctgcaaggagaacaccagccagtacttcttcatcacccccaagctgctgcagaacctgccctacagcgagaagatgacagtgctgtttgtgtacaacggcccccacatgctggagcccaacacctggaacctgaaggccttccagaggagaagaagacgcatcaccttcacccagcccagctag

SEQ ID NO: 171886 - DNA, 3276 bp, synthetic construct
  misc_feature 1..3276: note = Description of Artificial Sequence: Synthetic coding sequence
  source 1..3276: mol_type = other DNA
atggccaagaggaaggaggagaacttcagcagccccaagaatgccaagaggccccggcaggaggagctggaggactttgacaaggatggagatgaagatgagtgcaagggcaccaccctgacagctgctgaggtgggcatcatcgagagcatccacctgaagaacttcatgtgccacagcatgctgggccccttcaagtttggcagcaatgtgaactttgtggtgggcaacaacggcagcggcaagtctgctgtgctgacagccctgattgtgggcctgggcggccgggctgtggccaccaacagaggcagcagcctgaagggctttgtgaaggatggccagaacagcgctgacatcagcatcaccctgaggaacagaggagatgatgccttcaaggcctctgtgtatggcaacagcatcctgatccagcagcacatcagcattgatggcagccgcagctacaagctgaagagcgccaccggctctgtggtgtccaccaggaaggaggagctgattgccatcctggaccacttcaacatccaggtggacaaccctgtgtctgtgctgacccaggagatgagcaagcagttcctgcagagcaagaatgaaggagacaagtacaagttcttcatgaaggccacccagctggagcagatgaaggaggactacagctacatcatggagaccaaggagaggaccaaggagcagatccaccagggcgaggagcggctgacagagctgaagaggcagtgtgtggagaaggaggagcgcttccagagcattgctggcctgagcaccatgaagaccaacctggagagcctgaagcatgagatggcctgggccgtggtgaatgaaattgagaagcagctgaatgccatccgggacaacatcaagattggagaagatcgggccgcccggctggacaggaagatggaggagcagcaggtgcggctgaatgaagctgagcagaagtacaaggacatccaggacaagctggagaagatcagcgaggagaccaatgcccgggcccctgagtgcatggccctgaaggcagatgtggtggccaagaagagggcctacaatgaagctgaggtgctgtacaacagaagcctgaatgagtacaaggccctgaagaaggatgatgagcagctgtgcaagagaattgaggagctgaagaagagcacagaccagagcctggagcctgagcggctggagcggcagaagaagatctcctggctgaaggagcgggtgaaggccttccagaaccaggagaacagcgtgaaccaggagattgagcagttccagcaggccatcgagaaggacaaggaggagcacggcaagatcaagcgggaggagctggatgtgaagcacgccctgagctacaaccagaggcagctgaaggagctgaaggacagcaagacagaccggctgaagcgcttcggccccaacgtgcctgccctgctggaggccattgatgatgcctaccggcagggccacttcacctacaagcctgtgggccccctgggcgcctgcatccacctgcgggaccctgagctggccctggccatcgagagctgcctgaagggcctgctgcaggcctactgctgccacaaccacgcagatgagcgggtgctgcaggccctgatgaagcgcttctacctgcccggcaccagccggccccccatcatcgtgtctgagttcagaaatgagatctatgatgtgcgccaccgggccgcctaccacccagacttccccaccgtgctgacagccctggagattgacaatgctgtggtggccaacagcctgattgacatgaggggcatcgagaccgtgctgctgatcaagaacaacagcgtggcccgggctgtgatgcagagccagaagccacccaagaactgccgggaggccttcaccgcagatggagaccaggtgtttgctggccgctactacagcagcgagaacacccggcccaagttcctgagcagagatgtggacagcgagatcagtgacctggagaatgaggtggagaacaagacagcccagatcctgaacctgcagcagcacctgagcgccctggagaaggacatcaagcacaatgaggagctgctgaagcgctgccagctgcactacaaggagctgaagatgaagatcaggaagaacatcagcgagatccgggagctggagaacatcgaggagcaccagagcgtggacatcgccaccctggaggatgaggcccaggagaacaagagcaagatgaagatggtggaggagcacatggagcagcagaaggagaacatggagcacctgaagagcctgaagattgaagctgagaacaagtatgatgccatcaagttcaagatcaaccagctgtctgagctggccgaccccctgaaggatgagctgaacctggccgacagcgaggtggacaaccagaagaggggcaagaggcactatgaggagaagcagaaggagcacctggacaccctgaacaagaagaagcgggagctggacatgaaggagaaggagctggaggagaagatgagccaggcccggcagatctgcccagagcgcatcgaggtggagaagagcgccagcatcctggacaaggagatcaaccggctgcggcagaagatccaggccgagcacgccagccatggagaccgggaggagatcatgaggcagtaccaggaggcccgggagacctacctggacctggacagcaaggtgaggaccctgaagaagttcatcaagctgctgggggagatcatggagcaccgcttcaagacctaccagcagttccgccgctgcctgaccctgcgctgcaagctgtactttgacaacctgctgagccagagggcctactgcggcaagatgaactttgaccacaagaatgagaccctgagcatctctgtgcagcctggagagggcaacaaggccgccttcaatgacatgagggccctgagcggcggggagaggagcttcagcacagtgtgcttcatcctgagcctgtggagcattgctgagagccccttccgctgcctggatgaatttgatgtgtacatggacatggtgaacagacgcatcgccatggacctgatcctgaagatggctgacagccagcgcttccggcagttcatcctgctgaccccccagagcatgagcagcctgcccagcagcaagctgatccgcatcctgaggatgtctgaccctgagcggggccagaccaccctgcccttccggcctgtgacccaggaggaggatgatgaccagaggtag

SEQ ID NO: 171887 - DNA, 3354 bp, synthetic construct
  misc_feature 1..3354: note = Description of Artificial Sequence: Synthetic coding sequence
  source 1..3354: mol_type = other DNA
atggccaagaggaaggaggagaacttcagcagccccaagaatgccaagaggccccggcaggaggagctggaggactttgacaaggatggagatgaagatgagtgcaagggcaccaccctgacagctgctgaggtgggcatcatcgagagcatccacctgaagaacttcatgtgccacagcatgctgggccccttcaagtttggcagcaatgtgaactttgtggtgggcaacaacggctcctggagcgctgtggtgcgcagccggctgaatgccaccagcgccagccaggtgcaggccatcctgctcttccagccctgtgggaagtctgctgtgctgacagccctgattgtgggcctgggcggccgggctgtggccaccaacagaggcagcagcctgaagggctttgtgaaggatggccagaacagcgctgacatcagcatcaccctgaggaacagaggagatgatgccttcaaggcctctgtgtatggcaacagcatcctgatccagcagcacatcagcattgatggcagccgcagctacaagctgaagagcgccaccggctctgtggtgtccaccaggaaggaggagctgattgccatcctggaccacttcaacatccaggtggacaaccctgtgtctgtgctgacccaggagatgagcaagcagttcctgcagagcaagaatgaaggagacaagtacaagttcttcatgaaggccacccagctggagcagatgaaggaggactacagctacatcatggagaccaaggagaggaccaaggagcagatccaccagggcgaggagcggctgacagagctgaagaggcagtgtgtggagaaggaggagcgcttccagagcattgctggcctgagcaccatgaagaccaacctggagagcctgaagcatgagatggcctgggccgtggtgaatgaaattgagaagcagctgaatgccatccgggacaacatcaagattggagaagatcgggccgcccggctggacaggaagatggaggagcagcaggtgcggctgaatgaagctgagcagaagtacaaggacatccaggacaagctggagaagatcagcgaggagaccaatgcccgggcccctgagtgcatggccctgaaggcagatgtggtggccaagaagagggcctacaatgaagctgaggtgctgtacaacagaagcctgaatgagtacaaggccctgaagaaggatgatgagcagctgtgcaagagaattgaggagctgaagaagagcacagaccagagcctggagcctgagcggctggagcggcagaagaagatctcctggctgaaggagcgggtgaaggccttccagaaccaggagaacagcgtgaaccaggagattgagcagttccagcaggccatcgagaaggacaaggaggagcacggcaagatcaagcgggaggagctggatgtgaagcacgccctgagctacaaccagaggcagctgaaggagctgaaggacagcaagacagaccggctgaagcgcttcggccccaacgtgcctgccctgctggaggccattgatgatgcctaccggcagggccacttcacctacaagcctgtgggccccctgggcgcctgcatccacctgcgggaccctgagctggccctggccatcgagagctgcctgaagggcctgctgcaggcctactgctgccacaaccacgcagatgagcgggtgctgcaggccctgatgaagcgcttctacctgcccggcaccagccggccccccatcatcgtgtctgagttcagaaatgagatctatgatgtgcgccaccgggccgcctaccacccagacttccccaccgtgctgacagccctggagattgacaatgctgtggtggccaacagcctgattgacatgaggggcatcgagaccgtgctgctgatcaagaacaacagcgtggcccgggctgtgatgcagagccagaagccacccaagaactgccgggaggccttcaccgcagatggagaccaggtgtttgctggccgctactacagcagcgagaacacccggcccaagttcctgagcagagatgtggacagcgagatcagtgacctggagaatgaggtggagaacaagacagcccagatcctgaacctgcagcagcacctgagcgccctggagaaggacatcaagcacaatgaggagctgctgaagcgctgccagctgcactacaaggagctgaagatgaagatcaggaagaacatcagcgagatccgggagctggagaacatcgaggagcaccagagcgtggacatcgccaccctggaggatgaggcccaggagaacaagagcaagatgaagatggtggaggagcacatggagcagcagaaggagaacatggagcacctgaagagcctgaagattgaagctgagaacaagtatgatgccatcaagttcaagatcaaccagctgtctgagctggccgaccccctgaaggatgagctgaacctggccgacagcgaggtggacaaccagaagaggggcaagaggcactatgaggagaagcagaaggagcacctggacaccctgaacaagaagaagcgggagctggacatgaaggagaaggagctggaggagaagatgagccaggcccggcagatctgcccagagcgcatcgaggtggagaagagcgccagcatcctggacaaggagatcaaccggctgcggcagaagatccaggccgagcacgccagccatggagaccgggaggagatcatgaggcagtaccaggaggcccgggagacctacctggacctggacagcaaggtgaggaccctgaagaagttcatcaagctgctgggggagatcatggagcaccgcttcaagacctaccagcagttccgccgctgcctgaccctgcgctgcaagctgtactttgacaacctgctgagccagagggcctactgcggcaagatgaactttgaccacaagaatgagaccctgagcatctctgtgcagcctggagagggcaacaaggccgccttcaatgacatgagggccctgagcggcggggagaggagcttcagcacagtgtgcttcatcctgagcctgtggagcattgctgagagccccttccgctgcctggatgaatttgatgtgtacatggacatggtgaacagacgcatcgccatggacctgatcctgaagatggctgacagccagcgcttccggcagttcatcctgctgaccccccagagcatgagcagcctgcccagcagcaagctgatccgcatcctgaggatgtctgaccctgagcggggccagaccaccctgcccttccggcctgtgacccaggaggaggatgatgaccagaggtag

SEQ ID NO: 171888 - DNA, 3276 bp, synthetic construct; identical to SEQ ID NO: 171886
  misc_feature 1..3276: note = Description of Artificial Sequence: Synthetic coding sequence
  source 1..3276: mol_type = other DNA

SEQ ID NO: 171889 - DNA, 174 bp, synthetic construct
  misc_feature 1..174: note = Description of Artificial Sequence: Synthetic coding sequence
  source 1..174: mol_type = other DNA
atggccaagaggaaggaggagaacttcagcagccccaagaatgccaagaggccccggcaggaggagctggaggactttgacaaggatggagatgaagatgagtgcaagggcaccaccctgacagctgctgaggtgggcatcatcgagagcatccacctgaagaacttcatgtag

SEQ ID NO: 171890 - DNA, 3276 bp, synthetic construct; identical to SEQ ID NO: 171886
  misc_feature 1..3276: note = Description of Artificial Sequence: Synthetic coding sequence
  source 1..3276: mol_type = other DNA

SEQ ID NO: 171891 - DNA, 2130 bp, synthetic construct
  misc_feature 1..2130: note = Description of Artificial Sequence: Synthetic coding sequence
  source 1..2130: mol_type = other DNA
atggccgagaccctggagttcaatgatgtgtaccaggaggtgaagggctccatgaatgatggccgcctgcggctgagccggcagggcatcatcttcaagaacagcaagacaggcaaggtggacaacatccaggccggggagctgacagagggcatctggaggagagtggccctgggccacggcctgaagctgctgaccaagaatggccacgtgtacaagtatgatggcttccgggagagcgagtttgagaagctgagtgacttcttcaagacccactaccgcctggagctgatggagaaggacctgtgtgtgaagggctggaactggggcaccgtgaagtttggaggccagctgctgagctttgatattggagaccagcctgtgtttgagatccccctgagcaatgtgtcccagtgcaccaccgggaagaatgaggtgaccctggagttccaccagaatgatgatgctgaggtgtccctgatggaggtgcgcttctacgtgccccccacccaggaggatggagtggaccctgtggaggcctttgcccagaatgtgctgagcaaggcagatgtgatccaggccactggagatgccatctgcatcttccgggagctgcagtgcctgaccccccggggccgctatgacatccgcatctaccccaccttcctgcacctgcacggcaagacctttgactacaagatcccctacaccaccgtgctgcggctcttcctgctgccccacaaggaccagaggcagatgttctttgtgatcagcctggacccccccatcaagcagggccagacccgctaccacttcctgatcctgctcttcagcaaggatgaggacatcagcctgaccctgaacatgaatgaggaggaggtggagaagagatttgagggccgcctgaccaagaacatgagcggcagcctgtatgagatggtgtcccgggtgatgaaggccctggtgaacaggaagatcaccgtgcccggcaacttccagggccacagcggggcccagtgcatcacctgcagctacaaggccagcagcggcctgctgtaccccctggagcggggcttcatctacgtgcacaagccccctgtgcacatccgctttgatgagatcagctttgtgaactttgcccggggcaccaccaccaccaggagctttgattttgaaattgagaccaagcagggcacccagtacaccttcagcagcattgaaagagaggagtatggcaagctgtttgattttgtgaatgccaagaagctgaacatcaagaacagaggcctgaaggagggcatgaaccccagctatgatgaatatgctgacagtgatgaggaccagcatgatgcctacctggagaggatgaaggaggagggcaagatccgggaggagaatgccaatgacagcagtgatgacagcggggaggagacagatgagagcttcaaccctggagaggaggaggaggatgtggccgaggagtttgacagcaatgccagcgccagcagcagcagcaatgaaggagacagcgacagagatgagaagaagaggaagcagctgaagaaggccaagatggccaaggacaggaagagcaggaagaagcctgtggaggtgaagaagggcaaggaccccaatgcccccaagaggcccatgtctgcctacatgctgtggctgaatgccagccgggagaagatcaagagtgaccaccctggcatcagcatcacagacctgagcaagaaggccggggagatctggaagggcatgagcaaggagaagaaggaggagtgggacaggaaggcagaagatgcccggcgggactatgagaaggccatgaaggagtatgagggcggccgcggggagagcagcaagagggacaagagcaagaagaagaagaaggtgaaggtgaagatggagaagaagagcacccccagccggggcagcagcagcaagagcagcagccggcagctgtctgagagcttcaagagcaaggagtttgtgtccagtgatgagagcagcagtggagagaacaagagcaagaagaagagaagaagaagtgaggacagcgaggaggaggagctggccagcaccccacccagcagtgaagattctgccagcggcagtgatgaatag

SEQ ID NO: 171892 - DNA, 240 bp, synthetic construct
  misc_feature 1..240: note = Description of Artificial Sequence: Synthetic coding sequence
  source 1..240: mol_type = other DNA
atgaagagcctgacctggatcctgggcctgtgggccctggccgcctgcttcaccccaggagagagccagaggggcccccggggcccctacccacctggccccctggccccaccccagccctttggacctggctttgtgcccccacctcctcctccaccctacggccctggccgcatccccccacctcctccagccccctacggccctggcatcttccccccacctccaccccagccctag

SEQ ID NO: 171893 - DNA, 324 bp, synthetic construct
  misc_feature 1..324: note = Description of Artificial Sequence: Synthetic coding sequence
  source 1..324: mol_type = other DNA
atgaagagcctgacctggatcctgggcctgtgggccctggccgcctgcttcaccccaggagagagccagaggggcccccggggcccctacccacctggccccctggccccaccccagccctttggacctggctttgtgcccccacctcctcctccaccctacggccctggccgcatccccccaccaccctacagctgcacccccaacatgaacaactgcagccgctgccaccaccaccacaagaggcaccactacccctgcaactactgcttctactaccccaagtatgagttccagcactgcttccaggagaccttcacctag

SEQ ID NO: 171894 - DNA, 240 bp, synthetic construct; identical to SEQ ID NO: 171892
  misc_feature 1..240: note = Description of Artificial Sequence: Synthetic coding sequence
  source 1..240: mol_type = other DNA

SEQ ID NO: 171895 - DNA, 348 bp, synthetic construct
  misc_feature 1..348: note = Description of Artificial Sequence: Synthetic coding sequence
  source 1..348: mol_type = other DNA
atgagccgccacagccggctgcagaggcaggtgctgagcctgtacagagacctgctgcgggccggccggggcaagccaggagctgaggcccgggtgcgggcagagttccggcagcacgccggcctgcccaggagtgatgtgctgcgcatcgagtacctgtacagaagaggccggcggcagctgcagctgctgcggagcggccacgccacagccatgggcgcctttgtgcggccccgggcccccaccggggagcctggaggagtgggctgccagccagatgatggagacagccccaggaacccccatgacagcactggagcccctgagaccaggccagatggaagatag

SEQ ID NO: 171896 - DNA, 501 bp, synthetic construct
  misc_feature 1..501: note = Description of Artificial Sequence: Synthetic coding sequence
  source 1..501: mol_type = other DNA
atggctgtgtccacagtgttcagcaccagcagcctgatgctggccctgagccgccacagcctgctgagccccctgctgtctgtgaccagcttccgccgcttctacagaggagacagccccacagacagccagaaggacatgattgagatccccctgcccccctggcaggagaggacagatgagagcattgagaccaagagggcccggctgctgtatgagagcaggaagaggggcatgctggagaactgcatcctgctgagcctgtttgccaaggagcacctgcagcacatgacagagaagcagctgaacctgtatgacaggctcatcaatgagcccagcaatgactgggacatctactactgggccacagaggccaagccagcccctgagatctttgaaaatgaggtgatggccctgctgcgggactttgccaagaacaagaacaaggagcagaggctgcgggccccagacctggagtacctgtttgagaagcccaggtag

SEQ ID NO: 171897 - DNA, 843 bp, synthetic construct
  misc_feature 1..843: note = Description of Artificial Sequence: Synthetic coding sequence
  source 1..843: mol_type = other DNA
atggctgctgtggtggccctgagcctgcggcggcggctgcctgccaccaccctgggcggggcctgcctgcaggccagcagaggagcccagacagctgctgccacagccccccgcatcaagaagtttgccatctaccgctgggaccctgacaaggccggggacaagccccacatgcagacctatgaggtggacctgaacaagtgtggccccatggtgctggatgccctgatcaagatcaagaatgaggtggacagcaccctgaccttccgccgcagctgccgggagggcatctgtggcagctgtgccatgaacatcaatggaggcaacaccctggcctgcaccaggagaattgacaccaacctgaacaaggtgtccaagatctaccccctgccccacatgtatgtgatcaaggacctggtgcctgacctgagcaacttctacgcccagtacaagagcattgagccctacctgaagaagaaggatgagagccaggagggcaagcagcagtacctgcagagcattgaggagcgggagaagctggatggcctgtatgagtgcatcctgtgtgcctgctgcagcaccagctgccccagctactggtggaatggagacaagtacctgggccctgctgtgctgatgcaggcctaccgctggatgattgacagcagagatgacttcacagaggagcggctggccaagctgcaggaccccttcagcctgtaccgctgccacaccatcatgaactgcaccaggacctgccccaagggcctgaaccctgggaaggccatcgccgagatcaagaagatgatggccacctacaaggagaagaaggcctctgtgtag

SEQ ID NO: 171898 - DNA, 453 bp, synthetic construct
  misc_feature 1..453: note = Description of Artificial Sequence: Synthetic coding sequence
  source 1..453: mol_type = other DNA
atggccgccctgctgctgcggcacgtgggccgccactgcctgcgggcccacttcagcccccagctgtgcatcagaaatgctgtgcccctgggcaccacagccaaggaggagatggagcgcttctggaacaagaacatcggcagcaaccggcccctgagcccccacatcaccatctacagctggagcctgcccatggccatgagcatctgccaccggggcaccggcatcgccctgtctgcagatgtgggccccaggaagaggcctgaggacagccctgccatccctgtgtggagcggctgccccggcagctactgtgtggtgctgtatggagctggcagccacgtgaagaagggcggcagccagcaccacctgcccacccactactacatccaccccagcttctgcctgtccttcctgagccctgcctgggagaagttcagcctgtttgtgtag

SEQ ID NO: 171899 - DNA, 510 bp, synthetic construct
  misc_feature 1..510: note = Description of Artificial Sequence: Synthetic coding sequence
  source 1..510: mol_type = other DNA
atggccgccctgctgctgcggcacgtgggccgccactgcctgcgggcccacttcagcccccagctgtgcatcagaaatgctgtgcccctgggcaccacagccaaggaggagatggagcgcttctggaacaagaacatcggcagcaaccggcccctgagcccccacatcaccatctacagctggagcctgcccatggccatgagcatctgccaccggggcaccggcatcgccctgtctgctggggtgtccctgtttggcatgtctgccctgctgctgcccggcaactttgagagctacctggagctggtgaagagcctgtgcctgggccctgccctgatccacacagccaagtttgccctggtgttccccctgatgtaccacacctggaatggcatccgccacctgatgtgggacctgggcaagggcctgaagatcccccagctgtaccagagcggcgtggtggtgctggtgctgactgtgctgagctccatgggcctggccgccatgtag

SEQ ID NO: 171900 - DNA, 351 bp, synthetic construct
  misc_feature 1..351: note = Description of Artificial Sequence: Synthetic coding sequence
  source 1..351: mol_type = other DNA
atggccgccctgctgctgtcctggagcctgcccatggccatgagcatctgccaccggggcactggaattgccctgtctgctggggtgtccctgtttggcatgtctgccctgctgctgcccggcaactttgagagctacctggagctggtgaagagcctgtgcctgggccctgccctgatccacacagccaagtttgccctggtgttccccctgatgtaccacacctggaatggcatccgccacctgatgtgggacctgggcaagggcctgaagatcccccagctgtaccagagcggcgtggtggtgctggtgctgactgtgctgagctccatgggcctggccgccatgtag

SEQ ID NO: 171901 - DNA, 408 bp, synthetic construct
  misc_feature 1..408: note = Description of Artificial Sequence: Synthetic coding sequence
  source 1..408: mol_type = other DNA
atggccgccctgctgctgcggcacgtgggccgccactgcctgcgggcccacttcagcccccagctgtgcatccggaactggagcctgcccatggccatgagcatctgccaccggggcaccggcatcgccctgtctgctggggtgtccctgtttggcatgtctgccctgctgctgcccggcaactttgagagctacctggagctggtgaagagcctgtgcctgggccctgccctgatccacacagccaagtttgccctggtgttccccctgatgtaccacacctggaatggcatccgccacctgatgtgggacctgggcaagggcctgaagatcccccagctgtaccagagcggcgtggtggtgctggtgctgactgtgctgagctccatgggcctggccgccatgtag

SEQ ID NO: 171902 - DNA, 480 bp, synthetic construct
  misc_feature 1..480: note = Description of Artificial Sequence: Synthetic coding sequence
  source 1..480: mol_type = other DNA
atggctgtgctgtggaggctgtctgctgtgtgtggggccctgggcggccgggccctgctgctgcggacccctgtggtgcggcctgcccacatcagcgccttcctgcaggaccggcccatccctgagtggtgtggggtgcagcacatccacctgagccccagccaccacagcggcagcaaggccgccagcctgcactggaccagcgagcgggtggtgtctgtgctgctgctgggcctgctgcctgctgcctacctgaacccctgcagcgccatggactacagcctggccgccgccctgaccctgcacggccactggggcctgggccaggtggtgacagattatgtgcatggagatgccctgcagaaggccgccaaggccggcctgctggccctgagcgccctgacctttgctggcctgtgctacttcaactaccatgatgtgggcatctgcaaggctgtggccatgctgtggaagctgtag

SEQ ID NO: 171903 - DNA, 465 bp, synthetic construct
  misc_feature 1..465: note = Description of Artificial Sequence: Synthetic coding sequence
  source 1..465: mol_type = other DNA
atggccgcctccatgttttatggccgcctggtggccgtggccaccctgaggaaccaccggcccaggacagcccagagagctgctgcccagggccctgtgctgattggcagcagccatggaggagtgaacattgaagatgtggccgctgagagccctgaggccatcatcaaggagcccatcgacatcgaggagggcatcaagaaggagcaggccctgcagctggcccagaagatgggcttcccccccaacatcgtggagagcgctgctgagaacatggtgaagctgtacagcctcttcctgaagtatgatgccaccatgattgagatcaaccccatggtggaggacagtgatggagctgtgctgtgcatggatgccaagatcaactttgacagcaacagcgcctaccggcagaagaagatctttgacctgcaggactggacccaggaggatgagcgggacaagtag

SEQ ID NO: 171904 - DNA, 897 bp, synthetic construct
  misc_feature 1..897: note = Description of Artificial Sequence: Synthetic coding sequence
  source 1..897: mol_type = other DNA
tctggccggggccaccccagcgagcccccagccagtgatggccctgctggctgctgcagcggcagcaaggatgtggtgatcaaggcccaggtgctggccggcggccggggcaagggcacctttgaaagtggcctgaagggcggcgtgaagatcgtgttcagccctgaggaggccaaggctgtgagcagccagatgattggcaagaagctgttcaccaagcagacaggagagaagggccgcatctgcaaccaggtgctggtgtgtgagaggaagtacccccggcgggagtactactttgccatcaccatggagaggagcttccagggccctgtgctgattggcagcagccatggaggagtgaacattgaagatgtggccgctgagagccctgaggccatcatcaaggagcccatcgacatcgaggagggcatcaagaaggagcaggccctgcagctggcccagaagatgggcttcccccccaacatcgtggagagcgctgctgagaacatggtgaagctgtacagcctcttcctgaagtatgatgccaccatgattgagatcaaccccatggtggaggacagtgatggagctgtgctgtgcatggatgccaagatcaactttgacagcaacagcgcctaccggcagaagaagatctttgacctgcaggactggacccaggaggatgagcgggacaaggatgctgccaaggccaacctgaactacatcggcctggatggcaacatcggctgcctggtgaatggagctggcctggccatggccaccatggacatcatcaagctgcacggcggcaccccagccaacttcctggatgtgggcggcggggccaccgtgcaccaggtgacagaggccttcaagctgatcaccagtgacaagtag

SEQ ID NO: 171905 - DNA, 1326 bp, synthetic construct
  misc_feature 1..1326: note = Description of Artificial Sequence: Synthetic coding sequence
  source 1..1326: mol_type = other DNA
atggccgcctccatgttttatggccgcctggtggccgtggccaccctgaggaaccaccggcccaggacagcccagcagcagcagaggaacctgagcctgcacgagtacatgtccatggagctgctgcaggaggccggcgtgtctgtgcccaagggctacgtggccaagagcccagatgaggcctatgccatcgccaagaagctgggcagcaaggatgtggtgatcaaggcccaggtgctggccggcggccggggcaagggcacctttgaaagtggcctgaagggcggcgtgaagatcgtgttcagccctgaggaggccaaggctgtgagcagccagatgattggcaagaagctgttcaccaagcagacaggagagaagggccgcatctgcaaccaggtgctggtgtgtgagaggaagtacccccggcgggagtactactttgccatcaccatggagaggagcttccagggccctgtgctgattggcagcagccatggaggagtgaacattgaagatgtggccgctgagagccctgaggccatcatcaaggagcccatcgacatcgaggagggcatcaagaaggagcaggccctgcagctggcccagaagatgggcttcccccccaacatcgtggagagcgctgctgagaacatggtgaagctgtacagcctcttcctgaagtatgatgccaccatgattgagatcaaccccatggtggaggacagtgatggagctgtgctgtgcatggatgccaagatcaactttgacagcaacagcgcctaccggcagaagaagatctttgacctgcaggactggacccaggaggatgagcgggacaaggatgctgccaaggccaacctgaactacatcggcctggatggcaacatcggctgcctggtgaatggagctggcctggccatggccaccatggacatcatcaagctgcacggcggcaccccagccaacttcctggatgtgggcggcggggccaccgtgcaccaggtgacagaggccttcaagctgatcaccagtgacaagaaggtgctggccatcctggtgaacatctttggaggcatcatgagatgtgatgtgattgcccagggcatcgtgatggctgtgaaggacctggagatcaagatccctgtggtggtgcggctgcagggcaccagggtggatgatgccaaggccctgattgctgacagcggcctgaagatcctggcctgtgatgacctggatgaggccgccaggatggtggtgaagctgtctgagatcgtgaccctggccaagcaggcccacgtggatgtgaagttccagctgcccatctag

SEQ ID NO: 171906 - DNA, 1392 bp, synthetic construct
  misc_feature 1..1392: note = Description of Artificial Sequence: Synthetic coding sequence
  source 1..1392: mol_type = other DNA
atggccgcctccatgttttatggccgcctggtggccgtggccaccctgaggaaccaccggcccaggacagcccagagagctgctgcccaggtgctgggcagcagcggcctcttcaacaaccacggcctgcaggtgcagcagcagcagcagaggaacctgagcctgcacgagtacatgtccatggagctgctgcaggaggccggcgtgtctgtgcccaagggctacgtggccaagagcccagatgaggcctatgccatcgccaagaagctgggcagcaaggatgtggtgatcaaggcccaggtgctggccggcggccggggcaagggcacctttgaaagtggcctgaagggcggcgtgaagatcgtgttcagccctgaggaggccaaggctgtgagcagccagatgattggcaagaagctgttcaccaagcagacaggagagaagggccgcatctgcaaccaggtgctggtgtgtgagaggaagtacccccggcgggagtactactttgccatcaccatggagaggagcttccagggccctgtgctgattggcagcagccatggaggagtgaacattgaagatgtggccgctgagagccctgaggccatcatcaaggagcccatcgacatcgaggagggcatcaagaaggagcaggccctgcagctggcccagaagatgggcttcccccccaacatcgtggagagcgctgctgagaacatggtgaagctgtacagcctcttcctgaagtatgatgccaccatgattgagatcaaccccatggtggaggacagtgatggagctgtgctgtgcatggatgccaagatcaactttgacagcaacagcgcctaccggcagaagaagatctttgacctgcaggactggacccaggaggatgagcgggacaaggatgctgccaaggccaacctgaactacatcggcctggatggcaacatcggctgcctggtgaatggagctggcctggccatggccaccatggacatcatcaagctgcacggcggcaccccagccaacttcctggatgtgggcggcggggccaccgtgcaccaggtgacagaggccttcaagctgatcaccagtgacaagaaggtgctggccatcctggtgaacatctttggaggcatcatgagatgtgatgtgattgcccagggcatcgtgatggctgtgaaggacctggagatcaagatccctgtggtggtgcggctgcagggcaccagggtggatgatgccaaggccctgattgctgacagcggcctgaagatcctggcctgtgatgacctggatgaggccgccaggatggtggtgaagctgtctgagatcgtgaccctggccaagcaggcccacgtggatgtgaagttccagctgcccatctag

SEQ ID NO: 171907 - DNA, 1218 bp, synthetic construct
  misc_feature 1..1218: note = Description of Artificial Sequence: Synthetic coding sequence
  source 1..1218: mol_type = other DNA
atgtccatggagctgctgcaggaggccggcgtgtctgtgcccaagggctacgtggccaagagcccagatgaggcctatgccatcgccaagaagctgggcagcaaggatgtggtgatcaaggcccaggtgctggccggcggccggggcaagggcacctttgaaagtggcctgaagggcggcgtgaagatcgtgttcagccctgaggaggccaaggctgtgagcagccagatgattggcaagaagctgttcaccaagcagacaggagagaagggccgcatctgcaaccaggtgctggtgtgtgagaggaagtacccccggcgggagtactactttgccatcaccatggagaggagcttccagggccctgtgctgattggcagcagccatggaggagtgaacattgaagatgtggccgctgagagccctgaggccatcatcaaggagcccatcgacatcgaggagggcatcaagaaggagcaggccctgcagctggcccagaagatgggcttcccccccaacatcgtggagagcgctgctgagaacatggtgaagctgtacagcctcttcctgaagtatgatgccaccatgattgagatcaaccccatggtggaggacagtgatggagctgtgctgtgcatggatgccaagatcaactttgacagcaacagcgcctaccggcagaagaagatctttgacctgcaggactggacccaggaggatgagcgggacaaggatgctgccaaggccaacctgaactacatcggcctggatggcaacatcggctgcctggtgaatggagctggcctggccatggccaccatggacatcatcaagctgcacggcggcaccccagccaacttcctggatgtgggcggcggggccaccgtgcaccaggtgacagaggccttcaagctgatcaccagtgacaagaaggtgctggccatcctggtgaacatctttggaggcatcatgagatgtgatgtgattgcccagggcatcgtgatggctgtgaaggacctggagatcaagatccctgtggtggtgcggctgcagggcaccagggtggatgatgccaaggccctgattgctgacagcggcctgaagatcctggcctgtgatgacctggatgaggccgccaggatggtggtgaagctgtctgagatcgtgaccctggccaagcaggcccacgtggatgtgaagttccagctgcccatctag

SEQ ID NO: 171908 - DNA, 876 bp, synthetic construct
  misc_feature 1..876: note = Description of Artificial Sequence: Synthetic coding sequence
  source 1..876: mol_type = other DNA
atggagaggagcttccagggccctgtgctgattggcagcagccatggaggagtgaacattgaagatgtggccgctgagagccctgaggccatcatcaaggagcccatcgacatcgaggagggcatcaagaaggagcaggccctgcagctggcccagaagatgggcttcccccccaacatcgtggagagcgctgctgagaacatggtgaagctgtacagcctcttcctgaagtatgatgccaccatgattgagatcaaccccatggtggaggacagtgatggagctgtgctgtgcatggatgccaagatcaactttgacagcaacagcgcctaccggcagaagaagatctttgacctgcaggactggacccaggaggatgagcgggacaaggatgctgccaaggccaacctgaactacatcggcctggatggcaacatcggctgcctggtgaatggagctggcctggccatggccaccatggacatcatcaagctgcacggcggcaccccagccaacttcctggatgtgggcggcggggccaccgtgcaccaggtgacagaggccttcaagctgatcaccagtgacaagaaggtgctggccatcctggtgaacatctttggaggcatcatgagatgtgatgtgattgcccagggcatcgtgatggctgtgaaggacctggagatcaagatccctgtggtggtgcggctgcagggcaccagggtggatgatgccaaggccctgattgctgacagcggcctgaagatcctggcctgtgatgacctggatgaggccgccaggatggtggtgaagctgtctgagatcgtgaccctggccaagcaggcccacgtggatgtgaagttccagctgcccatctag

SEQ ID NO: 171909 - DNA, 1218 bp, synthetic construct; identical to SEQ ID NO: 171907
  misc_feature 1..1218: note = Description of Artificial Sequence: Synthetic coding sequence
  source 1..1218: mol_type = other DNA

SEQ ID NO: 171910 - DNA, 990 bp, synthetic construct
  misc_feature 1..990: note = Description of Artificial Sequence: Synthetic coding sequence
  source 1..990: mol_type = other DNA
atgattggcaagaagctgttcaccaagcagacaggagagaagggccgcatctgcaaccaggtgctggtgtgtgagaggaagtacccccggcgggagtactactttgccatcaccatggagaggagcttccagggccctgtgctgattggcagcagccatggaggagtgaacattgaagatgtggccgctgagagccctgaggccatcatcaaggagcccatcgacatcgaggagggcatcaagaaggagcaggccctgcagctggcccagaagatgggcttcccccccaacatcgtggagagcgctgctgagaacatggtgaagctgtacagcctcttcctgaagtatgatgccaccatgattgagatcaaccccatggtggaggacagtgatggagctgtgctgtgcatggatgccaagatcaactttgacagcaacagcgcctaccggcagaagaagatctttgacctgcaggactggacccaggaggatgagcgggacaaggatgctgccaaggccaacctgaactacatcggcctggatggcaacatcggctgcctggtgaatggagctggcctggccatggccaccatggacatcatcaagctgcacggcggcaccccagccaacttcctggatgtgggcggcggggccaccgtgcaccaggtgacagaggccttcaagctgatcaccagtgacaagaaggtgctggccatcctggtgaacatctttggaggcatcatgagatgtgatgtgattgcccagggcatcgtgatggctgtgaaggacctggagatcaagatccctgtggtggtgcggctgcagggcaccagggtggatgatgccaaggccctgattgctgacagcggcctgaagatcctggcctgtgatgacctggatgaggccgccaggatggtggtgaagctgtctgagatcgtgaccctggccaagcaggcccacgtggatgtgaagttccagctgcccatctag

SEQ ID NO: 171911 - DNA, 1041 bp, synthetic construct
  misc_feature 1..1041: note = Description of Artificial Sequence: Synthetic coding sequence
  source 1..1041: mol_type = other DNA
atgacagccaccctggccgctgctgctgacatcgccaccatggtgtctggcagcagcggcctggccgccgcccggctgctgagccgctccttcctgctgccccagaatggcatccgccactgcagctacacagccagccggcagcacctgtatgtggacaagaacaccaagatcatctgccagggcttcaccgggaagcagggcaccttccacagccagcaggccctggagtatggcaccaagctggtgggcggcaccacccctgggaagggcggccagacccacctgggcctgcctgtgttcaacacagtgaaggaggccaaggagcagacaggagccacagccagcgtcatctacgtgcccccaccatttgctgctgctgccatcaatgaggccattgaagctgagatccccctggtggtgtgcatcacagagggcatcccccagcaggacatggtgcgggtgaagcacaagctgctgcggcaggagaagaccaggctcatcggccccaactgccctggggtcatcaaccctggagagtgcaagattggcatcatgcctggccacatccacaagaagggccgcatcggcatcgtgagccgcagcggcaccctgacctatgaagctgtgcaccagaccacccaggtgggcctgggccagagcctgtgtgtgggcatcggcggggaccccttcaacggcacagacttcatcgactgcctggagatcttcctgaatgattctgccacagagggcatcatcctgattggagagatcggcggcaatgctgaggagaatgctgctgagttcctgaagcagcacaacagcggccccaacagcaagcctgtggtgtccttcatcgccggcctgacagcccctcctggaagaaggatgggccacgccggggccatcatcgccggcggcaagggcggggccaaggagaagatcagcgccctgcagagcgctggggtggtggtgtccatgagccctgcccagctgggcaccaccatctacaaggagtttgagaagaggaagatgctgtag

SEQ ID NO: 171912 - DNA, 5484 bp, synthetic construct
  misc_feature 1..5484: note = Description of Artificial Sequence: Synthetic coding sequence
  source 1..5484: mol_type = other DNA
atggccaggaagaagttcagcggcctggagatcagcctcatcgtgctgtttgtgattgtgaccatcatcgccatcgccctgattgtggtgctggccaccaagaccccagctgtggatgagatcagtgacagcaccagcaccccagccaccaccagggtgaccaccaaccccagcgacagcggcaagtgccccaacgtgctgaatgaccctgtgaatgtgcgcatcaactgcatccctgagcagttccccacagagggcatctgtgcccagaggggctgctgctggaggccctggaatgacagcctcatcccctggtgcttctttgtggacaaccacggctacaacgtgcaggacatgaccaccaccagcattggagtggaggccaagctgaaccgcatccccagccccaccctgtttggaaatgacatcaacagcgtgctcttcaccacccagaaccagacccccaaccgcttccgcttcaagatcacagaccccaacaacagaagatatgaggtgccccaccagtatgtgaaggagttcaccggccccaccgtgtctgacaccctgtatgatgtgaaggtggcccagaaccccttcagcatccaggtgatcaggaagagcaatggcaagaccctgtttgacaccagcatcggccccctggtgtacagcgaccagtacctgcagatcagcacccggctgcccagcgactacatctatggaattggagagcaggtgcacaagcgcttcagacatgacctgtcctggaagacctggcccatcttcacccgggaccagctgcccggggacaacaacaacaacctgtatggccaccagaccttcttcatgtgcatcgaggacaccagcggcaagagctttggagtcttcctgatgaacagcaatgccatggagatcttcatccagcccacccccatcgtgacctacagagtgactggaggcatcctggacttctacatcctgctgggggacaccccagagcaggtggtgcagcagtaccagcagctggtgggcctgcctgccatgcctgcctactggaacctgggcttccagctgagccgctggaactacaagagcctggatgtggtgaaggaggtggtgagaagaaaccgggaggccggcatcccctttgacacccaggtgacagacatcgactacatggaggacaagaaggacttcacctatgaccaggtggccttcaacggcctgccccagtttgtgcaggacctgcatgaccacggccagaagtatgtgatcatcctggaccctgccatcagcatcggccggcgggccaacggcaccacctacgccacctatgaaagaggcaacacccagcacgtgtggatcaatgaaagtgatggcagcacccccatcatcggggaggtgtggccaggcctgactgtgtacccagacttcaccaaccccaactgcatcgactggtgggccaatgaatgttccatcttccaccaggaggtgcagtatgatggcctgtggattgacatgaatgaggtgtcctccttcatccagggcagcaccaagggctgcaatgtgaacaagctgaactacccacccttcaccccagacatcctggacaagctgatgtacagcaagaccatctgcatggatgctgtgcagaactggggcaagcagtatgatgtgcacagcctgtatggctacagcatggccatcgccacagagcaggccgtgcagaaggtgttccccaacaagaggagcttcatcctgaccaggagcacctttgctggcagcggcagacatgctgcccactggctgggggacaacacagcctcctgggagcagatggagtggagcatcaccggcatgctggagttcagcctgtttggcatccccctggtgggcgctgacatctgtggctttgtggccgagaccacagaggagctgtgccgccgctggatgcagctgggcgccttctaccccttcagcaggaaccacaacagtgatggctatgagcaccaggaccctgccttcttcggccagaacagcctgctggtgaagagcagccggcagtacctgaccatccgctacaccctgctgcccttcctgtacaccctcttctacaaggcccacgtgtttggagagaccgtggcccggcctgtgctgcacgagttctatgaggacaccaacagctggattgaggacacagagttcctgtggggccctgccctgctgatcacccctgtgctgaagcagggcgctgacacagtgtctgcctacatcccagatgccatctggtatgactatgaaagtggggccaagaggccctggaggaagcagagggtggacatgtacctgcctgctgacaagattggcctgcacctgcggggcggctacatcatccccatccaggagccagatgtgaccaccacagccagcaggaagaaccccctgggcctgattgtggccctgggggagaacaacacagccaagggggacttcttctgggatgatggagagaccaaggacaccatccagaatggaaactacatcctgtacaccttctctgtgagcaacaacaccctggacatcgtgtgcacccacagcagctaccaggagggcaccaccctggccttccagacagtgaagatcctgggcctgacagacagcgtgacagaggtgcgggtggccgagaacaaccagcccatgaatgcccacagcaacttcacctatgatgccagcaaccaggtgctgctgattgctgacctgaagctgaacctgggcaggaacttctctgtgcagtggaaccagatcttctctgaaaatgaacgcttcaactgctacccagatgctgacctggccacagagcagaagtgcacccagaggggctgtgtgtggaggacaggcagcagcctgagcaaggcccctgagtgctacttcccccggcaggacaacagctacagcgtgaacagcgcccgctacagctccatgggcatcacagctgacctgcagctgaacacagccaatgcccgcatcaagctgcccagcgaccccatcagcaccctgcgggtggaggtgaagtaccacaagaatgacatgctgcagttcaagatctatgacccccagaagaagagatatgaggtgcctgtgcccctgaacatccccaccacccccatcagcacctatgaagatcggctgtatgatgtggagatcaaggagaaccccttcggcatccagatcagaagaagaagcagcggccgggtcatctgggacagctggctgcccggctttgccttcaatgaccagttcatccagatcagcacccggctgcccagcgagtacatctacggctttggagaggtggagcacacagccttcaagagggacctgaactggaacacctggggcatgttcacccgggaccagcccccaggctacaagctgaacagctatggcttccacccctactacatggccctggaggaggagggcaatgcccatggagtcttcctgctgaacagcaatgccatggatgtgaccttccagcccaccccagccctgacctacagaacagtgggcggcatcctggacttctacatgttcctgggccccaccccagaggtggccaccaagcagtaccacgaggtgattggccaccctgtgatgcctgcctactgggccctgggcttccagctgtgccgctatggctacgccaacaccagcgaggtgcgggagctgtatgatgccatggtggccgccaacatcccctatgatgtgcagtacacagacatcgactacatggagcggcagctggacttcaccatcggggaggccttccaggacctgccccagtttgtggacaagatccggggggagggcatgagatacatcatcatcctggaccctgccatctctggaaatgagaccaagacctacccagcctttgagcggggccagcagaatgatgtgtttgtgaagtggcccaacaccaatgacatctgctgggccaaggtgtggccagacctgcccaacatcaccatcgacaagaccctgacagaagatgaggccgtgaatgccagccgggcccacgtggccttcccagacttcttccgcaccagcacagctgagtggtgggcccgggagatcgtggacttctacaatgagaagatgaagtttgatggcctgtggattgacatgaatgagcccagcagctttgtgaatggcaccaccaccaaccagtgcagaaatgatgagctgaactacccaccctacttccctgagctgaccaagaggacagatggcctgcacttccgcaccatctgcatggaggccgagcagatcctgagtgatggcacctctgtgctgcactatgatgtgcacaacctgtatggctggagccagatgaagcccacccatgatgccctgcagaagaccaccgggaagaggggcatcgtcatcagccgcagcacctaccccaccagcggccgctggggcggccactggctgggggacaactatgcccgctgggacaacatggacaagagcatcatcggcatgatggagttcagcctgtttggcatgagctacaccggggctgacatctgtggcttcttcaacaacagcgagtaccacctgtgcacccgctggatgcagctgggcgccttctacccctacagcaggaaccacaacatcgccaacacccggcggcaggaccctgcctcctggaatgagacctttgctgagatgagcaggaacatcctgaacatccgctacaccctgctgccctacttctacacccagatgcatgagatccacgccaatggaggcaccgtcatccggcccctgctgcacgagttctttgatgagaagcccacctgggacatcttcaagcagttcctgtggggccctgccttcatggtgacccctgtgctggagccctacgtgcagacagtgaatgcctacgtgcccaatgcccgctggtttgactaccacacaggcaaggacattggagtgcggggccagttccagaccttcaatgccagctatgacaccatcaacctgcacgtgcggggcggccacatcctgccctgccaggagcccgcccagaacaccttctacagccggcagaagcacatgaagctgattgtggccgcagatgacaaccagatggcccagggcagcctcttctgggatgatggagagagcattgacacctatgagcgggacctgtacctgtctgtgcagttcaacctgaaccagaccaccctgaccagcaccatcctgaagaggggctacatcaacaagtctgagacccggctgggcagcctgcacgtgtggggcaagggcaccacccctgtgaatgctgtgaccctgacctacaacggcaacaagaacagcctgcccttcaatgaagacaccaccaacatgatcctgagaattgacctgaccacccacaacgtgaccctggaggagcccatcgagatcaactggagctag

SEQ ID NO: 171913 - DNA, 2616 bp, synthetic construct
  misc_feature 1..2616: note = Description of Artificial Sequence: Synthetic coding sequence
  source 1..2616: mol_type = other DNA
atgaagtacagctgctgtgccctggtgctggccgtgctgggcacagagctgctgggcagcctgtgcagcacagtgcgcagcccccgcttccggggccgcatccagcaggagaggaagaacatccggcccaacatcatcctggtgctgacagatgaccaggatgtggagctgggcagcctgcaggtgatgaacaagaccaggaagatcatggagcacggcggggccaccttcatcaatgcctttgtgaccacccccatgtgctgccccagccgcagctccatgctgaccgggaagtatgtgcacaaccacaacgtgtacaccaacaatgaaaactgcagcagccccagctggcaggccatgcatgagcccaggacctttgctgtgtacctgaacaacacaggctacagaacagccttcttcggcaagtacctgaatgagtacaacggcagctacatccccccaggctggagggagtggctgggcctcatcaagaacagccgcttctacaactacacagtgtgcagaaatggcatcaaggagaagcacggctttgattatgccaaggactacttcacagacctgatcaccaatgaaagcatcaactacttcaagatgagcaagaggatgtacccccacaggcctgtgatgatggtgatcagccacgccgcccctcatggccctgaggacagcgccccccagttcagcaagctgtacccaaatgccagccagcacatcacccccagctacaactatgcccccaacatggacaagcactggatcatgcagtacacaggccccatgctgcccatccacatggagttcaccaacatcctgcagaggaagaggctgcagaccctgatgtctgtggatgacagcgtggagcggctgtacaacatgctggtggagactggagagctggagaacacctacatcatctacacagctgaccacggctaccacatcggccagtttggcctggtgaagggcaagtccatgccctatgactttgacatccgggtgcccttcttcatccggggccccagcgtggagcccggcagcatcgtgccccagatcgtgctgaacatcgacctggcccccaccatcctggacattgctggcctggacaccccaccagatgtggatggcaagtctgtgctgaagctgctggaccctgagaagccaggcaaccgcttccgcaccaacaagaaggccaagatctggagggacaccttcctggtggagcggggcaagttcctgaggaagaaggaggagagcagcaagaacatccagcagagcaaccacctgcccaagtatgaaagagtgaaggagctgtgccagcaggcccgctaccagacagcctgtgagcagcccggccagaagtggcagtgcatcgaggacaccagcggcaagctgcgcatccacaagtgcaagggccccagcgacctgctgactgtgcggcagagcaccaggaacctgtatgcccggggcttccatgacaaggacaaggaatgtagctgccgggagagcggctaccgggccagccgcagccagaggaagagccagaggcagttcctgaggaaccagggcacccccaagtacaagcccaggtttgtgcacacccggcagaccaggagcctgtctgtggagtttgaaggagagatctatgacatcaacctggaggaggaggaggagctgcaggtgctgcagcccagaaatattgccaagagacatgatgagggccacaagggcccccgggacctgcaggccagcagcggcggcaacagaggaaggatgctggccgacagcagcaatgctgtgggcccccccaccaccgtgcgggtgacccacaagtgcttcatcctgcccaatgacagcatccactgtgagcgggagctgtaccagagcgcccgggcctggaaggaccacaaggcctacatcgacaaggagattgaggccctgcaggacaagatcaagaacctgcgggaggtgcggggccacctgaagaggaggaagccagaggagtgcagctgcagcaagcagagctactacaacaaggagaagggcgtgaagaagcaggagaagctgaagagccacctgcaccccttcaaggaggccgcccaggaggtggacagcaagctgcagctgttcaaggagaacaacagaagaaggaagaaggagaggaaggagaagaggcggcagaggaaaggagaggagtgcagcctgcccggcctgacctgcttcacccatgacaacaaccactggcagacagcccccttctggaacctgggcagcttctgtgcctgcaccagcagcaacaacaacacctactggtgcctgaggacagtgaatgagacccacaacttcctgttctgtgaatttgccaccggcttcctggagtactttgacatgaacacagacccctaccagctgaccaacacagtgcacacagtggagcggggcatcctgaaccagctgcacgtgcagctgatggagctgcggagctgccagggctacaagcagtgcaacccccggcccaagaacctggatgtgggcaacaaggatggcggcagctatgacctgcaccggggccagctgtgggatggctgggagggctag

SEQ ID NO: 171914 - DNA, 2616 bp, synthetic construct; identical to SEQ ID NO: 171913
  misc_feature 1..2616: note = Description of Artificial Sequence: Synthetic coding sequence
  source 1..2616: mol_type = other DNA

SEQ ID NO: 171915 - DNA, 2616 bp, synthetic construct; identical to SEQ ID NO: 171913
  misc_feature 1..2616: note = Description of Artificial Sequence: Synthetic coding sequence
  source 1..2616: mol_type = other DNA

SEQ ID NO: 171916 - DNA, 2616 bp, synthetic construct; identical to SEQ ID NO: 171913
  misc_feature 1..2616: note = Description of Artificial Sequence: Synthetic coding sequence
  source 1..2616: mol_type = other DNA

SEQ ID NO: 171917 - DNA, 90 bp, synthetic construct
  misc_feature 1..90: note = Description of Artificial Sequence: Synthetic coding sequence
  source 1..90: mol_type = other DNA
atgaagtacagctgctgtgccctggtgctggccgtgctgggcacagagctgctgggcagcctgtgcagcacagtgcgcagccccaggtag

SEQ ID NO: 171918 - DNA, 519 bp, synthetic construct
  misc_feature 1..519: note = Description of Artificial Sequence: Synthetic coding sequence
  source 1..519: mol_type = other DNA
atgaagtacagctgctgtgccctggtgctggccgtgctgggcacagagctgctgggcagcctgtgcagcacagtgcgcagcccccgcttccggggccgcatccagcaggagaggaagaacatccggcccaacatcatcctggtgctgacagatgaccaggatgtggagctgggcagcctgcaggtgatgaacaagaccaggaagatcatggagcacggcggggccaccttcatcaatgcctttgtgaccacccccatgtgctgccccagccgcagctccatgctgaccgggaagtatgtgcacaaccacaacgtgtacaccaacaatgaaaactgcagcagccccagctggcaggccatgcatgagcccaggacctttgctgtgtacctgaacaacacaggctacagaacagccttcttcggcaagtacctgaatgagtacaacggcagctacatccccccaggctggagggagtggctgggcctcatcaagaacagccgcttctacaactacacctag

SEQ ID NO: 171919 - DNA, 231 bp, synthetic construct
  misc_feature 1..231: note = Description of Artificial Sequence: Synthetic coding sequence
  source 1..231: mol_type = other DNA
atgaagtacagctgctgtgccctggtgctggccgtgctgggcacagagctgctgggcagcctgtgcagcacagtgcgcagcccccgcttccggggccgcatccagcaggagaggaagaacatccggcccaacatcatcctggtgctgacagatgaccaggatgtggagctgggcagcctgcaggtgatgaacaagaccaggaagatcatggagcacggcggggccacctag

SEQ ID NO: 171920 - DNA, 258 bp, synthetic construct
  misc_feature 1..258: note = Description of Artificial Sequence: Synthetic coding sequence
  source 1..258: mol_type = other DNA
atgaagtacagctgctgtgccctggtgctggccgtgctgggcacagagctgctgggcagcctgtgcagcacagtgcgcagcccccgcttccggggccgcatccagcaggagaggaagaacatccggcccaacatcatcctggtgctgacagatgaccaggatgtggagctgggcagcctgcaggtgatgaacaagaccaggaagatcatggagcacggcggggccaccttcatcaatgcctttgtgaccaccccctag

SEQ ID NO: 171921 - DNA, 171 bp, synthetic construct
  misc_feature 1..171: note = Description of Artificial Sequence: Synthetic coding sequence
  source 1..171: mol_type = other DNA
atgaagtacagctgctgtgccctggtgctggccgtgctgggcacagagctgctgggcagcctgtgcagcacagtgcgcagcccccgcttccggggccgcatccagcaggagaggaagaacatccggcccaacatcatcctggtgctgacagatgaccaggatgtggagtag

SEQ ID NO: 171922 - DNA, 2613 bp, synthetic construct
  misc_feature 1..2613: note = Description of Artificial Sequence: Synthetic coding sequence
  source 1..2613: mol_type = other DNA
atgggcccccccagcctggtgctgtgcctgctgagcgccaccgtcttcagcctgctgggcggcagcagcgccttcctgagccaccaccggctgaagggccgcttccagagggacagaagaaacatccggcccaacatcatcctggtgctgacagatgaccaggatgtggagctgggctccatgcaggtgatgaacaagacccggcgcatcatggagcagggcggggcccacttcatcaatgcctttgtgaccacccccatgtgctgccccagccgcagcagcatcctgaccgggaagtatgtgcacaaccacaacacctacaccaacaatgaaaactgcagcagccccagctggcaggcccagcacgagagcaggacctttgctgtgtacctgaacagcacaggctacagaacagccttcttcggcaagtacctgaatgagtacaacggcagctatgtgcccccaggctggaaggagtgggtgggcctgctgaagaacagccgcttctacaactacaccctgtgcagaaatggagtgaaggagaagcacggcagtgactacagcaaggactacctgacagacctgatcaccaatgacagcgtgtccttcttccgcaccagcaagaagatgtacccccacaggcctgtgctgatggtgatcagccatgctgccccccacggcccagaagattctgccccccagtacagccgcctcttccccaatgccagccagcacatcacccccagctacaactatgcccccaacccagacaagcactggatcatgagatacacaggccccatgaagcccatccacatggagttcaccaacatgctgcagaggaagaggctgcagaccctgatgtctgtggatgacagcatggagaccatctacaacatgctggtggagaccggggagctggacaacacctacatcgtgtacacagctgaccacggctaccacatcggccagtttggcctggtgaagggcaagtccatgccctatgaatttgacatccgggtgcccttctacgtgcggggccccaacgtggaggccggctgcctgaacccccacatcgtgctgaacatcgacctggcccccaccatcctggacattgctggcctggacatcccagctgacatggatggcaagagcatcctgaagctgctggacacagagaggcctgtgaaccgcttccacctgaagaagaagatgagggtgtggagggacagcttcctggtggagcggggcaagctgctgcacaagagggacaatgacaaggtggatgcccaggaggagaacttcctgcccaagtaccagagggtgaaggacctgtgccagagagctgagtaccagacagcctgtgagcagctgggccagaagtggcagtgtgtggaggatgccaccgggaagctgaagctgcacaagtgcaagggccccatgaggctgggcggcagccgggccctgagcaacctggtgcccaagtactacggccagggcagcgaggcctgcacctgtgacagcggggactacaagctgagcctggccggccgcaggaagaagctgttcaagaagaagtacaaggccagctatgtgcgcagccgcagcatccgctctgtggccatcgaggtggatggccgggtgtaccacgtgggcctgggagatgctgcccagcccaggaacctgaccaagaggcactggccaggggcccctgaggaccaggatgacaaggatggaggagacttctctggaactggaggcctgcctgactacagcgctgccaaccccatcaaggtgacccaccgctgctacatcctggagaatgacacagtgcagtgtgacctggacctgtacaagagcctgcaggcctggaaggaccacaagctgcacatcgaccatgaaattgagaccctgcagaacaagatcaagaacctgcgggaggtgcggggccacctgaagaagaagaggccagaagaatgtgactgccacaagatctcctaccacacccagcacaagggccgcctgaagcaccggggcagcagcctgcaccccttcaggaagggcctgcaggagaaggacaaggtgtggctgctgcgggagcagaagaggaagaagaagctgaggaagctgctgaagaggctgcagaacaatgacacctgcagcatgcctggcctgacctgcttcacccatgacaaccagcactggcagacagcccccttctggaccctgggccccttctgtgcctgcaccagcgccaacaacaacacctactggtgcatgaggaccatcaatgagacccacaacttcctgttctgtgaatttgccaccggcttcctggagtactttgacctgaacacagacccctaccagctgatgaatgctgtgaacaccctggacagagatgtgctgaaccagctgcacgtgcagctgatggagctgcggagctgcaagggctacaagcagtgcaaccccaggaccaggaacatggacctgggcctgaaggatggcggcagctatgagcagtaccggcagttccagaggaggaagtggccagagatgaagaggcccagcagcaagagcctgggccagctgtgggagggctgggagggctag

SEQ ID NO: 171923 - DNA, 2559 bp, synthetic construct
  misc_feature 1..2559: note = Description of Artificial Sequence: Synthetic coding sequence
  source 1..2559: mol_type = other DNA
atgggcccccccagcctggtgctgtgcctgctgagcgccaccgtcttcagcctgctgggcggcagcagcgccttcctgagccaccaccggctgaagggccgcttccagagggacagaagaaacatccggcccaacatcatcctggtgctgacagatgaccaggatgtggagctgggctccatgcaggtgatgaacaagacccggcgcatcatggagcagggcggggcccacttcatcaatgcctttgtgaccacccccatgtgctgccccagccgcagcagcatcctgaccgggaagtatgtgcacaaccacaacacctacaccaacaatgaaaactgcagcagccccagctggcaggcccagcacgagagcaggacctttgctgtgtacctgaacagcacaggctacagaacagccttcttcggcaagtacctgaatgagtacaacggcagctatgtgcccccaggctggaaggagtgggtgggcctgctgaagaacagccgcttctacaactacaccctgtgcagaaatggagtgaaggagaagcacggcagtgactacagcaaggactacctgacagacctgatcaccaatgacagcgtgtccttcttccgcaccagcaagaagatgtacccccacaggcctgtgctgatggtgatcagccatgctgccccccacggcccagaagattctgccccccagtacagccgcctcttccccaatgccagccagcacatcacccccagctacaactatgcccccaacccagacaagcactggatcatgagatacacaggccccatgaagcccatccacatggagttcaccaacatgctgcagaggaagaggctgcagaccctgatgtctgtggatgacagcatggagaccatctacaacatgctggtggagaccggggagctggacaacacctacatcgtgtacacagctgaccacggctaccacatcggccagtttggcctggtgaagggcaagtccatgccctatgaatttgacatccgggtgcccttctacgtgcggggccccaacgtggaggccggctgcctgaacccccacatcgtgctgaacatcgacctggcccccaccatcctggacattgctggcctggacatcccagctgacatggatggcaagagcatcctgaagctgctggacacagagaggcctgtgaaccgcttccacctgaagaagaagatgagggtgtggagggacagcttcctggtggagcggggcaagctgctgcacaagagggacaatgacaaggtggatgcccaggaggagaacttcctgcccaagtaccagagggtgaaggacctgtgccagagagctgagtaccagacagcctgtgagcagctgggccagaagtggcagtgtgtggaggatgccaccgggaagctgaagctgcacaagtgcaagggccccatgaggctgggcggcagccgggccctgagcaacctggtgcccaagtactacggccagggcagcgaggcctgcacctgtgacagcggggactacaagctgagcctggccggccgcaggaagaagctgttcaagaagaagtacaaggccagctatgtgcgcagccgcagcatccgctctgtggccatcgaggtggatggccgggtgtaccacgtgggcctgggagatgctgcccagcccaggaacctgaccaagaggcactggccaggggcccctgaggaccaggatgacaaggatggaggagacttctctggaactggaggcctgcctgactacagcgctgccaaccccatcaaggtgacccaccgctgctacatcctggagaatgacacagtgcagtgtgacctggacctgtacaagagcctgcaggcctggaaggaccacaagctgcacatcgaccatgaaattgagaccctgcagaacaagatcaagaacctgcgggaggtgcggggccacctgaagaagaagaggccagaagaatgtgactgccacaagatctcctaccacacccagcacaagggccgcctgaagcaccggggcagcagcctgcaccccttcaggaagggcctgcaggagaaggacaaggtgtggctgctgcgggagcagaagaggaagaagaagctgaggaagctgctgaagaggctgcagaacaatgacacctgcagcatgcctggcctgacctgcttcacccatgacaaccagcactggcagacagcccccttctggaccctgggccccttctgtgcctgcaccagcgccaacaacaacacctactggtgcatgaggaccatcaatgagacccacaacttcctgttctgtgaatttgccaccggcttcctggagtactttgacctgaacacagacccctaccagctgatgaatgctgtgaacaccctggacagagatgtgctgaaccagctgcacgtgcagctgatggagctgcggagctgcaagggctacaagcagtgcaaccccaggaccaggaacatggacctgggcctgaaggatggcggcagctatgagcagtaccggggccagctgtgggagggctgggagggctag

SEQ ID NO: 171924 - DNA, 870 bp, synthetic construct
  misc_feature 1..870: note = Description of Artificial Sequence: Synthetic coding sequence
  source 1..870: mol_type = other DNA
ttcagcggcaccggcggcctgcctgactacagcgctgccaaccccatcaaggtgacccaccgctgctacatcctggagaatgacacagtgcagtgtgacctggacctgtacaagagcctgcaggcctggaaggaccacaagctgcacatcgaccacgagattgagaccctgcagaacaagatcaagaacctgcgggaggtgcggggccacctgaagaagaagaggcctgaggagtgtgactgccacaagatctcctaccacacccagcacaagggccgcctgaagcaccggggcagcagcctgcaccccttcaggaagggcctgcaggagaaggacaaggtgtggctgctgcgggagcagaagaggaagaagaagctgaggaagctgctgaagaggctgcagaacaatgacacctgcagcatgcctggcctgacctgcttcacccatgacaaccagcactggcagacagcccccttctggaccctgggccccttctgtgcctgcaccagcgccaacaacaacacctactggtgcatgaggaccatcaatgagacccacaacttcctgttctgtgaatttgccaccggcttcctggagtactttgacctgaacacagacccctaccagctgatgaatgctgtgaacaccctggacagagatgtgctgaaccagctgcacgtgcagctgatggagctgcggagctgcaagggctacaagcagtgcaaccccaggaccaggaacatggacctgggcctgaaggatggcggcagctatgagcagtaccggcagttccagaggaggaagtggccagagatgaagaggcccagcagcaagagcctgggccagctgtgggagggctgggagggctag

SEQ ID NO: 171925 - DNA, 2604 bp, synthetic construct
  misc_feature 1..2604: note = Description of Artificial Sequence: Synthetic coding sequence
  source 1..2604: mol_type = other DNA
atgggcccccccagcctggtgctgtgcctgctgagcgccaccgtcttcagcctgctgggcggcagcagcgccttcctgagccaccaccggctgaagggccgcttccagagggacagaagaaacatccggcccaacatcatcctggtgctgacagatgaccaggatgtggagctgggctccatgcaggtgatgaacaagacccggcgcatcatggagcagggcggggcccacttcatcaatgcctttgtgaccacccccatgtgctgccccagccgcagcagcatcctgaccgggaagtatgtgcacaaccacaacacctacaccaacaatgaaaactgcagcagccccagctggcaggcccagcacgagagcaggacctttgctgtgtacctgaacagcacaggctacagaacagccttcttcggcaagtacctgaatgagtacaacggcagctatgtgcccccaggctggaaggagtgggtgggcctgctgaagaacagccgcttctacaactacaccctgtgcagaaatggagtgaaggagaagcacggcagtgactacagcaaggactacctgacagacctgatcaccaatgacagcgtgtccttcttccgcaccagcaagaagatgtacccccacaggcctgtgctgatggtgatcagccatgctgccccccacggcccagaagattctgccccccagtacagccgcctcttccccaatgccagccagcacatcacccccagctacaactatgcccccaacccagacaagcactggatcatgagatacacaggccccatgaagcccatccacatggagttcaccaacatgctgcagaggaagaggctgcagaccctgatgtctgtggatgacagcatggagaccatctacaacatgctggtggagaccggggagctggacaacacctacatcgtgtacacagctgaccacggctaccacatcggccagtttggcctggtgaagggcaagtccatgccctatgaatttgacatccgggtgcccttctacgtgcggggccccaacgtggaggccggctgcctgaacccccacatcgtgctgaacatcgacctggcccccaccatcctggacattgctggcctggacatcccagctgacatggatggcaagagcatcctgaagctgctggacacagagaggcctgtgaaccgcttccacctgaagaagaagatgagggtgtggagggacagcttcctggtggagcggggcaagctgctgcacaagagggacaatgacaaggtggatgcccaggaggagaacttcctgcccaagtaccagagggtgaaggacctgtgccagagagctgagtaccagacagcctgtgagcagctgggccagaagtggcagtgtgtggaggatgccaccgggaagctgaagctgcacaagtgcaagggccccatgaggctgggcggcagccgggccctgagcaacctggtgcccaagtactacggccagggcagcgaggcctgcacctgtgacagcggggactacaagctgagcctggccggccgcaggaagaagctgttcaagaagaagtacaaggccagctatgtgcgcagccgcagcatccgctctgtggccatcgaggtggatggccgggtgtaccacgtgggcctgggagatgctgcccagcccaggaacctgaccaagaggcactggccaggggcccctgaggaccaggatgacaaggatggaggagacttctctggaactggaggcctgcctgactacagcgctgccaaccccatcaaggtgacccaccgctgctacatcctggagaatgacacagtgcagtgtgacctggacctgtacaagagcctgcaggcctggaaggaccacaagctgcacatcgaccatgaaattgagaccctgcagaacaagatcaagaacctgcgggaggtgcggggccacctgaagaagaagaggccagaagaatgtgactgccacaagatctcctaccacacccagcacaagggccgcctgaagcaccggggcagcagcctgcaccccttcaggaagggcctgcaggagaaggacaaggtgtggctgctgcgggagcagaagaggaagaagaagctgaggaagctgctgaagaggctgcagaacaatgacacctgcagcatgcctggcctgacctgcttcacccatgacaaccagcactggcagacagcccccttctggaccctgggccccttctgtgcctgcaccagcgccaacaacaacacctactggtgcatgaggaccatcaatgagacccacaacttcctgttctgtgaatttgccaccggcttcctggagtactttgacctgaacacagacccctaccagctgatgaatgctgtgaacaccctggacagagatgtgctgaaccagctgcacgtgcagctgatggagctgcggagctgcaagggctacaagcagtgcaaccccaggaccaggaacatggacctggatggcggcagctatgagcagtaccggcagttccagaggaggaagtggccagagatgaagaggcccagcagcaagagcctgggccagctgtgggagggctgggagggctag

SEQ ID NO: 171926 - DNA, 2613 bp, synthetic construct; identical to SEQ ID NO: 171922
  misc_feature 1..2613: note = Description of Artificial Sequence: Synthetic coding sequence
  source 1..2613: mol_type = other DNA

SEQ ID NO: 171927 - DNA, 1125 bp, synthetic construct
  misc_feature 1..1125: note = Description of Artificial Sequence: Synthetic coding sequence
  source 1..1125: mol_type = other DNA
atggccgccccagccctgggcctggtgtgtggccgctgcccagagctgggcctggtgctgctgctgctgctgctgagcctgctgtgtggggccgccggcagccaggaggccggcactggagctggagctggcagcctggccggcagctgtggctgcggcaccccccagaggcctggggcccacggcagcagcgctgctgcccaccgctacagccgggaggccaatgcccctggccctgtgcctggagagcggcagctggcccacagcaagatggtgcccatcccagctggggtcttcaccatgggcacagatgacccccagatcaagcaggatggagaggccccagcccggcgggtgaccattgatgccttctacatggatgcctatgaggtgagcaacacagaatttgagaagtttgtgaacagcacaggctacctgacagaagctgagaagtttggagacagctttgtgtttgagggcatgctgtctgagcaggtgaagaccaacatccagcaggccgtggccgccgccccctggtggctgcctgtgaagggggccaactggaggcaccctgagggccctgacagcaccatcctgcacaggccagaccaccctgtgctgcacgtgtcctggaatgatgctgtggcctactgcacctgggccggcaagaggctgcccacagaagctgagtgggagtacagctgccggggcggcctgcacaacagactcttcccctggggcaacaagctgcagcccaagggccagcactacgccaacatctggcagggcgagttccctgtgaccaacacaggagaagatggcttccagggcacagcccctgtggatgccttccccccaaatggctacggcctgtacaacatcgtgggcaatgcctgggagtggaccagtgactggtggacagtgcaccacagcgtggaggagaccctgaaccccaagggccccccatctgggaaggacagagtgaagaagggcggcagctacatgtgccacaggagctactgctaccgctaccgctgtgccgcccggagccagaacaccccagacagcagcgccagcaacctgggcttccgctgtgccgctgaccggctgcccaccatggactag

SEQ ID NO: 171928 - DNA, 1281 bp, synthetic construct
  misc_feature 1..1281: note = Description of Artificial Sequence: Synthetic coding sequence
  source 1..1281: mol_type = other DNA
atggccgccccagccctgggcctggtgtgtggccgctgcccagagctgggcctggtgctgctgctgctgctgctgagcctgctgtgtggggccgccggcagccaggaggccggcactggagctggagctggcagcctggccggcagctgtggctgcggcaccccccagaggcctggggcccacggcagcagcgctgctgcccaccgctacagccgggaggccaatgcccctggccctgtgcctggagagcggcagctggcccacagcaagatggtgcccatcccagctggggtcttcaccatgggcacagatgacccccagatcaagcaggatggagaggccccagcccggcgggtgaccattgatgccttctacatggatgcctatgaggtgagcaacacagaatttgagaagtttgtgaacagcacaggctacctgacagaagctgagaagtttggagacagctttgtgtttgagggcatgctgtctgagcaggtgaagaccaacatccagcaggccgtggccgccgccccctggtggctgcctgtgaagggggccaactggaggcaccctgagggccctgacagcaccatcctgcacaggccagaccaccctgtgctgcacgtgtcctggaatgatgctgtggcctactgcacctgggccggcaagaggctgcccacagaagctgagtgggagtacagctgccggggcggcctgcacaacagactcttcccctggggcaacaagctgcagcccaagggccagcactacgccaacatctggcagggcgagttccctgtgaccaacacaggagaagatggcttccagggcacagcccctgtggatgccttccccccaaatggctacggcctgtacaacatcgtgggcaatgcctgggagtggaccagtgactggtggacagtgcaccacagcgtggaggagaccctgaaccccaagggccccccatctgggaaggacagagtgaagaagggcggcagctacatgtgccacaggagccaggagtactatgacccctacttccaggatgtggccagcgagatgctgcggcggcacacagccagccgctggaaggccttcagcagcctggagccctgctgcagcatccgccgccaccagcagtatgctgccatcgagcggctgacctgtgggaagtttgagctgcgctgtgccagcctgaggaagattgactgcctgaacaccaacatcgcctgcagctacagcatgaggcaggacggcccccggctgcactgtgtggactag

SEQ ID NO: 171929 - DNA, 1287 bp, synthetic construct
  misc_feature 1..1287: note = Description of Artificial Sequence: Synthetic coding sequence
  source 1..1287: mol_type = other DNA
atggccgccccagccctgggcctggtgtgtggccgctgcccagagctgggcctggtgctgctgctgctgctgctgagcctgctgtgtggggccgccggcagccaggaggccggcactggagctggagctggcagcctggccggcagctgtggctgcggcaccccccagaggcctggggcccacggcagcagcgctgctgcccaccgctacagccgggaggccaatgcccctggccctgtgcctggagagcggcagctggcccacagcaagatggtgcccatcccagctggggtcttcaccatgggcacagatgacccccagatcaagcaggatggagaggccccagcccggcgggtgaccattgatgccttctacatggatgcctatgaggtgagcaacacagaatttgagaagtttgtgaacagcacaggctacctgacagaagctgagaagtttggagacagctttgtgtttgagggcatgctgtctgagcaggtgaagaccaacatccagcaggccgtggccgccgccccctggtggctgcctgtgaagggggccaactggaggcaccctgagggccctgacagcaccatcctgcacaggccagaccaccctgtgctgcacgtgtcctggaatgatgctgtggcctactgcacctgggccggcaagaggctgcccacagaagctgagtgggagtacagctgccggggcggcctgcacaacagactcttcccctggggcaacaagctgcagcccaagggccagcactacgccaacatctggcagggcgagttccctgtgaccaacacaggagaagatggcttccagggcacagcccctgtggatgccttccccccaaatggctacggcctgtacaacatcgtgggcaatgcctgggagtggaccagtgactggtggacagtgcaccacagcgtggaggagaccctgaaccccaagggccccccatctgggaaggacagagtgaagaagggcggcctgagcaaggcccaccagaggatcagccaggagtactatgacccctacttccaggatgtggccagcgagatgctgcggcggcacacagccagccgctggaaggccttcagcagcctggagccctgctgcagcatccgccgccaccagcagtatgctgccatcgagcggctgacctgtgggaagtttgagctgcgctgtgccagcctgaggaagattgactgcctgaacaccaacatcgcctgcagctacagcatgaggcaggacggcccccggctgcactgtgtggactag

SEQ ID NO: 171930 - DNA, 1050 bp, synthetic construct
  misc_feature 1..1050: note = Description of Artificial Sequence: Synthetic coding sequence
  source 1..1050: mol_type = other DNA
atggccgccccagccctgggcctggtgtgtggccgctgcccagagctgggcctggtgctgctgctgctgctgctgagcctgctgtgtggggccgccggcagccaggaggccggcactggagctggagctggcagcctggccggcagctgtggctgcggcaccccccagaggcctggggcccacggcagcagcgctgctgcccaccgctacagccgggaggccaatgcccctggccctgtgcctggagagcggcagctggcccacagcaagatggtgcccatcccagctggggtcttcaccatgggcacagatgacccccagatcaagcaggatggagaggccccagcccggcgggtgaccattgatgccttctacatggatgcctatgaggtgagcaacacagaatttgagaagtttgtgaacagcacaggctacctgacagaggtggccgccgccccctggtggctgcctgtgaagggggccaactggaggcaccctgagggccctgacagcaccatcctgcacaggccagaccaccctgtgctgcacgtgtcctggaatgatgctgtggcctactgcacctgggccggcaagaggctgcccacagaggccgagtgggagtacagctgccggggcggcctgcacaacagactcttcccctggggcaacaagctgcagcccaagggccagcactacgccaacatctggcagggcgagttccctgtgaccaacacaggagaagatggcttccagggcacagcccctgtggatgccttcccccccaacggctacggcctgtacaacatcgtgggcaatgcctgggagtggaccagtgactggtggacagtgcaccacagcgtggaggagaccctgaaccccaagggcccccccagcggcaaggacagagtgaagaagggcggcagctacatgtgccacaggagctactgctaccgctaccgctgtgccgcccggagccagaacaccccagacagcagcgccagcaacctgggcttccgctgtgccgctgaccggctgcccaccatggactag

SEQ ID NO: 171931 - DNA, 1065 bp, synthetic construct
  misc_feature 1..1065: note = Description of Artificial Sequence: Synthetic coding sequence
  source 1..1065: mol_type = other DNA
atggccgccccagccctgggcctggtgtgtggccgctgcccagagctgggcctggtgctgctgctgctgctgctgagcctgctgtgtggggccgccggcagccaggaggccggcactggagctggagctggcagcctggccggcagctgtggctgcggcaccccccagaggcctggggcccacggcagcagcgctgctgcccaccgctacagccgggaggccaatgcccctggccctgtgcctggagagcggcagctggcccacagcaagatggtgcccatcccagctggggtcttcaccatgggcacagatgacccccagatcaagcaggatggagaggccccagcccggcgggtgaccattgatgccttctacatggatgcctatgaggtgagcaacacagaatttgagaagtttgtgaacagcacaggctacctgacagaagctgagaagtttggagacagctttgtgtttgagggcatgctgtctgagcaggtgaagaccaacatccagcaggccgtggccgccgccccctggtggctgcctgtgaagggggccaactggaggcaccctgagggccctgacagcaccatcctgcacaggccagaccaccctgtgctgcacgtgtcctggaatgatgctgtggcctactgcacctgggccggcaagaggctgcccacagaagctgagtgggagtacagctgccggggcggcctgcacaacagactcttcccctggggcaacaagctgcagcccaagggccagcactacgccaacatctggcagggcgagttccctgtgaccaacacaggagaagatggcttccagggcacagcccctgtggatgccttccccccaaatggctacggcctgtacaacatcgtgggcaatgcctgggagtggaccagtgactggtggacagtgcaccacagcgtggaggagaccctgaaccccagctactgctaccgctaccgctgtgccgcccggagccagaacaccccagacagcagcgccagcaacctgggcttccgctgtgccgctgaccggctgcccaccatggactag

SEQ ID NO: 171932 - DNA, 1638 bp, synthetic construct
  misc_feature 1..1638: note = Description of Artificial Sequence: Synthetic coding sequence
  source 1..1638: mol_type = other DNA
atgctgctgctgcacagagctgtggtgctgcggctgcagcaggcctgccgcctgaagagcatccccagccgcatctgcatccaggcctgcagcaccaatgacagcttccagccccagaggcccagcctgaccttcagcggggacaacagcagcacccagggctggagggtgatgggcaccctgctgggcctgggcgctgtgctggcctaccaggaccaccgctgcagagctgcccaggagagcacccacatctacaccaaggaggaggtgagcagccacaccagccctgagaccggcatctgggtgaccctgggcagcgaggtgtttgatgtgacagaatttgtggacctgcaccctgggggccccagcaagctgatgctggccgccggcggccccctggagcccttctgggccctgtatgctgtgcacaaccagagccacgtgcgggagctgctggcccagtacaagattggagagctgaaccctgaggacaaggtggcccccaccgtggagaccagtgacccctatgcagatgatcctgtgcgccacccagccctgaaggtgaacagccagaggcccttcaatgctgagcccccacctgagctgctgacagagaactacatcacccccaaccccatcttcttcaccaggaaccacctgcctgtgcccaacctggaccctgacacctaccgcctgcacgtggtgggcgcccctgggggccagagcctgagcctgagcctggatgacctgcacaacttccccaggtatgagatcaccgtgaccctgcagtgtgccggcaacagaagaagtgagatgacccaggtgaaggaggtgaagggcctggagtggaggactggagccatcagcacagcccgctgggccggggcccggctgtgtgatgtgctggcccaggccggccaccagctgtgtgaaacagaggcccacgtgtgctttgagggcctggacagcgaccccaccggcacagcctacggggccagcatccccctggcccgggccatggaccctgaggccgaggtgctgctggcctatgagatgaatggccagcccctgccccgggaccacggcttccctgtgcgggtggtggtgcctggggtggtgggcgcccggcacgtgaagtggctgggccgggtgtctgtgcagcctgaggagagctacagccactggcagaggcgggactacaagggcttcagccccagcgtggactgggagaccgtggactttgacagcgcccccagcatccaggagctgcctgtgcagagcgccatcacagagcccagagatggagaaacagtggagagcggggaggtgaccatcaagggctacgcctggagcggcggcggccgggccgtcatccgggtggatgtgtccctggatggcggcctgacctggcaggtggccaagctggatggagaggagcagaggcccaggaaggcctgggcctggaggctgtggcagctgaaggcccctgtgcctgctggccagaaggagctgaacatcgtgtgcaaggctgtggatgatggctacaacgtgcagcctgacacagtggcccccatctggaacctgcggggcgtgctgagcaatgcctggcaccgggtgcacgtgtatgtgagcccctag

SEQ ID NO: 171933 - DNA, 1638 bp, synthetic construct; identical to SEQ ID NO: 171932
  misc_feature 1..1638: note = Description of Artificial Sequence: Synthetic coding sequence
  source 1..1638: mol_type = other DNA

SEQ ID NO: 171934 - DNA, 1638 bp, synthetic construct; identical to SEQ ID NO: 171932
  misc_feature 1..1638: note = Description of Artificial Sequence: Synthetic coding sequence
  source 1..1638: mol_type = other DNA

SEQ ID NO: 171935 - DNA, 1638 bp, synthetic construct; identical to SEQ ID NO: 171932
  misc_feature 1..1638: note = Description of Artificial Sequence: Synthetic coding sequence
  source 1..1638: mol_type = other DNA

SEQ ID NO: 171936 - DNA, 489 bp, synthetic construct
  misc_feature 1..489: note = Description of Artificial Sequence: Synthetic coding sequence
  source 1..489: mol_type = other DNA
atgctgctgctgcacagagctgtggtgctgcggctgcagcaggcctgccgcctgaagagcatccccagccgcatctgcatccaggcctgcagcaccaatgacagcttccagccccagaggcccagcctgaccttcagcggggacaacagcagcacccagggctggagggtgatgggcaccctgctgggcctgggcgctgtgctggcctaccaggaccaccgctgcagagctgcccaggagagcacccacatctacaccaaggaggaggtgagcagccacaccagccctgagaccggcatctgggtgaccctgggcagcgaggtgtttgatgtgacagaatttgtggacctgcaccctgggggccccagcaagctgatgctggccgccggcggccccctggagcccttctgggccctgtatgctgtgcacaaccagagccacgtgcgggagctgctggcccagtacaagattggagagctgaacccctag

SEQ ID NO: 171937 - DNA, 132 bp, synthetic construct
  misc_feature 1..132: note = Description of Artificial Sequence: Synthetic coding sequence
  source 1..132: mol_type = other DNA
atgctgctgctgcacagagctgtggtgctgcggctgcagcaggcctgccgcctgaagagcatccccagccgcatctgcatccaggcctgcagcaccaatgacagcttccagccccagaggcccagcctgtag

SEQ ID NO: 171938 - DNA, 1638 bp, synthetic construct; identical to SEQ ID NO: 171932
  misc_feature 1..1638: note = Description of Artificial Sequence: Synthetic coding sequence
  source 1..1638: mol_type = other DNA

SEQ ID NO: 171939 - DNA, 1638 bp, synthetic construct; identical to SEQ ID NO: 171932
  misc_feature 1..1638: note = Description of Artificial Sequence: Synthetic coding sequence
  source 1..1638: mol_type = other DNA

SEQ ID NO: 171940 - DNA, 366 bp, synthetic construct
  misc_feature 1..366: note = Description of Artificial Sequence: Synthetic coding sequence
  source 1..366: mol_type = other DNA
atgctgctgctgcacagagctgtggtgctgcggctgcagcaggcctgccgcctgaagagcatccccagccgcatctgcatccaggcctgcagcaccaatgacagcttccagccccagaggcccagcctgaccttcagcggggacaacagcagcacccagggctggagggtgatgggcaccctgctgggcctgggcgctgtgctggcctaccaggaccaccgctgcagagctgcccaggagagcacccacatctacaccaaggaggaggtgagcagccacaccagccctgagaccggcatctgggtgaccctgggcagcgaggtgtttgatgtgacagaatttgtggacctgcaccctgggggctag

SEQ ID NO: 171941 - DNA, 783 bp, synthetic construct
  misc_feature 1..783: note = Description of Artificial Sequence: Synthetic coding sequence
  source 1..783: mol_type = other DNA
atggccgagagcgaggccgagacccccagcaccccaggagaatttgagagcaagtactttgagttccatggagtgcggctgccccccttctgccggggcaagatggaggagatcgccaacttccctgtgcggcccagtgatgtgtggatcgtgacctaccccaagagcggcaccagcctgctgcaggaggtggtgtacctggtgtcccagggcgctgaccctgatgaaattggcctgatgaacattgatgagcagctgcctgtgctggagtacccccagcccggcctggacatcatcaaggagctgaccagccccaggctcatcaagagccacctgccctaccgcttcctgcccagcgacctgcacaatggagacagcaaggtgatctacatggccaggaaccccaaggacctggtggtgtcctactaccagttccacaggagcctgcggaccatgagctaccggggcaccttccaggagttctgccgccgcttcatgaatgacaagctgggctacggctcctggtttgagcacgtgcaggagttctgggagcacaggatggacagcaatgtgctcttcctgaagtatgaggacatgcaccgggacctggtgaccatggtggagcagctggcccgcttcctgggcgtgtcctgtgacaaggcccagctggaggccctgacagagcactgccaccagctggtggaccagtgctgcaatgctgaggccctgcctgtgggccgggcccactgtgtgtttgccaggaagatcttcctgtcctggtag

SEQ ID NO: 171942 - DNA, 855 bp, synthetic construct
  misc_feature 1..855: note = Description of Artificial Sequence: Synthetic coding sequence
  source 1..855: mol_type = other DNA
atggccgagagcgaggccgagacccccagcaccccaggagaatttgagagcaagtactttgagttccatggagtgcggctgccccccttctgccggggcaagatggaggagatcgccaacttccctgtgcggcccagtgatgtgtggatcgtgacctaccccaagagcggcaccagcctgctgcaggaggtggtgtacctggtgtcccagggcgctgaccctgatgaaattggcctgatgaacattgatgagcagctgcctgtgctggagtacccccagcccggcctggacatcatcaaggagctgaccagccccaggctcatcaagagccacctgccctaccgcttcctgcccagcgacctgcacaatggagacagcaaggtgatctacatggccaggaaccccaaggacctggtggtgtcctactaccagttccacaggagcctgcggaccatgagctaccggggcaccttccaggagttctgccgccgcttcatgaatgacaagctgggctacggctcctggtttgagcacgtgcaggagttctgggagcacaggatggacagcaatgtgctcttcctgaagtatgaggacatgcaccgggacctggtgaccatggtggagcagctggcccgcttcctgggcgtgtcctgtgacaaggcccagctggaggccctgacagagcactgccaccagctggtggaccagtgctgcaatgctgaggccctgcctgtgggccggggccgggtgggcctgtggaaggacatcttcaccgtgtccatgaatgagaagtttgacctggtgtacaagcagaagatgggcaaatgtgacctgacctttgacttctacctgtag

SEQ ID NO: 171943 - DNA, 516 bp, synthetic construct
  misc_feature 1..516: note = Description of Artificial Sequence: Synthetic coding sequence
  source 1..516: mol_type = other DNA
atggccgagagcgaggccgagacccccagcaccccaggagaatttgagagcaagtactttgagttccatggagtgcggctgccccccttctgccggggcaagatggaggagatcgccaacttccctgtgcggcccagtgatgtgtggatcgtgacctaccccaagtctgtgggctacggctcctggtttgaacatgtgcaggagttctgggagcacaggatggacagcaatgtgctcttcctgaagtatgaggacatgcaccgggacctggtgaccatggtggagcagctggcccgcttcctgggcgtgtcctgtgacaaggcccagctggaggccctgacagagcactgccaccagctggtggaccagtgctgcaatgctgaggccctgcctgtgggccggggccgggtgggcctgtggaaggacatcttcaccgtgtccatgaatgagaagtttgacctggtgtacaagcagaagatgggcaaatgtgacctgacctttgacttctacctgtag

SEQ ID NO: 171944 - DNA, 171 bp, synthetic construct
  misc_feature 1..171: note = Description of Artificial Sequence: Synthetic coding sequence
  source 1..171: mol_type = other DNA
atgctggccaagctgctgtgtgaccaggtggtgggcgcccccatcgctgtgtctgccttctacgccggcatgagcatcctgcagggcaaggatgacatcttcctggacctgaagcagaagttctggaacacctacatgcagacccagagctggctgtggaggagcctgtag

SEQ ID NO: 171945 - DNA, 888 bp, synthetic construct
  misc_feature 1..888: note = Description of Artificial Sequence: Synthetic coding sequence
  source 1..888: mol_type = other DNA
atggagctgatccaggacaccagccggccccccctggagtatgtgaagggcgtgcccctcatcaagtactttgctgaggccctgggccccctgcagagcttccaggcccggccagatgacctgctgatcagcacctaccccaagagcggcaccacctgggtgtcccagatcctggacatgatctaccagggcggggacctggagaagtgccaccgggcccccatcttcatgagggtgcccttcctggagttcaaggcccctggcatccccagcggcatggagaccctgaaggacaccccagccccccggctgctgaagacccacctgcccctggccctgctgccccagaccctgctggaccagaaggtgaaggtggtgtatgtggccagaaatgccaaggatgtggccgtgtcctactaccacttctaccacatggccaaggtgcaccctgagcccggcacctgggacagcttcctggagaagttcatggtgggggaggtgtcctatggctcctggtaccagcacgtgcaggagtggtgggagctgagcaggacccaccctgtgctgtacctgttctatgaggacatgaaggagaaccccaagcgggagatccagaagatcctggagtttgtgggccgcagcctgcctgaggagaccgtggactttgtggtgcagcacaccagcttcaaggagatgaagaagaaccccatgaccaactacaccaccgtgccccaggagttcatggaccacagcatcagccccttcatgaggaagggcatggccggggactggaagaccaccttcaccgtggcccagaatgaaagatttgatgctgactatgcagagaagatggccggctgcagcctgtccttccgctctgagctgtag

SEQ ID NO: 171946 - DNA, 888 bp, synthetic construct; identical to SEQ ID NO: 171945
  misc_feature 1..888: note = Description of Artificial Sequence: Synthetic coding sequence
  source 1..888: mol_type = other DNA

SEQ ID NO: 171947 - DNA, 654 bp, synthetic construct
  misc_feature 1..654: note = Description of Artificial Sequence: Synthetic coding sequence
  source 1..654: mol_type = other DNA
atgctggccaagctgctgtgtgaccaggtggtgggcgcccccatcgctgtgtctgccttctacgccggcatgagcatcctgcagggcaaggatgacatcttcctggacctgaagcagaagttctggaacacctacatggtggtgtatgtggccagaaatgccaaggatgtggccgtgtcctactaccacttctaccacatggccaaggtgcaccctgagcccggcacctgggacagcttcctggagaagttcatggtgggggaggtgtcctatggctcctggtaccagcacgtgcaggagtggtgggagctgagcaggacccaccctgtgctgtacctgttctatgaggacatgaaggagaaccccaagcgggagatccagaagatcctggagtttgtgggccgcagcctgcctgaggagaccgtggactttgtggtgcagcacaccagcttcaaggagatgaagaagaaccccatgaccaactacaccaccgtgccccaggagttcatggaccacagcatcagccccttcatgaggaagggcatggccggggactggaagaccaccttcaccgtggcccagaatgaaagatttgatgctgactatgcagagaagatggccggctgcagcctgtccttccgctctgagctgtag

SEQ ID NO: 171948 - DNA, 888 bp, synthetic construct; identical to SEQ ID NO: 171945
  misc_feature 1..888: note = Description of Artificial Sequence: Synthetic coding sequence
  source 1..888: mol_type = other DNA

SEQ ID NO: 171949 - DNA, 888 bp, synthetic construct; identical to SEQ ID NO: 171945
  misc_feature 1..888: note = Description of Artificial Sequence: Synthetic coding sequence
  source 1..888: mol_type = other DNA

SEQ ID NO: 171950 - DNA, 888 bp, synthetic construct
  misc_feature 1..888: note = Description of Artificial Sequence: Synthetic coding sequence
  source 1..888: mol_type = other DNA
atggagctgatccaggacatcagccggccccccctggagtatgtgaagggcgtgcccctcatcaagtactttgctgaggccctgggccccctgcagagcttccaggcccggccagatgacctgctgatcagcacctaccccaagagcggcaccacctgggtgtcccagatcctggacatgatctaccagggcggggacctggagaagtgccaccgggcccccatcttcatgagggtgcccttcctggagttcaaggtgcccggcatccccagcggcatggagaccctgaagaacaccccagccccccggctgctgaagacccacctgcccctggccctgctgccccagaccctgctggaccagaaggtgaaggtggtgtatgtggccagaaatgccaaggatgtggccgtgtcctactaccacttctaccacatggccaaggtgtacccccaccctggcacctgggagagcttcctggagaagttcatggccggggaggtgtcctatggctcctggtaccagcacgtgcaggagtggtgggagctgagcaggacccaccctgtgctgtacctgttctatgaggacatgaaggagaaccccaagcgggagatccagaagatcctggagtttgtgggccgcagcctgcctgaggagaccgtggacctgatggtggagcacaccagcttcaaggagatgaagaagaaccccatgaccaactacaccaccgtgcggcgggagttcatggaccacagcatcagccccttcatgaggaagggcatggccggggactggaagaccaccttcaccgtggcccagaatgaaagatttgatgctgactatgccaagaagatggccggctgcagcctgtccttccgctctgagctgtag

SEQ ID NO: 171951 - DNA, 888 bp, synthetic construct; identical to SEQ ID NO: 171950
  misc_feature 1..888: note = Description of Artificial Sequence: Synthetic coding sequence
  source 1..888: mol_type = other DNA

SEQ ID NO: 171952 - DNA, 579 bp, synthetic construct
  misc_feature 1..579: note = Description of Artificial Sequence: Synthetic coding sequence
  source 1..579: mol_type = other DNA
atggagctgatccaggacatcagccggccccccctggagtatgtgaagggcgtgcccctcatcaagtactttgctgaggccctgggccccctgcagagcttccaggcccggccagatgacctgctgatcagcacctaccccaagagcggcaccacctgggtgtcccagatcctggacatgatctaccagggcggggacctggagaagtgccaccgggcccccatcttcatgagggtgcccttcctggagttcaaggtgcccggcatccccagcggcatggagaccctgaagaacaccccagccccccggctgctgaagacccacctgcccctggccctgctgccccagaccctgctggaccagaaggtgaaggtggtgtatgtggccagaaatgccaaggatgtggccgtgtcctactaccacttctaccacatggccaaggtgtacccccaccctggcacctgggagagcttcctggagaagttcatggccggggaggtgtcctatggctcctggtaccagcacgtgcaggagtggtgggagctgagcaggacccaccctgtgctgtacctgttctag

SEQ ID NO: 171953 - DNA, 891 bp, synthetic construct
  misc_feature 1..891: note = Description of Artificial Sequence: Synthetic coding sequence
  source 1..891: mol_type = other DNA
atggccctgaccagtgacctgggcaagcagatcaagctgaaggaggtggagggcaccctgctgcagcctgccaccgtggacaactggagccagatccagagctttgaggccaagccagatgacctgctgatctgcacctaccccaaggccggcaccacctggatccaggagatcgtggacatgattgagcagaatggagatgtggagaagtgccagagggccatcatccagcaccgccaccccttcatcgagtgggcccggcccccccagcccagcggcgtggagaaggccaaggccatgcccagcccccgcatcctgaagacccacctgagcacccagctgctgccccccagcttctgggagaacaactgcaagttcctgtatgtggccagaaatgccaaggactgcatggtgtcctactaccacttccagaggatgaaccacatgctgcctgaccccggcacctgggaggagtactttgagaccttcatcaatggcaaggtggtgtggggctcctggtttgaccacgtgaagggctggtgggagatgaaggacagacaccagatcctcttcctgttctatgaggacatcaagagggaccccaagcatgagatcaggaaggtgatgcagttcatgggcaagaaggtggatgaaacagtgctggacaagatcgtgcaggagaccagctttgagaagatgaaggagaaccccatgaccaacagaagcacagtgtccaagagcatcctggaccagagcatcagcagcttcatgaggaaaggaacagtgggggactggaagaaccacttcaccgtggcccagaatgaaagatttgatgagatctacagaaggaagatggagggcaccagcatcaacttctgcatggagctgtag

SEQ ID NO: 171954 - DNA, 924 bp, synthetic construct
  misc_feature 1..924: note = Description of Artificial Sequence: Synthetic coding sequence
  source 1..924: mol_type = other DNA
atggccctgaccagtgacctgggcaagcagatcaagctgaaggaggtggagggcaccctgctgcagcctgccaccgtggacaactggagccagatccagagctttgaggccaagccagatgacctgctgatctgcacctaccccaaggccggcaccacctggatccaggagatcgtggacatgattgagcagaatggagatgtggagaagtgccagagggccatcatccagcaccgccaccccttcatcgagtgggcccggcccccccagcccagcgagaccggcttccaccacgtggcccaggccggcctgaagctgctgagcagcagcaaccccccagccagcaccagccagagcgccaagatcacagacctgctgcccccatccttctgggagaacaactgcaagttcctgtatgtggccagaaatgccaaggactgcatggtgtcctactaccacttccagaggatgaaccacatgctgcctgaccccggcacctgggaggagtactttgagaccttcatcaacgggaaggtggtgtggggctcctggtttgaccacgtgaagggctggtgggagatgaaggacagacaccagatcctcttcctgttctatgaggacatcaagagggaccccaagcatgagatcaggaaggtgatgcagttcatgggcaagaaggtggatgagaccgtgctggacaagatcgtgcaggagaccagctttgagaagatgaaggagaaccccatgaccaacagaagcacagtgtccaagagcatcctggaccagagcatcagcagcttcatgaggaagggcaccgtgggggactggaagaaccacttcaccgtggcccagaatgaaagatttgatgagatctacagaaggaagatggagggcaccagcatcaacttctgcatggagctgtag

SEQ ID NO: 171955 - DNA, 933 bp, synthetic construct
  misc_feature 1..933: note = Description of Artificial Sequence: Synthetic coding sequence
  source 1..933: mol_type = other DNA
atggccctgaccagtgacctgggcaagcagatcaagctgaaggaggtggagggcaccctgctgcagcctgccaccgtggacaactggagccagatccagagctttgaggccaagccagatgacctgctgatctgcacctaccccaaggccggcaccacctggatccaggagatcgtggacatgattgagcagaatggagatgtggagaagtgccagagggccatcatccagcaccgccaccccttcatcgagtgggcccggcccccccagcccagcgtgctggtgctgcggcgctgcttcctgctgagctacttcaagggcgtggagaaggccaaggccatgcccagcccccgcatcctgaagacccacctgagcacccagctgctgccccccagcttctgggagaacaactgcaagttcctgtatgtggccagaaatgccaaggactgcatggtgtcctactaccacttccagaggatgaaccacatgctgcctgaccccggcacctgggaggagtactttgagaccttcatcaatggcaaggtggtgtggggctcctggtttgaccacgtgaagggctggtgggagatgaaggacagacaccagatcctcttcctgttctatgaggacatcaagagggaccccaagcatgagatcaggaaggtgatgcagttcatgggcaagaaggtggatgaaacagtgctggacaagatcgtgcaggagaccagctttgagaagatgaaggagaaccccatgaccaacagaagcacagtgtccaagagcatcctggaccagagcatcagcagcttcatgaggaaaggaacagtgggggactggaagaaccacttcaccgtggcccagaatgaaagatttgatgagatctacagaaggaagatggagggcaccagcatcaacttctgcatggagctgtag

SEQ ID NO: 171956 - DNA, 639 bp, synthetic construct
  misc_feature 1..639: note = Description of Artificial Sequence: Synthetic coding sequence
  source 1..639: mol_type = other DNA
atgggccccccatctgccagcccccaccgggagtgcatcccctggcagggcctgctgctgacagccagcctgctgaacttctggaacccccccaccacagccaagctgaccatcgagagcatgcccctgtctgtggccgagggcaaggaggtgctgctgctggtgcacaacctgccccagcacctgtttggctacagctggtacaagggggagcgggtggatggcaacagcctgattgtgggctacgtgattggcacccagcaggccaccccaggagctgcctacagcggccgggagaccatctacaccaatgccagcctgctgatccagaatgtgacccagaatgacatcggcttctacaccctgcaggtgatcaagagtgacctggtgaatgaggaggccaccggccagttccacgtgtaccaggagaatgcccctggcctgcctgtgggcgctgtggccggcatcgtgactggagtgctggtgggcgtggccctggtggccgccctggtgtgcttcctgctgctggccaagacaggccggccctggagcctgccccagctgtgcctgctggatgtgcccagcctgcactgccccggcccccccacccagccccaggacagcagcttccacctgtag

SEQ ID NO: 171957 - DNA, 1098 bp, synthetic construct
  misc_feature 1..1098: note = Description of Artificial Sequence: Synthetic coding sequence
  source 1..1098: mol_type = other DNA
atggatggccctgctgagccccagatccctggcctgtgggacacctatgaagatgacatcagcgagatcagccagaagctgcccggggagtacttccgctacaagggcgtgcccttccctgtgggcctgtacagcctggagagcatcagcctggccgagaacacccaggatgtgagagatgatgacatcttcatcatcacctaccccaagagcggcaccacctggatgattgagatcatctgcctgatcctgaaggagggggaccccagctggatccgctctgtgcccatctgggagcgggccccctggtgtgagaccatcgtgggcgccttcagcctgcctgaccagtacagcccccggctgatgagcagccacctgcccatccagatcttcaccaaggccttcttcagcagcaaggccaaggtgatctacatgggcaggaaccccagagatgtggtggtgtccctgtaccactacagcaagattgctggccagctgaaggaccccggcaccccagaccagttcctgcgggacttcctgaagggggaggtgcagtttggctcctggtttgaccacatcaagggctggctgaggatgaagggcaaggacaacttcctgttcatcacctatgaggagctgcagcaggacctgcagggctctgtggagcgcatctgtggcttcctgggccggcccctgggcaaggaggccctgggctctgtggtggcccacagcaccttcagcgccatgaaggccaacaccatgagcaactacaccctgctgccccccagcctgctggaccaccggcggggggccttcctgaggaaaggagtgtgtggggactggaagaaccacttcaccgtggcccagagcgaggcctttgaccgggcctacaggaagcagatgaggggcatgcccaccttcccctgggatgaagatcctgaagaagatggcagcccagaccctgagcccagccctgagcctgagcccaagcccagcctggagcccaacaccagcctggagcgggagccccggcccaacagcagccccagccccagccctggccaggccagcgagaccccccacccccggcccagctag

SEQ ID NO: 171958 - DNA, 1053 bp, synthetic construct
  misc_feature 1..1053: note = Description of Artificial Sequence: Synthetic coding sequence
  source 1..1053: mol_type = other DNA
atggccagccccccacccttccacagccagaagctgcctggagagtacttccgctacaagggcgtgcccttccctgtgggcctgtacagcctggagagcatcagcctggccgagaacacccaggatgtgagagatgatgacatcttcatcatcacctaccccaagagcggcaccacctggatgattgagatcatctgcctgatcctgaaggagggggaccccagctggatccgctctgtgcccatctgggagcgggccccctggtgtgagaccatcgtgggcgccttcagcctgcctgaccagtacagcccccggctgatgagcagccacctgcccatccagatcttcaccaaggccttcttcagcagcaaggccaaggtgatctacatgggcaggaaccccagagatgtggtggtgtccctgtaccactacagcaagattgctggccagctgaaggaccccggcaccccagaccagttcctgcgggacttcctgaagggggaggtgcagtttggctcctggtttgaccacatcaagggctggctgaggatgaagggcaaggacaacttcctgttcatcacctatgaggagctgcagcaggacctgcagggctctgtggagcgcatctgtggcttcctgggccggcccctgggcaaggaggccctgggctctgtggtggcccacagcaccttcagcgccatgaaggccaacaccatgagcaactacaccctgctgccccccagcctgctggaccacagaagaggagccttcctgaggaagggcgtgtgtggggactggaagaaccacttcaccgtggcccagagcgaggcctttgaccgggcctacaggaagcagatgaggggcatgcccaccttcccctgggatgaggaccctgaggaggatggcagcccagaccctgagcccagccctgagcctgagcccaagcccagcctggagcccaacaccagcctggagcgggagccccggcccaacagcagccccagccccagccctggccaggccagcgagaccccccacccccggcccagctag

SEQ ID NO: 171959 - DNA, 1041 bp, synthetic construct
  misc_feature 1..1041: note = Description of Artificial Sequence: Synthetic coding sequence
  source 1..1041: mol_type = other DNA
atggtggagaaggaggaggccggcggcggcatcagcgaggaggaggccgcccagtatgaccggcagatccggctgtggggcctggaggcccagaagaggctgcgggccagccgggtgctgctggtgggcctgaagggcctgggcgctgagatcgccaagaacctgatcctggccggcgtgaagggcctgaccatgctggaccacgagcaggtgaccccagaggaccccggggcccagttcctgatcagaacaggctctgtgggcaggaacagagctgaggccagcctggagcgggcccagaacctgaaccccatggtggatgtgaaggtggacacagaagatattgagaagaagccagagagcttcttcacccagtttgatgctgtgtgcctgacctgctgcagcagagatgtgattgtgaaggtggaccagatctgccacaagaacagcatcaagttcttcaccggagatgtgtttggctaccacggctacacctttgccaacctgggggagcacgagtttgtggaggagaagaccaaggtggccaaggtgtcccagggcgtggaggatggccctgacaccaagagggccaagctggacagcagcgagaccaccatggtgaagaagaaggtggtgttctgccctgtgaaggaggccctggaggtggactggagcagcgagaaggccaaggccgccctgaagaggaccaccagtgactacttcctgctgcaggtgctgctgaagttcagaacagacaagggccgggaccccagcagtgacacctatgaggaggacagcgagctgctgctgcagatcagaaatgatgtgctggacagcctgggcatcagcccagacctgctgcctgaagattttgtgcgctactgcttcagcgagatggcccctgtgtgtgctgtggtgggcggcatcctggcccaggagatcgtgaaggccctgagccagagggaccccccccacaacaacttcttcttctttgatggcatgaagggaaatggaattgtggagtgcctgggccccaagtag

SEQ ID NO: 171960 - DNA, 801 bp, synthetic construct
  misc_feature 1..801: note = Description of Artificial Sequence: Synthetic coding sequence
  source 1..801: mol_type = other DNA
atggtggagaaggaggaggccggcggcggcatcagcgaggaggaggccgcccagtatgaccggcagatccggctgtggggcctggaggcccagaagaggctgcgggccagccgggtgctgctggtgggcctgaagggcctgggcgctgagatcgccaagaacctgatcctggccggcgtgaagggcctgaccatgctggaccacgagcaggtgaccccagaggaccccggggcccagttcctgatcagaacaggctctgtgggcaggaacagagctgaggccagcctggagcgggcccagaacctgaaccccatggtggatgtgaaggtggacacagaagatattgagaagaagccagagagcttcttcacccagtttgatgctgtgtgcctgacctgctgcagcagagatgtgattgtgaaggtggaccagatctgccacaagaacagcatcaagttcttcaccggagatgtgtttggctaccacggctacacctttgccaacctgggggagcacgagtttgtggaggagaagaccaaggtggccaaggtgtcccagggcgtggaggatggccctgacaccaagagggccaagctggacagcagcgagaccaccatggtgaagaagaaggtggtgttctgccctgtgaaggaggccctggaggtggactggagcagcgagaaggccaaggccgccctgaagaggaccaccagtgactacttcctgctgcagggcacagccagcccccgctggccccagtgtgtgcgctggctggagggcttctggcacaggaagctgtag

SEQ ID NO: 171961 - DNA, 900 bp, synthetic construct
  misc_feature 1..900: note = Description of Artificial Sequence: Synthetic coding sequence
  source 1..900: mol_type = other DNA
atggtggagaaggaggaggccggcggcggcatcagcgaggaggaggccgcccagtatgaccggcagatccggctgtggggcctggaggcccagaagaggctgcgggccagccgggtgctgctggtgggcctgaagggcctgggcgctgagatcgccaagaacctgatcctggccggcgtgaagggcctgaccatgctggaccacgagcaggtgaccccagaggaccccggggcccagttcctgatcagaacaggctctgtgggcaggaacagagctgaggccagcctggagcgggcccagaacctgaaccccatggtggatgtgaaggtggacacagaagatattgagaagaagccagagagcttcttcacccagtttgatgctgtgtgcctgacctgctgcagcagagatgtgattgtgaaggtggaccagatctgccacaagaacagcatcaagttcttcaccggagatgtgtttggctaccacggctacacctttgccaacctgggggagcacgagtttgtggaggagaagaccaaggtggccaaggtgtcccagggcgtggaggatggccctgacaccaagagggccaagctggacagcagcgagaccaccatggtgaagaagaaggtggtgttctgccctgtgaaggaggccctggaggtggactggagcagcgagaaggccaaggccgccctgaagaggaccaccagtgactacttcctgctgcagggccctgtgtctgctggccccagcagccagcagctgctgctgctgcgctggcatgaaggagagtgggactgtggggtgccctggccccaggtgaacagcagatttggcagccccagagatgccaactgcagcatgcccacctgcatcccctgccccctgcccagctag

SEQ ID NO: 171962 - DNA, 900 bp, synthetic construct
  misc_feature 1..900: note = Description of Artificial Sequence: Synthetic coding sequence
  source 1..900: mol_type = other DNA
atggtggagaaggaggaggccggcggcggcatcagcgaggaggaggccgcccagtatgaccggcagatccggctgtggggcctggaggcccagaagaggctgcgggccagccgggtgctgctggtgggcctgaagggcctgggcgctgagatcgccaagaacctgatcctggccggcgtgaagggcctgaccatgctggaccacgagcaggtgaccccagaggaccccggggcccagttcctgatcagaacaggctctgtgggcaggaacagagctgaggccagcctggagcgggcccagaacctgaaccccatggtggatgtgaaggtggacacagaagatattgagaagaagccagagagcttcttcacccagtttgatgctgtgtgcctgacctgctgcagcagagatgtgattgtgaaggtggaccagatctgccacaagaacagcatcaagttcttcaccggagatgtgtttggctaccacggctacacctttgccaacctgggggagcacgagtttgtggaggagaagaccaaggtggccaaggtgtcccagggcgtggaggatggccctgacaccaagagggccaagctggacagcagcgagaccaccatggtgaagaagaaggtggtgttctgccctgtgaaggaggccctggaggtggactggagcagcgagaaggccaaggccgccctgaagaggaccaccagtgactacttcctgctgcaggagctgttcccccgcatcgtggagcgggtgtatgcccagaggcaccccaggagcacagagaggacccacgccaagatgctgatccccttcctgaccaaggagaagccaggcttcctgggggagatggctgtgagccgctctggagtgggcaagctgcagtgcagctag

SEQ ID NO: 171963 - DNA, 519 bp, synthetic construct
  misc_feature 1..519: note = Description of Artificial Sequence: Synthetic coding sequence
  source 1..519: mol_type = other DNA
atgctggagaagaccaaggtggccaaggtgtcccagggcgtggaggatggccctgacaccaagagggccaagctggacagcagcgagaccaccatggtgaagaagaaggtggtgttctgccctgtgaaggaggccctggaggtggactggagcagcgagaaggccaaggccgccctgaagaggaccaccagtgactacttcctgctgcaggtgctgctgaagttcagaacagacaagggccgggaccccagcagtgacacctatgaggaggacagcgagctgctgctgcagatcagaaatgatgtgctggacagcctgggcatcagcccagacctgctgcctgaagattttgtgcgctactgcttcagcgagatggcccctgtgtgtgctgtggtgggcggcatcctggcccaggagatcgtgaaggccctgagccagagggaccccccccacaacaacttcttcttctttgatggcatgaagggaaatggaattgtggagtgcctgggccccaagtag

SEQ ID NO: 171964 - DNA, 1935 bp, synthetic construct
  misc_feature 1..1935: note = Description of Artificial Sequence: Synthetic coding sequence
  source 1..1935: mol_type = other DNA
atggatgacattgctgacaggatgaggatggatgctggggaggtgaccctggtgaaccacaacagcgtcttcaagacccacctgctgccccagacaggcttccctgaggaccagctgagcctgagtgaccagcagatcctgagcagccggcagggccacctggaccgctccttcacctgcagcaccaggtctgctgcctacaaccccagctactacagcgacaaccccagcagtgacagcttcctgggcagcggggacctgcggaccttcggccagagcgccaacggccagtggaggaacagcacccccagcagcagcagcagcctgcagaagagcaggaacagccgcagcctgtacctggagaccaggaagaccagcagcggcctgagcaacagctttgctgggaagagcaaccaccactgccacgtgtctgcctatgagaagagcttccccatcaagcctgtgcccagccccagctggagcggcagctgcagaagaagcctgctgagccccaagaagacccagaggagacatgtgtccacagctgaggagaccgtgcaggaggaggagcgggagatctaccggcagctgctgcagatggtgacaggcaagcagttcaccatcgccaagcccaccacccacttccccctgcacctgagccgctgcctgagcagcagcaagaacaccctgaaggacagcctcttcaagaatggaaacagctgtgccagccagatcatcggcagtgacaccagcagcagcggcagcgccagcatcctgaccaaccaggagcagctgagccacagcgtgtacagcctgagcagctacaccccagatgtggccttcggcagcaaggacagcggcaccctgcaccacccccaccaccaccacagcgtgccccaccagcctgacaacctggccgccagcaacacccagagcgagggcagtgacagcgtcatcctgctgaaggtgaaggacagccagacccccacccccagcagcaccttcttccaggccgagctgtggatcaaggagctgacctctgtgtatgacagccgggcccgggagcggctgcggcagatcgaggagcagaaggccctggccctgcagctgcagaaccagaggctgcaggagcgggagcacagcgtgcatgattctgtggagctgcacctgcgggtgcccctggagaaggagatccctgtgacagtggtgcaggagacccagaagaagggccacaagctgacagacagtgaagatgagttccctgagatcacagaggagatggagaaggagatcaagaatgtgttcagaaatggaaaccaggatgaggtgctgtctgaggccttccggctgaccatcaccaggaaggacatccagaccctgaaccacctgaactggctgaatgatgagatcatcaacttctacatgaacatgctgatggagaggagcaaggagaagggcctgcccagcgtgcacgccttcaacaccttcttcttcaccaagctgaagacagctggctaccaggccgtgaagcgctggaccaagaaggtggatgtgttttctgtggacatcctgctggtgcccatccacctgggcgtgcactggtgcctggccgtggtggacttcaggaagaagaacatcacctactatgacagcatgggcggcatcaacaatgaggcctgccgcatcctgctgcagtacctgaagcaggagagcattgacaagaagaggaaggagtttgacaccaacggctggcagctgttcagcaagaagagccaggagatcccccagcagatgaatggaagtgactgtggcatgtttgcctgcaagtatgctgactgcatcaccaaggaccggcccatcaacttcacccagcagcacatgccctacttcaggaagaggatggtgtgggagatcctgcacaggaagctgctgtag

SEQ ID NO: 171965 - DNA, 489 bp, synthetic construct
  misc_feature 1..489: note = Description of Artificial Sequence: Synthetic coding sequence
  source 1..489: mol_type = other DNA
atgaagatccccctgacagccaccatctgcctgcccggcagcagccccccaggcctgtgcatctttgccaaggtgtctgatgtgaagaggctggagatggatgacattgctgacaggatgaggatggatgctggggaggtgaccctggtgaaccacaacagcgtcttcaagacccacctgctgccccagacaggcttccctgaggaccagctgagcctgagtgaccagcagatcctgagcagccggcagggccacctggaccgctccttcacctgcagcaccaggtctgctgcctacaaccccagctactacagcggccctggcctgggcgtgctggcccgctacagctggggcaagatgctgacctttggaggccaccacggcgtgaccctgatgcagatccgccacatggctgtggccggcttcagcagcttcatcaacttccagatcatcctgccccagacagtgttcctggcccaggccatctag

SEQ ID NO: 171966 - DNA, 1932 bp, synthetic construct
  misc_feature 1..1932: note = Description of Artificial Sequence: Synthetic coding sequence
  source 1..1932: mol_type = other DNA
atggatgacattgctgacaggatgaggatggatgctggggaggtgaccctggtgaaccacaacagcgtcttcaagacccacctgctgccccagacaggcttccctgaggaccagctgagcctgagtgaccagcagatcctgagcagccggcagggccacctggaccgctccttcacctgcagcaccaggtctgctgcctacaaccccagctactacagcgacaaccccagcagtgacagcttcctgggcagcggggacctgcggaccttcggccagagcgccaacggccagtggaggaacagcacccccagcagcagcagcagcctgcagaagagcaggaacagccgcagcctgtacctggagaccaggaagaccagcagcggcctgagcaacagctttgctgggaagagcaaccaccactgccacgtgtctgcctatgagaagagcttccccatcaagcctgtgcccagccccagctggagcggcagctgcagaagaagcctgctgagccccaagaagacccagaggagacatgtgtccacagctgaggagaccgtgcaggaggaggagcgggagatctaccggcagctgctgcagatggtgacaggcaagcagttcaccatcgccaagcccaccacccacttccccctgcacctgagccgctgcctgagcagcagcaagaacaccctgaaggacagcctcttcaagaatggaaacagctgtgccagccagatcatcggcagtgacaccagcagcagcggcagcgccagcatcctgaccaaccaggagcagctgagccacagcgtgtacagcctgagcagctacaccccagatgtggccttcggcagcaaggacagcggcaccctgcaccacccccaccaccaccacagcgtgccccaccagcctgacaacctggccgccagcaacacccagagcgagggcagtgacagcgtcatcctgctgaaggtgaaggacagccagacccccacccccagcagcaccttcttccaggccgagctgtggatcaaggagctgacctctgtgtatgacagccgggcccgggagcggctgcggcagatcgaggagcagaaggccctggccctgcagctgcagaaccagaggctgcaggagcgggagcacagcgtgcatgattctgtggagctgcacctgcgggtgcccctggagaaggagatccctgtgacagtggtgcaggagacccagaagaagggccacaagctgacagacagtgaagatgagttccctgagatcacagaggagatggagaaggagatcaagaatgtgttcagaaatggaaaccaggatgaggtgctgtctgaggccttccggctgaccatcaccaggaaggacatccagaccctgaaccacctgaactggctgaatgatgagatcatcaacttctacatgaacatgctgatggagaggagcaaggagaagggcctgcccagcgtgcacgccttcaacaccttcttcttcaccaagctgaagacagctggctaccaggccgtgaagcgctggaccaagaaggtggatgtgttttctgtggacatcctgctggtgcccatccacctgggcgtgcactggtgcctggccgtggtggacttcaggaagaagaacatcacctactatgacagcatgggcggcatcaacaatgaggcctgccgcatcctgctgcagtacctgaagcaggagagcattgacaagaagaggaaggagtttgacaccaacggctggcagctgttcagcaagaagagccagatcccccagcagatgaatggaagtgactgtggcatgtttgcctgcaagtatgctgactgcatcaccaaggaccggcccatcaacttcacccagcagcacatgccctacttcaggaagaggatggtgtgggagatcctgcacaggaagctgctgtag

SEQ ID NO: 171967 - DNA, 1935 bp, synthetic construct; identical to SEQ ID NO: 171964
  misc_feature 1..1935: note = Description of Artificial Sequence: Synthetic coding sequence
  source 1..1935: mol_type = other DNA

SEQ ID NO: 171968 - DNA, 1932 bp, synthetic construct; identical to SEQ ID NO: 171966
  misc_feature 1..1932: note = Description of Artificial Sequence: Synthetic coding sequence
  source 1..1932: mol_type = other DNA

SEQ ID NO: 171969 - DNA, 1935 bp, synthetic construct; identical to SEQ ID NO: 171964
  misc_feature 1..1935: note = Description of Artificial Sequence: Synthetic coding sequence
  source 1..1935: mol_type = other DNA

SEQ ID NO: 171970 - DNA, 2268 bp, synthetic construct
  misc_feature 1..2268: note = Description of Artificial Sequence: Synthetic coding sequence
  source 1..2268: mol_type = other DNA
atgaagaagcagaggaagatcctgtggaggaagggcatccacctggccttcagcgagaagtggaacacaggctttggaggcttcaagaagttctacttccaccagcacctgtgcatcctgaaggccaagctgggccggcctgtgacctggaaccggcagctgcggcacttccagggcaggaagaaggccctgcagatccagaagacctggatcaaggatgagcccctgtgtgccaagaccaagttcaacgtggccacccagaatgtgtccaccctgagcagcaaggtgaagaggaaggatgccaagcacttcatcagcagcagcaagaccctgctgcggctgcaggccgagaagctgctgagcagcgccaagaacagcgaccacgagtactgccgggagaagaacctgctgaaggctgtgacagacttccccagcaacagcgccctgggccaggccaacggccaccggcccaggacagacccccagcccagcgacttccccatgaagttcaatggagagagccagagccctggagagagcggcaccatcgtggtgaccctgaacaaccacaagaggaagggcttctgctacggctgctgccagggccctgagcaccacagaaatggaggccccctcatccccaagaagttccagctgaaccagcaccggcgcatcaagctgagccccctgatgatgtatgagaagctgtccatgatccgcttccgctaccgcatcctgcggagccagcacttccgcaccaagagcaaggtgtgcaagctgaggaaggcccagaggtcctgggtgcagaaggtgactggagaccaccaggagaccaggagagaaaatggagagggcggcagctgcagccccttccccagccctgagcccaaggaccccagctgccgccaccagccctacttcccagacatggacagcagcgctgtggtgaagggcaccaacagccacgtgcctgactgccacaccaagggcagcagcttcctgggcaaggagctgagcctggatgaggccttcccagaccagcagaatggaagtgccaccaatgcctgggaccagagcagctgcagcagccccaagtgggagtgcacagagctgattcatgacatccccctgcctgagcacaggagcaacaccatgttcatcagcgagacagagcgggagatcatgaccctgggccaggagaaccagaccagctctgtgtctgatgacagagtgaagctgtctgtgtctggagctgacacctctgtgtcctctgtggatggccctgtgtcccagaaggctgtgcagaatgaaaattcctaccagatggaggaggatggcagcctgaagcagagcatcctgagcagcgagctgctggaccacccctactgcaagagccccctggaggcccccctggtgtgcagcggcctgaagctggagaaccaggtgggcggcggcaagaacagccagaaggccagccctgtggatgatgagcagctgtctgtgtgcctgagcggcttcctggatgaggtgatgaagaagtatggcagcctggtgcccctgtctgagaaggaggtgctgggccgcctgaaggatgtgttcaatgaagacttcagcaacaggaagcccttcatcaaccgggagatcaccaactaccgggcccggcaccagaagtgcaacttccgcatcttctacaacaagcacatgctggacatggatgacctggccaccctggatggccagaactggctgaatgaccaggtgatcaacatgtatggagagctgatcatggatgctgtgcctgacaaggtgcacttcttcaacagcttcttccaccggcagctggtgaccaagggctacaacggggtgaagcgctggaccaagaaggtggacctcttcaagaagagcctgctgctgatccccatccacctggaggtgcactggagcctcatcaccgtgaccctgagcaaccgcatcatctccttctatgacagccagggcatccacttcaagttctgtgtggagaacatcaggaagtacctgctgacagaggcccgggagaagaacagacctgagttcctgcagggctggcagacagctgtgaccaagtgcatcccccagcagaagaatgacagcgactgtggggtgtttgtgctgcagtactgcaagtgcctggccctggagcagcccttccagttcagccaggaggacatgccccgggtgaggaagaggatctacaaggagctgtgtgagtgccgcctgatggactag

SEQ ID NO: 171971 - DNA, 3318 bp, synthetic construct
  misc_feature 1..3318: note = Description of Artificial Sequence: Synthetic coding sequence
  source 1..3318: mol_type = other DNA
atggctgctgggaagagcggcggcagcgctggggagatcaccttcctggaggccctggcccggtctgagagcaagagagatggcggcttcaagaacaactggagctttgaccacgaggaggagagcgagggggacacagacaaggatggcaccaacctgctgtctgtggatgaagatgaggacagcgagaccagcaagggcaagaagctgaacagaagaagtgagatcgtggccaacagcagtggagagttcatcctgaagacctacgtgagaagaaacaagtctgagagcttcaagaccctgaagggcaaccccatcggcctgaacatgctgagcaacaacaagaagctgtctgagaacacccagaacaccagcctgtgcagcggcaccgtggtgcatggaagacgcttccaccacgcccacgcccagatccctgtggtgaagacagctgcccagaggaaggagtacccacctcatgtgcagaaggtggagatcaaccctgtgcggctgagccggctgcagggcgtggagcgcatcatgaagaagacagaggagagcgagagccaggtggagcctgagatcaagaggaaggtgcagcagaagaggcactgcagcacctaccagcccaccccacccctgagccctgccagcaagaagtgcctgacccacctggaggacctgcagaggaactgccggcaggccatcaccctgaatgaaagcacaggccccctgctgcggaccagcatccaccagaacagcggcggccagaagagccagaacacaggcctgaccaccaagaagttctacggcaacaacgtggagaaggtgcccatcgacatcatcgtgaactgtgatgacagcaagcacacctacctgcagaccaacgggaaggtgatcctgcccggggccaagatccccaagatcaccaacctgaaggagaggaagaccagcctgagtgacctgaatgaccccatcatcctgagcagtgatgatgatgatgacaatgacaggaccaacagaagagagagcatcagcccccagcctgctgacagcgcctgcagcagccctgcccccagcacaggcaaggtggaggccgccctgaatgaaaacacctgcagagctgagcgggagctgcggagcatcccagaagattctgagctgaacacagtgaccctgcccaggaaggccaggatgaaggaccagtttggaaacagcatcatcaacacccccctgaagaggaggaaggtgttcagccaggagcccccagatgccctggccctgagctgccagagcagctttgattctgtcatcctgaactgccgcagcatccgggtgggcaccctcttccggctgctgattgagcctgtgatcttctgcctggacttcatcaagatccagctggatgagccagaccatgaccctgtggagatcatcctgaacaccagtgacctgaccaagtgtgagtggtgcaatgtgaggaagctgcctgtggtgttcctgcaggccatcccagctgtgtaccagaagctgagcatccagctgcagatgaacaaggaggacaaggtgtggaatgactgcaagggcgtgaacaagctgaccaacctggaggagcagtacatcatcctgatcttccagaatggcctggaccccccagccaacatggtgtttgagagcatcatcaatgaaattggcatcaagaacaacatcagcaacttctttgccaagatcccctttgaggaggccaacggccgcctggtggcctgcaccaggacctatgaggagagcatcaagggcagctgtggccagaaggagaacaagatcaagacagtgtcctttgagagcaagatccagctgcggagcaagcaggagttccagttctttgatgaggaggaggagactggagagaaccacaccatcttcatcggccctgtggagaagctgattgtgtacccacctcctccagccaagggcggcatctctgtgaccaatgaagacctgcactgcctgaatgaaggagagttcctgaatgatgtgatcatcgacttctacctgaagtacctggtgctggagaagctgaagaaggaggatgctgaccgcatccacatcttcagcagcttcttctacaagaggctgaaccagcgggagaggagaaatcatgagaccaccaacctgagcatccagcagaagagacatggccgggtgaagacctggaccaggcatgtggacatctttgagaaggacttcatctttgtgcccctgaatgaggccgcccactggttcctggccgtggtgtgcttccctggcctggagaagcccaagtatgagcccaacccccactaccatgaaaatgctgtgatccagaagtgcagcacagtggaggacagctgcatcagcagcagcgccagcgagatggagagctgcagccagaacagcagcgccaagcctgtgatcaagaagatgctgaacaagaagcactgcatcgccgtcatcgacagcaaccctggccaggaggagagtgacccccgctacaagaggaacatctgcagcgtgaagtacagcgtgaagaagatcaaccacacagcctctgaaaatgaggagttcaacaagggggagagcaccagccagaaggtggccgacaggaccaagtcagaaaatggcctgcagaatgaaagcctgagcagcacccaccacacagatggcctgagcaagatccggctgaactacagtgatgagagccctgaggccggcaagatgctggaggatgagctggtggacttcagcgaggaccaggacaaccaggatgacagcagtgatgatggcttcctggctgatgacaactgcagcagcgagatcggccagtggcacctgaagcccaccatctgcaagcagccctgcatcctgctgatggacagcctgcggggccccagccgcagcaatgtggtgaagatcctgcgggagtacctggaggtggagtgggaggtgaagaagggcagcaagaggagcttcagcaaggatgtgatgaagggcagcaaccccaaggtgccccagcagaacaacttcagtgactgtggggtgtatgtgctgcagtatgtggagagcttctttgagaaccccatcctgagctttgagctgcccatgaacctggccaactggttccccccacccaggatgaggaccaagcgggaggagatccggaacatcatcctgaagctgcaggaggaccagagcaaggagaagaggaagcacaaggacacctacagcacagaggcccccctgggggagggcacagagcagtatgtgaacagcatcagtgactag

SEQ ID NO: 171972 - DNA, 3339 bp, synthetic construct
  misc_feature 1..3339: note = Description of Artificial Sequence: Synthetic coding sequence
  source 1..3339: mol_type = other DNA
atggctgctgggaagagcggcggcagcgctggggagatcaccttcctggaggccctggcccggtctgagagcaagagagatggcggcttcaagaacaactggagctttgaccacgaggaggagagcgagggggacacagacaaggatggcaccaacctgctgtctgtggatgaagatgaggacagcgagaccagcaagggcaagaagctgaacagaagaagtgagatcgtggccaacagcagtggagagttcatcctgaagacctacgtgagaagaaacaagtctgagagcttcaagaccctgaagggcaaccccatcggcctgaacatgctgagcaacaacaagaagctgtctgagaacacccagaacaccagcctgtgcagcggcaccgtggtgcatggaagacgcttccaccacgcccacgcccagatccctgtggtgaagacagctgcccagaggctgctgagcaaccagatcctgaaggagtacccaccccacgtgcagaaggtggagatcaaccctgtgcggctgagccggctgcagggcgtggagcgcatcatgaagaagacagaggagagcgagagccaggtggagcctgagatcaagaggaaggtgcagcagaagaggcactgcagcacctaccagcccaccccacccctgagccctgccagcaagaagtgcctgacccacctggaggacctgcagaggaactgccggcaggccatcaccctgaatgaaagcacaggccccctgctgcggaccagcatccaccagaacagcggcggccagaagagccagaacacaggcctgaccaccaagaagttctacggcaacaacgtggagaaggtgcccatcgacatcatcgtgaactgtgatgacagcaagcacacctacctgcagaccaacgggaaggtgatcctgcccggggccaagatccccaagatcaccaacctgaaggagaggaagaccagcctgagtgacctgaatgaccccatcatcctgagcagtgatgatgatgatgacaatgacaggaccaacagaagagagagcatcagcccccagcctgctgacagcgcctgcagcagccctgcccccagcacaggcaaggtggaggccgccctgaatgaaaacacctgcagagctgagcgggagctgcggagcatccctgaggacagcgagctgaacacagtgaccctgcccaggaaggccaggatgaaggaccagtttggaaacagcatcatcaacacccccctgaagaggaggaaggtgttcagccaggagcccccagatgccctggccctgagctgccagagcagctttgacagcgtcatcctgaactgccgcagcatccgggtgggcaccctcttccggctgctgattgagcccgtcatcttctgcctggacttcatcaagatccagctggatgagccagaccatgaccctgtggagatcatcctgaacaccagtgacctgaccaagtgtgagtggtgcaatgtgaggaagctgcctgtggtgttcctgcaggccatcccagctgtgtaccagaagctgagcatccagctgcagatgaacaaggaggacaaggtgtggaatgactgcaagggcgtgaacaagctgaccaacctggaggagcagtacatcatcctgatcttccagaatggcctggaccccccagccaacatggtgtttgagagcatcatcaatgagatcggcatcaagaacaacatcagcaacttctttgccaagatcccctttgaggaggccaacggccgcctggtggcctgcaccaggacctatgaggagagcatcaagggcagctgtggccagaaggagaacaagatcaagacagtgtcctttgagagcaagatccagctgcggagcaagcaggagttccagttctttgatgaggaggaggagaccggggagaaccacaccatcttcatcggccctgtggagaagctgattgtgtacccacctcctccagccaagggcggcatctctgtgaccaatgaagacctgcactgcctgaatgaaggagagttcctgaatgatgtgatcatcgacttctacctgaagtacctggtgctggagaagctgaagaaggaggatgctgaccgcatccacatcttcagcagcttcttctacaagaggctgaaccagcgggagaggaggaaccacgagaccaccaacctgagcatccagcagaagagacatggccgggtgaagacctggaccaggcatgtggacatctttgagaaggacttcatctttgtgcccctgaatgaagctgcccactggttcctggccgtggtgtgcttccctggcctggagaagcccaagtatgagcccaacccccactaccatgaaaatgctgtgatccagaagtgcagcacagtggaggacagctgcatcagcagcagcgccagcgagatggagagctgcagccagaacagcagcgccaagcctgtgatcaagaagatgctgaacaagaagcactgcatcgctgtgattgacagcaaccctggccaggaggagagtgacccccgctacaagaggaacatctgcagcgtgaagtacagcgtgaagaagatcaaccacacagcctctgaaaatgaggagttcaacaagggggagagcaccagccagaaggtggccgacaggaccaagtcagaaaatggcctgcagaatgaaagcctgagcagcacccaccacacagatggcctgagcaagatccggctgaactacagtgatgagagccctgaggccggcaagatgctggaggatgagctggtggacttcagcgaggaccaggacaaccaggatgacagcagtgatgatggcttcctggctgatgacaactgcagcagcgagatcggccagtggcacctgaagcccaccatctgcaagcagccctgcatcctgctgatggacagcctgcggggccccagccgcagcaatgtggtgaagatcctgcgggagtacctggaggtggagtgggaggtgaagaagggcagcaagaggagcttcagcaaggatgtgatgaagggcagcaaccccaaggtgccccagcagaacaacttcagtgactgtggggtgtatgtgctgcagtatgtggagagcttctttgagaaccccatcctgagctttgagctgcccatgaacctggccaactggttccccccacccaggatgaggaccaagcgggaggagatccggaacatcatcctgaagctgcaggaggaccagagcaaggagaagaggaagcacaaggacacctacagcacagaggcccccctgggggagggcacagagcagtatgtgaacagcatcagtgactag

SEQ ID NO: 171973 - DNA, 3339 bp, synthetic construct
  misc_feature 1..3339: note = Description of Artificial Sequence: Synthetic coding sequence
  source 1..3339: mol_type = other DNA
atggctgctgggaagagcggcggcagcgctggggagatcaccttcctggaggccctggcccggtctgagagcaagagagatggcggcttcaagaacaactggagctttgaccacgaggaggagagcgagggggacacagacaaggatggcaccaacctgctgtctgtggatgaagatgaggacagcgagaccagcaagggcaagaagctgaacagaagaagtgagatcgtggccaacagcagtggagagttcatcctgaagacctacgtgagaagaaacaagtctgagagcttcaagaccctgaagggcaaccccatcggcctgaacatgctgagcaacaacaagaagctgtctgagaacacccagaacaccagcctgtgcagcggcaccgtggtgcatggaagacgcttccaccacgcccacgcccagatccctgtggtgaagacagctgcccagagcagcctggacaggaaggagaggaaggagtacccaccccacgtgcagaaggtggagatcaaccctgtgcggctgagccggctgcagggcgtggagcgcatcatgaagaagacagaggagagcgagagccaggtggagcctgagatcaagaggaaggtgcagcagaagaggcactgcagcacctaccagcccaccccacccctgagccctgccagcaagaagtgcctgacccacctggaggacctgcagaggaactgccggcaggccatcaccctgaatgaaagcacaggccccctgctgcggaccagcatccaccagaacagcggcggccagaagagccagaacacaggcctgaccaccaagaagttctacggcaacaacgtggagaaggtgcccatcgacatcatcgtgaactgtgatgacagcaagcacacctacctgcagaccaacgggaaggtgatcctgcccggggccaagatccccaagatcaccaacctgaaggagaggaagaccagcctgagtgacctgaatgaccccatcatcctgagcagtgatgatgatgatgacaatgacaggaccaacagaagagagagcatcagcccccagcctgctgacagcgcctgcagcagccctgcccccagcacaggcaaggtggaggccgccctgaatgaaaacacctgcagagctgagcgggagctgcggagcatccctgaggacagcgagctgaacacagtgaccctgcccaggaaggccaggatgaaggaccagtttggaaacagcatcatcaacacccccctgaagaggaggaaggtgttcagccaggagcccccagatgccctggccctgagctgccagagcagctttgacagcgtcatcctgaactgccgcagcatccgggtgggcaccctcttccggctgctgattgagcccgtcatcttctgcctggacttcatcaagatccagctggatgagccagaccatgaccctgtggagatcatcctgaacaccagtgacctgaccaagtgtgagtggtgcaatgtgaggaagctgcctgtggtgttcctgcaggccatcccagctgtgtaccagaagctgagcatccagctgcagatgaacaaggaggacaaggtgtggaatgactgcaagggcgtgaacaagctgaccaacctggaggagcagtacatcatcctgatcttccagaatggcctggaccccccagccaacatggtgtttgagagcatcatcaatgagatcggcatcaagaacaacatcagcaacttctttgccaagatcccctttgaggaggccaacggccgcctggtggcctgcaccaggacctatgaggagagcatcaagggcagctgtggccagaaggagaacaagatcaagacagtgtcctttgagagcaagatccagctgcggagcaagcaggagttccagttctttgatgaggaggaggagaccggggagaaccacaccatcttcatcggccctgtggagaagctgattgtgtacccacctcctccagccaagggcggcatctctgtgaccaatgaagacctgcactgcctgaatgaaggagagttcctgaatgatgtgatcatcgacttctacctgaagtacctggtgctggagaagctgaagaaggaggatgctgaccgcatccacatcttcagcagcttcttctacaagaggctgaaccagcgggagaggaggaaccacgagaccaccaacctgagcatccagcagaagagacatggccgggtgaagacctggaccaggcatgtggacatctttgagaaggacttcatctttgtgcccctgaatgaagctgcccactggttcctggccgtggtgtgcttccctggcctggagaagcccaagtatgagcccaacccccactaccatgaaaatgctgtgatccagaagtgcagcacagtggaggacagctgcatcagcagcagcgccagcgagatggagagctgcagccagaacagcagcgccaagcctgtgatcaagaagatgctgaacaagaagcactgcatcgctgtgattgacagcaaccctggccaggaggagagtgacccccgctacaagaggaacatctgcagcgtgaagtacagcgtgaagaagatcaaccacacagcctctgaaaatgaggagttcaacaagggggagagcaccagccagaaggtggccgacaggaccaagtcagaaaatggcctgcagaatgaaagcctgagcagcacccaccacacagatggcctgagcaagatccggctgaactacagtgatgagagccctgaggccggcaagatgctggaggatgagctggtggacttcagcgaggaccaggacaaccaggatgacagcagtgatgatggcttcctggctgatgacaactgcagcagcgagatcggccagtggcacctgaagcccaccatctgcaagcagccctgcatcctgctgatggacagcctgcggggccccagccgcagcaatgtggtgaagatcctgcgggagtacctggaggtggagtgggaggtgaagaagggcagcaagaggagcttcagcaaggatgtgatgaagggcagcaaccccaaggtgccccagcagaacaacttcagtgactgtggggtgtatgtgctgcagtatgtggagagcttctttgagaaccccatcctgagctttgagctgcccatgaacctggccaactggttccccccacccaggatgaggaccaagcgggaggagatccggaacatcatcctgaagctgcaggaggaccagagcaaggagaagaggaagcacaaggacacctacagcacagaggcccccctgggggagggcacagagcagtatgtgaacagcatcagtgactag

SEQ ID NO: 171974 - DNA, 1074 bp, synthetic construct
  misc_feature 1..1074: note = Description of Artificial Sequence: Synthetic coding sequence
  source 1..1074: mol_type = other DNA
atggctgctgggaagagcggcggcagcgctggggagatcaccttcctggaggccctggcccggtctgagagcaagagagatggcggcttcaagaacaactggagctttgaccacgaggaggagagcgagggggacacagacaaggatggcaccaacctgctgtctgtggatgaagatgaggacagcgagaccagcaagggcaagaagctgaacagaagaagtgagatcgtggccaacagcagtggagagttcatcctgaagacctacgtgagaagaaacaagtctgagagcttcaagaccctgaagggcaaccccatcggcctgaacatgctgagcaacaacaagaagctgtctgagaacacccagaacaccagcctgtgcagcggcaccgtggtgcatggaagacgcttccaccacgcccacgcccagatccctgtggtgaagacagctgcccagagcaaccagatcctgaaggagtacccacctcatgtgcagaaggtggagatcaaccctgtgcggctgagccggctgcagggcgtggtgatcctgagcagtgatgatgatgatgacaatgacaggaccaacagaagagagagcatcagcccccagcctgctgacagcgcctgcagcagccctgcccccagcacaggcaaggtggaggccgccctgaatgaaaacacctgcagagctgagcgggagctgcggagcatcccagaagattctgagctgaacacagtgaccctgcccaggaaggccaggatgaaggaccagtttggaaacagcatcatcaacacccccctgaagaggaggaaggtgttcagccaggagcccccagatgccctggccctgagctgccagagcagctttgattctgtcatcctgaactgccgcagcatccgggtgggcaccctcttccggctgctgattgagcctgtgattgtcatcatcaagatcttcttcatcacccacaagaagccagaccatgaccctgtggagatcatcctgaacaccagtgacctgaccaagtgtgagtggtgcaatgtgaggaagctgcctgtggtgttcctgcagtag

SEQ ID NO: 171975 - DNA, 1107 bp, synthetic construct
  misc_feature 1..1107: note = Description of Artificial Sequence: Synthetic coding sequence
  source 1..1107: mol_type = other DNA
atgaaggaccagtttggaaacagcatcatcaacacccccctgaagaggaggaaggtgttcagccaggagcccccagatgccctggccctgagctgccagagcagctttgacagcgtcatcctgaactgccgcagcatccgggtgggcaccctcttccggctgctgattgagcccgtcatcttctgcctggacttcatcaagatccagctggatgagccagaccatgaccctgtggagatcatcctgaacaccagtgacctgaccaagtgtgagtggtgcaatgtgaggaagctgcctgtggtgttcctgcaggccatcccagctgtgtaccagaagctgagcatccagctgcagatgaacaaggaggacaaggtgtggaatgactgcaagggcgtgaacaagctgaccaacctggaggagcagtacatcatcctgatcttccagaatggcctggaccccccagccaacatggtgtttgagagcatcatcaatgagatcggcatcaagaacaacatcagcaacttctttgccaagatcccctttgaggaggccaacggccgcctggtggcctgcaccaggacctatgaggagagcatcaagggcagctgtggccagaaggagaacaagatcaagacagtgtcctttgagagcaagatccagctgcggagcaagcaggagttccagttctttgatgaggaggaggagaccggggagaaccacaccatcttcatcggccctgtggagaagctgattgtgtacccacctcctccagccaagggcggcatctctgtgaccaatgaagacctgcactgcctgaatgaaggagagttcctgaatgatgtgatcatcgacttctacctgaagtacctggtgctggagaagctgaagaaggaggatgctgaccgcatccacatcttcagcagcttcttctacaagaggctgaaccagcgggagaggaggaaccacgagaccaccaacctgagcatccagcagaagagacatggccgggtgaagacctggaccaggcatgtggacatctttgagaaggacttcatctttgtgcccctgaatgaggcctggctgaagcagaaccagaccaagctgtag

SEQ ID NO: 171976 - DNA, 2955 bp, synthetic construct
  misc_feature 1..2955: note = Description of Artificial Sequence: Synthetic coding sequence
  source 1..2955: mol_type = other DNA
atggacaagaggaagctgggccggcggcccagcagcagcgagatcatcacagagggcaagaggaagaagagcagcagtgacctgtctgagatcaggaagatgctgaatgccaagccagaagatgtgcacgtgcagagccccctgagcaagttccgcagcagcgagcgctggaccctgcccctgcagtgggagaggagcctgaggaacaaggtgatcagcctggaccacaagaacaagaagcacatccggggctgccctgtgaccagcaagagcagccctgagcgcatccccagggtcatcctgaccaacgtgctgggcacagagctgggcaggaagtacatccgcaccccacctgtgacagagggcagcctgagtgacacagacaacctgcagagcgagcagctgagcagcagcagtgatggcagcctggagagctaccagaacctgaacccccacaagagctgctacctgtctgagcggggcagccagaggagcaagacagtggatgacaacagcgccaagcagacagcccacaacaaggagaagaggaggaaggatgatggcatcagcctgctgatcagtgacacccagcctgaggacctgaacagcggcagccggggctgtgaccacctggagcaggagagcaggaacaaggatgtgaagtacagcgacagcaaggtggagctgaccctcatcagcaggaagaccaagaggcggctgaggaacaacctgcctgacagccagtactgcaccagcctggacaagagcacagagcagaccaagaagcaggaggatgacagcaccatcagcacagaatttgagaagcccagcgagaactaccaccaggaccccaagctgcctgaggagatcaccaccaagcccaccaagagtgacttcaccaagctgagcagcctgaacagccaggagctgaccctgagcaatgccaccaagagcgccagcgctggcagcaccacagaaacagtggagaacagcaacagcattgacatcgtgggcatcagcagcctggtggagaaggatgaaaatgagctgaacaccatcgagaagcccatcctgcggggccacaatgaaggcaaccagagcctcatctctgctgagcccatcgtggtgtccagtgatgaggagggccctgtggagcacaagagcagcgagatcctgaagctgcagagcaagcaggaccgggagaccaccaatgaaaatgaaagcaccagcgagagcgccctgctggagctgcccctcatcacctgtgagagcgtgcagatgagcagcgagctgtgcccctacaaccctgtgatggagaacatcagcagcatcatgcccagcaatgagatggacctgcagctggacttcatcttcacctctgtgtacatcggcaagatcaagggggccagcaagggctgtgtgaccatcaccaagaagtacatcaagatccccttccaggtgtccctgaatgagatcagcctgctggtggacaccacccacctgaagcgcttcggcctgtggaagagcaaggatgacaaccacagcaagaggagccacgccatcctcttcttctgggtgtccagtgactacctgcaggagatccagacccagctggagcacagcgtgctgagccagcagagcaagagcagcgagttcatcttcctggagctgcacaaccctgtgtcccagcgggaggagctgaagctgaaggacatcatgacagagatcagcatcatcagcggggagctggagctgagctaccccctgtcctgggtgcaggccttccccctcttccagaacctgagcagcaaggagagcagcttcatccactactactgtgtgtccacctgcagcttccctgctggggtggccgtggccgaggagatgaagctgaagtctgtgtcccagcccagcaacacagatgctgccaagcccacctacaccttcctgcagaagcagagcagcggctgctacagcctgagcatcaccagcaacccagatgaggagtggagggaggtgcgccacacaggcctggtgcagaagctgattgtgtacccacctccacccaccaagggcggcctgggcgtgaccaatgaagacctggagtgcctggaggagggggagttcctgaatgatgtgatcatcgacttctacctgaagtacctgatcctggagaaggccagtgatgagctggtggagaggagccacatcttcagcagcttcttctacaagtgcctgaccaggaaggagaacaacctgacagaggacaaccccaacctgtccatggcccagaggaggcacaagagggtgaggacctggaccaggcacatcaacatcttcaacaaggactacatctttgtgcctgtgaatgaaagcagccactggtacctggccgtcatctgcttcccctggctggaggaggccgtgtatgaggacttcccccagacagtgtcccagcagagccaggcccagcagagccagaatgacaacaagaccatcgacaatgacctgcggaccaccagcaccctgagcctgtctgctgaggacagccagagcacagagagcaacatgtctgtgcccaagaagatgtgcaagaggccctgcatcctgatcctggacagcctgaaggccgcctctgtgcagaacacagtgcagaacctgcgggagtacctggaggtggagtgggaggtgaagctgaagacccaccggcagttcagcaagaccaacatggtggacctgtgccccaaggtgcccaagcaggacaacagcagtgactgtggggtgtacctgctgcagtatgtggagagcttcttcaaggaccccatcgtgaactttgagctgcccatccacctggagaagtggttccccaggcatgtgatcaagaccaagcgggaggacatccgggagctgatcctgaagctgcacctgcagcagcagaagggcagcagcagctag

SEQ ID NO: 171977 - DNA, 3054 bp, synthetic construct
  misc_feature 1..3054: note = Description of Artificial Sequence: Synthetic coding sequence
  source 1..3054: mol_type = other DNA
atgctgaatgccaagccagaagatgtgcacgtgcagagccccctgagcaagttccgcagcagcgagcgctggaccctgcccctgcagtgggagaggagcctgaggaacaaggtgatcagcctggaccacaagaacaagaagcacatccggggctgccctgtgaccagcaagagcagccctgagcggcagctgaaggtgatgctgaccaacgtgctgtggacagacctgggcaggaagttcaggaagaccctgcccagaaatgatgccaacctgtgtgatgccaacaaggtgcagagcgacagcctgcccagcacctctgtggacagcctggagacctgccagaagctggagcccctgcggcagagcctgaacctgtctgagcgcatccccagggtcatcctgaccaacgtgctgggcacagagctgggcaggaagtacatccgcaccccacctgtgacagagggcagcctgagtgacacagacaacctgcagagcgagcagctgagcagcagcagtgatggcagcctggagagctaccagaacctgaacccccacaagagctgctacctgtctgagcggggcagccagaggagcaagacagtggatgacaacagcgccaagcagacagcccacaacaaggagaagaggaggaaggatgatggcatcagcctgctgatcagtgacacccagcctgaggacctgaacagcggcagccggggctgtgaccacctggagcaggagagcaggaacaaggatgtgaagtacagcgacagcaaggtggagctgaccctcatcagcaggaagaccaagaggcggctgaggaacaacctgcctgacagccagtactgcaccagcctggacaagagcacagagcagaccaagaagcaggaggatgacagcaccatcagcacagaatttgagaagcccagcgagaactaccaccaggaccccaagctgcctgaggagatcaccaccaagcccaccaagagtgacttcaccaagctgagcagcctgaacagccaggagctgaccctgagcaatgccaccaagagcgccagcgctggcagcaccacagagaccgtggagaacagcaacagcattgatattgtgggcatcagcagcctggtggagaaggatgaaaatgagctgaacaccatcgagaagcccatcctgcggggccacaatgaaggcaaccagagcctcatctctgctgagcccatcgtggtgtccagtgatgaggagggccctgtggagcacaagagcagcgagatcctgaagctgcagagcaagcaggaccgggagaccaccaatgaaaatgaaagcaccagcgagagcgccctgctggagctgcccctcatcacctgtgagagcgtgcagatgagcagcgagctgtgcccctacaaccctgtgatggagaacatcagcagcatcatgcccagcaatgagatggacctgcagctggacttcatcttcacctctgtgtacatcggcaagatcaagggggccagcaagggctgtgtgaccatcaccaagaagtacatcaagatccccttccaggtgtccctgaatgagatcagcctgctggtggacaccacccacctgaagagatttggcctgtggaagagcaaggatgacaaccacagcaagaggagccacgccatcctcttcttctgggtgtccagtgactacctgcaggagatccagacccagctggagcacagcgtgctgagccagcagagcaagagcagcgagttcatcttcctggagctgcacaaccctgtgtcccagcgggaggagctgaagctgaaggacatcatgacagagatcagcatcatctctggagagctggagctgagctaccccctgtcctgggtgcaggccttccccctcttccagaacctgagcagcaaggagagcagcttcatccactactactgtgtgtccacctgcagcttccctgctggggtggccgtggccgaggagatgaagctgaagtctgtgtcccagcccagcaacacagatgctgccaagcccacctacaccttcctgcagaagcagagcagcggctgctacagcctgagcatcaccagcaacccagatgaggagtggagggaggtgcgccacacaggcctggtgcagaagctgattgtgtacccacctccacccaccaagggcggcctgggcgtgaccaatgaagacctggagtgcctggaggagggggagttcctgaatgatgtgatcatcgacttctacctgaagtacctgatcctggagaaggccagtgatgagctggtggagaggagccacatcttcagcagcttcttctacaagtgcctgaccaggaaagaaaacaacctgacagaggacaaccccaacctgtccatggcccagaggaggcacaagagggtgaggacctggaccaggcacatcaacatcttcaacaaggactacatctttgtgcctgtgaatgaaagcagccactggtacctggccgtcatctgcttcccctggctggaggaggccgtgtatgaggacttcccccagacagtgtcccagcagagccaggcccagcagagccagaatgacaacaagaccatcgacaatgacctgcggaccaccagcaccctgagcctgtctgctgaggacagccagagcacagagagcaacatgtctgtgcccaagaagatgtgcaagaggccctgcatcctgatcctggacagcctgaaggccgcctctgtgcagaacacagtgcagaacctgcgggagtacctggaggtggagtgggaggtgaagctgaagacccaccggcagttcagcaagaccaacatggtggacctgtgccccaaggtgcccaagcaggacaacagcagtgactgtggggtgtacctgctgcagtatgtggagagcttcttcaaggaccccatcgtgaactttgagctgcccatccacctggagaagtggttccccaggcatgtgatcaagaccaagcgggaggacatccgggagctgatcctgaagctgcacctgcagcagcagaagggcagcagcagctag

SEQ ID NO: 171978 - DNA, 2661 bp, synthetic construct
  misc_feature 1..2661: note = Description of Artificial Sequence: Synthetic coding sequence
  source 1..2661: mol_type = other DNA
atgctgaatgccaagccagaagatgtgcacgtgcagagccccctgagcaagttccgcagcagcgagcgctggaccctgcccctgcagtgggagaggagcctgaggaacaaggtgatcagcctggaccacaagaacaagaagcacatccggggctgccctgtgaccagcaagagcagccctgagcggggcagccagaggagcaagacagtggatgacaacagcgccaagcagacagcccacaacaaggagaagaggaggaaggatgatggcatcagcctgctgatcagtgacacccagcctgaggacctgaacagcggcagccggggctgtgaccacctggagcaggagagcaggaacaaggatgtgaagtacagcgacagcaaggtggagctgaccctcatcagcaggaagaccaagaggcggctgaggaacaacctgcctgacagccagtactgcaccagcctggacaagagcacagagcagaccaagaagcaggaggatgacagcaccatcagcacagaatttgagaagcccagcgagaactaccaccaggaccccaagctgcctgaggagatcaccaccaagcccaccaagagtgacttcaccaagctgagcagcctgaacagccaggagctgaccctgagcaatgccaccaagagcgccagcgctggcagcaccacagaaacagtggagaacagcaacagcattgacatcgtgggcatcagcagcctggtggagaaggatgaaaatgagctgaacaccatcgagaagcccatcctgcggggccacaatgaaggcaaccagagcctcatctctgctgagcccatcgtggtgtccagtgatgaggagggccctgtggagcacaagagcagcgagatcctgaagctgcagagcaagcaggaccgggagaccaccaatgaaaatgaaagcaccagcgagagcgccctgctggagctgcccctcatcacctgtgagagcgtgcagatgagcagcgagctgtgcccctacaaccctgtgatggagaacatcagcagcatcatgcccagcaatgagatggacctgcagctggacttcatcttcacctctgtgtacatcggcaagatcaagggggccagcaagggctgtgtgaccatcaccaagaagtacatcaagatccccttccaggtgtccctgaatgagatcagcctgctggtggacaccacccacctgaagcgcttcggcctgtggaagagcaaggatgacaaccacagcaagaggagccacgccatcctcttcttctgggtgtccagtgactacctgcaggagatccagacccagctggagcacagcgtgctgagccagcagagcaagagcagcgagttcatcttcctggagctgcacaaccctgtgtcccagcgggaggagctgaagctgaaggacatcatgacagagatcagcatcatcagcggggagctggagctgagctaccccctgtcctgggtgcaggccttccccctcttccagaacctgagcagcaaggagagcagcttcatccactactactgtgtgtccacctgcagcttccctgctggggtggccgtggccgaggagatgaagctgaagtctgtgtcccagcccagcaacacagatgctgccaagcccacctacaccttcctgcagaagcagagcagcggctgctacagcctgagcatcaccagcaacccagatgaggagtggagggaggtgcgccacacaggcctggtgcagaagctgattgtgtacccacctccacccaccaagggcggcctgggcgtgaccaatgaagacctggagtgcctggaggagggggagttcctgaatgatgtgatcatcgacttctacctgaagtacctgatcctggagaaggccagtgatgagctggtggagaggagccacatcttcagcagcttcttctacaagtgcctgaccaggaaggagaacaacctgacagaggacaaccccaacctgtccatggcccagaggaggcacaagagggtgaggacctggaccaggcacatcaacatcttcaacaaggactacatctttgtgcctgtgaatgaaagcagccactggtacctggccgtcatctgcttcccctggctggaggaggccgtgtatgaggacttcccccagacagtgtcccagcagagccaggcccagcagagccagaatgacaacaagaccatcgacaatgacctgcggaccaccagcaccctgagcctgtctgctgaggacagccagagcacagagagcaacatgtctgtgcccaagaagatgtgcaagaggccctgcatcctgatcctggacagcctgaaggccgcctctgtgcagaacacagtgcagaacctgcgggagtacctggaggtggagtgggaggtgaagctgaagacccaccggcagttcagcaagaccaacatggtggacctgtgccccaaggtgcccaagcaggacaacagcagtgactgtggggtgtacctgctgcagtatgtggagagcttcttcaaggaccccatcgtgaactttgagctgcccatccacctggagaagtggttccccaggcatgtgatcaagaccaagcgggaggacatccgggagctgatcctgaagctgcacctgcagcagcagaagggcagcagcagctag

SEQ ID NO: 171979 - DNA, 717 bp, synthetic construct
  misc_feature 1..717: note = Description of Artificial Sequence: Synthetic coding sequence
  source 1..717: mol_type = other DNA
atgaagaagttcctgtacatcaagtctgtgttccacaccctgaggatggcccagaggaggcacaagagggtgaggacctggaccaggcacatcaacatcttcaacaaggactacatctttgtgcctgtgaatgaaagcagccactggtacctggccgtcatctgcttcccctggctggaggaggccgtgtatgaggacttcccccagacagtgtcccagcagagccaggcccagcagagccagaatgacaacaagaccatcgacaatgacctgcggaccaccagcaccctgagcctgtctgctgaggacagccagagcacagagagcaacatgtctgtgcccaagaagatgtgcaagaggccctgcatcctgatcctggacagcctgaaggccgcctctgtgcagaacacagtgcagaacctgcgggagtacctggaggtggagtgggaggtgaagctgaagacccaccggcagttcagcaagaccaacatggtggacctgtgccccaaggtgcccaagcaggacaacagcagtgactgtggggtgtacctgctgcagtatgtggagagcttcttcaaggaccccatcgtgaactttgagctgcccatccacctggagaagtggttccccaggcatgtgatcaagaccaagcgggaggacatccgggagctgatcctgaagctgcacctgcagcagcagaagggcagcagcagctag

SEQ ID NO: 171980 - DNA, 2958 bp, synthetic construct
  misc_feature 1..2958: note = Description of Artificial Sequence: Synthetic coding sequence
  source 1..2958: mol_type = other DNA
atggacaagaggaagctgggccggcggcccagcagcagcgagatcatcacagagggcaagaggaagaagagcagcagtgacctgtctgagatcaggaagatgctgaatgccaagccagaagatgtgcacgtgcagagccccctgagcaagttccgcagcagcgagcgctggaccctgcccctgcagtgggagaggagcctgaggaacaaggtgatcagcctggaccacaagaacaagaagcacatccggggctgccctgtgaccagcaagagcagccctgagcggcagctgaaggtgatgctgaccaacgtgctgtggacagacctgggcaggaagttcaggaagaccctgcccagaaatgatgccaacctgtgtgatgccaacaaggtgcagagcgacagcctgcccagcacctctgtggacagcctggagacctgccagaagctggagcccctgcggcagagcctgaacctgtctgagcggggcagccagaggagcaagacagtggatgacaacagcgccaagcagacagcccacaacaaggagaagaggaggaaggatgatggcatcagcctgctgatcagtgacacccagcctgaggacctgaacagcggcagccggggctgtgaccacctggagcaggagagcaggaacaaggatgtgaagtacagcgacagcaaggtggagctgaccctcatcagcaggaagaccaagaggcggctgaggaacaacctgcctgacagccagtactgcaccagcctggacaagagcacagagcagaccaagaagcaggaggatgacagcaccatcagcacagaatttgagaagcccagcgagaactaccaccaggaccccaagctgcctgaggagatcaccaccaagcccaccaagagtgacttcaccaagctgagcagcctgaacagccaggagctgaccctgagcaatgccaccaagagcgccagcgctggcagcaccacagagaccgtggagaacagcaacagcattgatattgtgggcatcagcagcctggtggagaaggatgaaaatgagctgaacaccatcgagaagcccatcctgcggggccacaatgaaggcaaccagagcctcatctctgctgagcccatcgtggtgtccagtgatgaggagggccctgtggagcacaagagcagcgagatcctgaagctgcagagcaagcaggaccgggagaccaccaatgaaaatgaaagcaccagcgagagcgccctgctggagctgcccctcatcacctgtgagagcgtgcagatgagcagcgagctgtgcccctacaaccctgtgatggagaacatcagcagcatcatgcccagcaatgagatggacctgcagctggacttcatcttcacctctgtgtacatcggcaagatcaagggggccagcaagggctgtgtgaccatcaccaagaagtacatcaagatccccttccaggtgtccctgaatgagatcagcctgctggtggacaccacccacctgaagagatttggcctgtggaagagcaaggatgacaaccacagcaagaggagccacgccatcctcttcttctgggtgtccagtgactacctgcaggagatccagacccagctggagcacagcgtgctgagccagcagagcaagagcagcgagttcatcttcctggagctgcacaaccctgtgtcccagcgggaggagctgaagctgaaggacatcatgacagagatcagcatcatctctggagagctggagctgagctaccccctgtcctgggtgcaggccttccccctcttccagaacctgagcagcaaggagagcagcttcatccactactactgtgtgtccacctgcagcttccctgctggggtggccgtggccgaggagatgaagctgaagtctgtgtcccagcccagcaacacagatgctgccaagcccacctacaccttcctgcagaagcagagcagcggctgctacagcctgagcatcaccagcaacccagatgaggagtggagggaggtgcgccacacaggcctggtgcagaagctgattgtgtacccacctccacccaccaagggcggcctgggcgtgaccaatgaagacctggagtgcctggaggagggggagttcctgaatgatgtgatcatcgacttctacctgaagtacctgatcctggagaaggccagtgatgagctggtggagaggagccacatcttcagcagcttcttctacaagtgcctgaccaggaaagaaaacaacctgacagaggacaaccccaacctgtccatggcccagaggaggcacaagagggtgaggacctggaccaggcacatcaacatcttcaacaaggactacatctttgtgcctgtgaatgaaagcagccactggtacctggccgtcatctgcttcccctggctggaggaggccgtgtatgaggacttcccccagacagtgtcccagcagagccaggcccagcagagccagaatgacaacaagaccatcgacaatgacctgcggaccaccagcaccctgagcctgtctgctgaggacagccagagcacagagagcaacatgtctgtgcccaagaagatgtgcaagaggccctgcatcctgatcctggacagcctgaaggccgcctctgtgcagaacacagtgcagaacctgcgggagtacctggaggtggagtgggaggtgaagctgaagacccaccggcagttcagcaagaccaacatggtggacctgtgccccaaggtgcccaagcaggacaacagcagtgactgtggggtgtacctgctgcagtatgtggagagcttcttcaaggaccccatcgtgaactttgagctgcccatccacctggagaagtggttccccaggcatgtgatcaagaccaagcgggaggacatccgggagctgatcctgaagctgcacctgcagcagcagaagggcagcagcagctag

SEQ ID NO: 171981 - DNA, 3153 bp, synthetic construct
  misc_feature 1..3153: note = Description of Artificial Sequence: Synthetic coding sequence
  source 1..3153: mol_type = other DNA
atggacaagaggaagctgggccggcggcccagcagcagcgagatcatcacagagggcaagaggaagaagagcagcagtgacctgtctgagatcaggaagatgctgaatgccaagccagaagatgtgcacgtgcagagccccctgagcaagttccgcagcagcgagcgctggaccctgcccctgcagtgggagaggagcctgaggaacaaggtgatcagcctggaccacaagaacaagaagcacatccggggctgccctgtgaccagcaagagcagccctgagcggcagctgaaggtgatgctgaccaacgtgctgtggacagacctgggcaggaagttcaggaagaccctgcccagaaatgatgccaacctgtgtgatgccaacaaggtgcagagcgacagcctgcccagcacctctgtggacagcctggagacctgccagaagctggagcccctgcggcagagcctgaacctgtctgagcgcatccccagggtcatcctgaccaacgtgctgggcacagagctgggcaggaagtacatccgcaccccacctgtgacagagggcagcctgagtgacacagacaacctgcagagcgagcagctgagcagcagcagtgatggcagcctggagagctaccagaacctgaacccccacaagagctgctacctgtctgagcggggcagccagaggagcaagacagtggatgacaacagcgccaagcagacagcccacaacaaggagaagaggaggaaggatgatggcatcagcctgctgatcagtgacacccagcctgaggacctgaacagcggcagccggggctgtgaccacctggagcaggagagcaggaacaaggatgtgaagtacagcgacagcaaggtggagctgaccctcatcagcaggaagaccaagaggcggctgaggaacaacctgcctgacagccagtactgcaccagcctggacaagagcacagagcagaccaagaagcaggaggatgacagcaccatcagcacagaatttgagaagcccagcgagaactaccaccaggaccccaagctgcctgaggagatcaccaccaagcccaccaagagtgacttcaccaagctgagcagcctgaacagccaggagctgaccctgagcaatgccaccaagagcgccagcgctggcagcaccacagaaacagtggagaacagcaacagcattgacatcgtgggcatcagcagcctggtggagaaggatgaaaatgagctgaacaccatcgagaagcccatcctgcggggccacaatgaaggcaaccagagcctcatctctgctgagcccatcgtggtgtccagtgatgaggagggccctgtggagcacaagagcagcgagatcctgaagctgcagagcaagcaggaccgggagaccaccaatgaaaatgaaagcaccagcgagagcgccctgctggagctgcccctcatcacctgtgagagcgtgcagatgagcagcgagctgtgcccctacaaccctgtgatggagaacatcagcagcatcatgcccagcaatgagatggacctgcagctggacttcatcttcacctctgtgtacatcggcaagatcaagggggccagcaagggctgtgtgaccatcaccaagaagtacatcaagatccccttccaggtgtccctgaatgagatcagcctgctggtggacaccacccacctgaagcgcttcggcctgtggaagagcaaggatgacaaccacagcaagaggagccacgccatcctcttcttctgggtgtccagtgactacctgcaggagatccagacccagctggagcacagcgtgctgagccagcagagcaagagcagcgagttcatcttcctggagctgcacaaccctgtgtcccagcgggaggagctgaagctgaaggacatcatgacagagatcagcatcatcagcggggagctggagctgagctaccccctgtcctgggtgcaggccttccccctcttccagaacctgagcagcaaggagagcagcttcatccactactactgtgtgtccacctgcagcttccctgctggggtggccgtggccgaggagatgaagctgaagtctgtgtcccagcccagcaacacagatgctgccaagcccacctacaccttcctgcagaagcagagcagcggctgctacagcctgagcatcaccagcaacccagatgaggagtggagggaggtgcgccacacaggcctggtgcagaagctgattgtgtacccacctccacccaccaagggcggcctgggcgtgaccaatgaagacctggagtgcctggaggagggggagttcctgaatgatgtgatcatcgacttctacctgaagtacctgatcctggagaaggccagtgatgagctggtggagaggagccacatcttcagcagcttcttctacaagtgcctgaccaggaaggagaacaacctgacagaggacaaccccaacctgtccatggcccagaggaggcacaagagggtgaggacctggaccaggcacatcaacatcttcaacaaggactacatctttgtgcctgtgaatgaaagcagccactggtacctggccgtcatctgcttcccctggctggaggaggccgtgtatgaggacttcccccagacagtgtcccagcagagccaggcccagcagagccagaatgacaacaagaccatcgacaatgacctgcggaccaccagcaccctgagcctgtctgctgaggacagccagagcacagagagcaacatgtctgtgcccaagaagatgtgcaagaggccctgcatcctgatcctggacagcctgaaggccgcctctgtgcagaacacagtgcagaacctgcgggagtacctggaggtggagtgggaggtgaagctgaagacccaccggcagttcagcaagaccaacatggtggacctgtgccccaaggtgcccaagcaggacaacagcagtgactgtggggtgtacctgctgcagtatgtggagagcttcttcaaggaccccatcgtgaactttgagctgcccatccacctggagaagtggttccccaggcatgtgatcaagaccaagcgggaggacatccgggagctgatcctgaagctgcacctgcagcagcagaagggcagcagcagctag

SEQ ID NO: 171982 - DNA, 1770 bp, synthetic construct
  misc_feature 1..1770: note = Description of Artificial Sequence: Synthetic coding sequence
  source 1..1770: mol_type = other DNA
atgtaccgctggctggtgcgcatcctgggcaccatcttccgcttctgtgacagatctgtgcccccagcccgggccctgctgaagagaagaagaagtgacagcaccctcttcagcacagtggacacagatgagatcccagccaagaggccccggctggactgcttcatccaccaggtgaagaacagcctgtacaatgctgccagcctgtttggcttccccttccagctgaccaccaagcccatggtgaccagcgcctgcaatggcaccagaaatgtggcccccagcggggaggtgttcagcaacagcagcagctgtgagctgaccggcagcggctcctggaacaacatgctgaagctgggcaacaagagccccaacggcatcagtgactaccccaagatccgggtgacagtgacccgggaccagcccaggagagtgctgcccagctttggcttcaccctgaacagcgagggctgcaacagaagacctgggggcagaagacacagcaaaggaaatcctgagagcagcctgatgtggaagccccaggagcaggccgtgacagagatgatcagcgaggagagcggcaagggcctgcggcggccccactgcaccgtggaggagggcgtgcagaaggaggagcgggagaagtacaggaagctgctggagcggctgaaggagagcggccacggcaacagcgtgtgccctgtgaccagcaactaccacagcagccagaggagccagatggacaccctgaagaccaagggctggggcgaggagcagaaccacggcgtgaagaccacccagtttgtgcccaagcagtaccgcctggtggagacccggggccccctgtgcagcctgcggtctgagaagcgctgcagcaagggcaagatcacagacacagagaccatggtgggcatccgctttgaaaatgaaagccggcggggctaccagctggagccagacctgtctgaggaggtgtctgcccggctgcggctgggcagcggcagcaatggcctgctgcggaggaaggtgtccatcatcgagaccaaggagaagaactgcagcggcaaggagcgggacagaagaacagatgacctgctggagctgacagaggacatggagaaggagatcagcaatgccctgggccacggcccccaggatgagatcctgagcagcgccttcaagctgcgcatcaccaggggggacatccagaccctgaagaactaccactggctgaatgatgaagtcatcaacttctacatgaacctgctggtggagaggaacaagaagcagggctacccagccctgcacgtgttcagcaccttcttctaccccaagctgaagagcggcggctaccaggccgtgaagcgctggaccaagggcgtgaacctgtttgagcaggagatcatcctggtgcccatccacaggaaggtgcactggagcctggtggtgattgacctgaggaagaagtgcctgaagtacctggacagcatgggccagaagggccaccgcatctgtgagatcctgctgcagtacctgcaggatgagagcaagaccaagaggaacagcgacctgaacctgctggagtggacccaccacagcatgaagccccatgagatcccccagcagctgaatggaagtgactgtggcatgttcacctgcaagtatgctgactacatcagccgggacaagcccatcaccttcacccagcaccagatgcccctcttcaggaagaagatggtgtgggagatcctgcaccagcagctgctgtag

SEQ ID NO: 171983 - DNA, 1242 bp, synthetic construct
  misc_feature 1..1242: note = Description of Artificial Sequence: Synthetic coding sequence
  source 1..1242: mol_type = other DNA
atgtggaagccccaggagcaggccgtgacagagatgatcagcgaggagagcggcaagggcctgcggcggccccactgcaccgtggaggagggcgtgcagaaggaggagcgggagaagtacaggaagctgctggagcggctgaaggagagcggccacggcaacagcgtgtgccctgtgaccagcaactaccacagcagccagaggagccagatggacaccctgaagaccaagggctggggcgaggagcagaaccacggcgtgaagaccacccagtttgtgcccaagcagtaccgcctggtggagacccggggccccctgtgcagcctgcggtctgagaagcgctgcagcaagggcaagatcacagacacagagaccatggtgggcatccgctttgaaaatgaaagccggcggggctaccagctggagccagacctgtctgaggaggtgtctgcccggctgcggctgggcagcggcagcaatggcctgctgcggaggaaggtgtccatcatcgagaccaaggagaagaactgcagcggcaaggagcgggacagaagaacagatgacctgctggagctgacagaggacatggagaaggagatcagcaatgccctgggccacggcccccaggatgagatcctgagcagcgccttcaagctgcgcatcaccaggggggacatccagaccctgaagaactaccactggctgaatgatgaagtcatcaacttctacatgaacctgctggtggagaggaacaagaagcagggctacccagccctgcacgtgttcagcaccttcttctaccccaagctgaagagcggcggctaccaggccgtgaagcgctggaccaagggcgtgaacctgtttgagcaggagatcatcctggtgcccatccacaggaaggtgcactggagcctggtggtgattgacctgaggaagaagtgcctgaagtacctggacagcatgggccagaagggccaccgcatctgtgagatcctgctgcagtacctgcaggatgagagcaagaccaagaggaacagcgacctgaacctgctggagtggacccaccacagcatgaagccccatgagatcccccagcagctgaatggaagtgactgtggcatgttcacctgcaagtatgctgactacatcagccgggacaagcccatcaccttcacccagcaccagatgcccctcttcaggaagaagatggtgtgggagatcctgcaccagcagctgctgtag

SEQ ID NO: 171984 - DNA, 1383 bp, synthetic construct
  misc_feature 1..1383: note = Description of Artificial Sequence: Synthetic coding sequence
  source 1..1383: mol_type = other DNA
atgtaccgctggctggtgcgcatcctgggcaccatcttccgcttctgtgacagatctgtgcccccagcccgggccctgctgaagagaagaagaagtgacagcaccctcttcagcacagtggacacagatgagatcccagccaagaggccccggctggactgcttcatccaccaggtgaagaacagcctgtacaatgctgccagcctgtttggcttccccttccagctgaccaccaagcccatggtgaccagcgcctgcaatggcaccagaaatgtggcccccagcggggaggtgaatggaaacagcgtgtgccctgtgaccagcaactaccacagcagccagaggagccagatggacaccctgaagaccaagggctggggcgaggagcagaaccacggcgtgaagaccacccagtttgtgcccaagcagtaccgcctggtggagacccggggccccctgtgcagcctgcggtctgagaagcgctgcagcaagggcaagatcacagacacagagaccatggtgggcatccgctttgaaaatgaaagcagaagaggctaccagctggagccagacctgtctgaggaggtgtctgcccggctgcggctgggcagcggcagcaatggcctgctgcggaggaaggtgtccatcatcgagaccaaggagaagaactgcagcggcaaggagcgggacagaagaacagatgacctgctggagctgacagaggacatggagaaggagatcagcaatgccctgggccacggcccccaggatgagatcctgagcagcgccttcaagctgcgcatcaccaggggggacatccagaccctgaagaactaccactggctgaatgatgaggtgatcaacttctacatgaacctgctggtggagaggaacaagaagcagggctacccagccctgcacgtgttcagcaccttcttctaccccaagctgaagagcggcggctaccaggccgtgaagcgctggaccaagggcgtgaacctgtttgagcaggagatcatcctggtgcccatccacaggaaggtgcactggagcctggtggtgattgacctgaggaagaagtgcctgaagtacctggacagcatgggccagaagggccaccgcatctgtgagatcctgctgcagtacctgcaggatgagagcaagaccaagaggaacagcgacctgaacctgctggagtggacccaccacagcatgaagccccatgagatcccccagcagctgaatggaagtgactgtggcatgttcacctgcaagtatgctgactacatcagccgggacaagcccatcaccttcacccagcaccagatgcccctcttcaggaagaagatggtgtgggagatcctgcaccagcagctgctgtag

SEQ ID NO: 171985 - DNA, 1740 bp, synthetic construct
  misc_feature 1..1740: note = Description of Artificial Sequence: Synthetic coding sequence
  source 1..1740: mol_type = other DNA
atggacagccacccctgcctgtactgcggcccccaggacagcgagggcaccaactggcagaccagccccagcaccctcttcagcacagtggacacagatgagatcccagccaagaggccccggctggactgcttcatccaccaggtgaagaacagcctgtacaatgctgccagcctgtttggcttccccttccagctgaccaccaagcccatggtgaccagcgcctgcaatggcaccagaaatgtggcccccagcggggaggtgttcagcaacagcagcagctgtgagctgaccggcagcggctcctggaacaacatgctgaagctgggcaacaagagccccaacggcatcagtgactaccccaagatccgggtgacagtgacccgggaccagcccaggagagtgctgcccagctttggcttcaccctgaacagcgagggctgcaacagaagacctgggggcagaagacacagcaaaggaaatcctgagagcagcctgatgtggaagccccaggagcaggccgtgacagagatgatcagcgaggagagcggcaagggcctgcggcggccccactgcaccgtggaggagggcgtgcagaaggaggagcgggagaagtacaggaagctgctggagcggctgaaggagagcggccacggcaacagcgtgtgccctgtgaccagcaactaccacagcagccagaggagccagatggacaccctgaagaccaagggctggggcgaggagcagaaccacggcgtgaagaccacccagtttgtgcccaagcagtaccgcctggtggagacccggggccccctgtgcagcctgcggtctgagaagcgctgcagcaagggcaagatcacagacacagagaccatggtgggcatccgctttgaaaatgaaagccggcggggctaccagctggagccagacctgtctgaggaggtgtctgcccggctgcggctgggcagcggcagcaatggcctgctgcggaggaaggtgtccatcatcgagaccaaggagaagaactgcagcggcaaggagcgggacagaagaacagatgacctgctggagctgacagaggacatggagaaggagatcagcaatgccctgggccacggcccccaggatgagatcctgagcagcgccttcaagctgcgcatcaccaggggggacatccagaccctgaagaactaccactggctgaatgatgaagtcatcaacttctacatgaacctgctggtggagaggaacaagaagcagggctacccagccctgcacgtgttcagcaccttcttctaccccaagctgaagagcggcggctaccaggccgtgaagcgctggaccaagggcgtgaacctgtttgagcaggagatcatcctggtgcccatccacaggaaggtgcactggagcctggtggtgattgacctgaggaagaagtgcctgaagtacctggacagcatgggccagaagggccaccgcatctgtgagatcctgctgcagtacctgcaggatgagagcaagaccaagaggaacagcgacctgaacctgctggagtggacccaccacagcatgaagccccatgagatcccccagcagctgaatggaagtgactgtggcatgttcacctgcaagtatgctgactacatcagccgggacaagcccatcaccttcacccagcaccagatgcccctcttcaggaagaagatggtgtgggagatcctgcaccagcagctgctgtag

SEQ ID NO: 171986 - DNA, 1722 bp, synthetic construct
  misc_feature 1..1722: note = Description of Artificial Sequence: Synthetic coding sequence
  source 1..1722: mol_type = other DNA
atgaaggagaccatccagggcaccggctcctggggccctgagcccccaggccctggcatccccccagcctacagcagcccccggcgggagcggctgcgctggcccccaccacccaagccccggctgaagagcggcggcggcttcggccctgaccccggcagcggcaccaccgtgcctgcccggcggctgcctgtgccccggcccagctttgatgccagcgccagcgaggaggaggaggaggaggaggaggaggaggatgaagatgaggaggaggaggtggccgcctggaggctgcccccacgctggagccagctgggcaccagccagaggccccggcccagccggcccacccacaggaagacctgcagccagaggagaagaagagccatgagggccttcaggatgctgctgtacagcaagagcaccagcctgaccttccactggaagctgtggggccgccaccggggcagaagaagaggcctggcccaccccaagaaccacctgagcccccagcagggcggggccaccccccaggtgcccagcccctgctgccgctttgacagcccccggggccccccaccaccccggctgggcctgctgggcgccctgatggccgaggatggagtgcggggcagcccccctgtgcccagcggcccccccatggaggaggatggcctgcgctggacccccaagagccccctggaccctgacagcggcctgctgagctgcaccctgcccaatggatttggaggccagagcggccctgagggggagaggagcctggcccccccagatgccagcatcctgatcagcaatgtgtgcagcatcggggaccacgtggcccaggagctgttccagggcagtgacctgggcatggccgaggaggccgagaggcctggagagaaggccggccagcacagccccctgcgggaggagcacgtgacctgtgtgcagagcatcctggatgagttcctgcagacctacggcagcctcatccccctgagcacagatgaggtggtggagaagctggaggacatcttccagcaggagttcagcacccccagcaggaagggcctggtgctgcagctgatccagagctaccagaggatgcctggaaatgccatggtgcggggcttccgggtggcctacaagagacatgtgctgaccatggatgacctgggcaccctgtatggccagaactggctgaatgaccaggtgatgaacatgtacggggacctggtgatggacacagtgcctgagaaggtgcacttcttcaacagcttcttctatgacaagctgaggacaggctatgatggagtgaagcgctggaccaagaatgtggacatcttcaacaaggagctgctgctgatccccatccacctggaggtgcactggagcctcatctctgtggatgtgagaagaaggaccatcacctactttgacagccagaggaccctgaacagacgctgccccaagcacatcgccaagtacctgcaggccgaggccgtgaagaaggaccggctggacttccaccagggctggaagggctacttcaagatgaatgtggcccggcagaacaatgacagcgactgtggggcctttgtgctgcagtactgcaagcacctggccctgagccagcccttctccttcacccagcaggacatgcccaagctgcggcggcagatctacaaggagctgtgccactgcaagctgactgtgtag

SEQ ID NO: 171987 - DNA, 1725 bp, synthetic construct
  misc_feature 1..1725: note = Description of Artificial Sequence: Synthetic coding sequence
  source 1..1725: mol_type = other DNA
atgaaggagaccatccagggcaccggctcctggggccctgagcccccaggccctggcatccccccagcctacagcagcccccggcgggagcggctgcgctggcccccaccacccaagccccggctgaagagcggcggcggcttcggccctgaccccggcagcggcaccaccgtgcctgcccggcggctgcctgtgccccggcccagctttgatgccagcgccagcgaggaggaggaggaggaggaggaggaggaggatgaagatgaggaggaggaggtggccgcctggaggctgcccccacgctggagccagctgggcaccagccagaggccccggcccagccggcccacccacaggaagacctgcagccagaggagaagaagagccatgagggccttcaggatgctgctgtacagcaagagcaccagcctgaccttccactggaagctgtggggccgccaccggggcagaagaagaggcctggcccaccccaagaaccacctgagcccccagcagggcggggccaccccccaggtgcccagcccctgctgccgctttgacagcccccggggccccccaccaccccggctgggcctgctgggcgccctgatggccgaggatggagtgcggggcagcccccctgtgcccagcggcccccccatggaggaggatggcctgcgctggacccccaagagccccctggaccctgacagcggcctgctgagctgcaccctgcccaatggatttggaggccagagcggccctgagggggagaggagcctggcccccccagatgccagcatcctgatcagcaatgtgtgcagcatcggggaccacgtggcccaggagctgttccagggcagtgacctgggcatggccgaggaggccgagaggcctggagagaaggccggccagcacagccccctgcgggaggagcacgtgacctgtgtgcagagcatcctggatgagttcctgcagacctacggcagcctcatccccctgagcacagatgaggtggtggagaagctggaggacatcttccagcaggagttcagcacccccagcaggaagggcctggtgctgcagctgatccagagctaccagaggatgcctggaaatgccatggtgcggggcttccgggtggcctacaagagacatgtgctgaccatggatgacctgggcaccctgtatggccagaactggctgaatgaccaggtgatgaacatgtacggggacctggtgatggacacagtgcctgagaaggtgcacttcttcaacagcttcttctatgacaagctgcggaccaagggctatgatggagtgaagcgctggaccaagaatgtggacatcttcaacaaggagctgctgctgatccccatccacctggaggtgcactggagcctcatctctgtggatgtgagaagaaggaccatcacctactttgacagccagaggaccctgaacagacgctgccccaagcacatcgccaagtacctgcaggccgaggccgtgaagaaggaccggctggacttccaccagggctggaagggctacttcaagatgaatgtggcccggcagaacaatgacagcgactgtggggcctttgtgctgcagtactgcaagcacctggccctgagccagcccttctccttcacccagcaggacatgcccaagctgcggcggcagatctacaaggagctgtgccactgcaagctgactgtgtag

SEQ ID NO: 171988 - DNA, 3741 bp, synthetic construct
  misc_feature 1..3741: note = Description of Artificial Sequence: Synthetic coding sequence
  source 1..3741: mol_type = other DNA
atgatggagacagagcggctggtgctgcccccaccagaccccctggacctgcccctgcgggctgtggagctgggctgcaccggccactgggagctgctgaacctgcccggggcccctgagagcagcctgccccacggcctgcccccctgtgccccagacctgcagcaggaggccgagcagctgttcctgagcagccctgcctggctgcccctgcacggcgtggagcacagcgccaggaagtggcagaggaagacagacccctggagcctgctggccgtgctgggcgcccctgtgcccagcgacctgcaggcccagaggcaccccaccaccggccagatcctgggctacaaggaggtgctgctggagaacaccaacctgagcgccaccaccagcctgagcctgcggcggcccccaggccctgccagccagagcctgtggggcaaccccacccagtaccccttctggccaggcggcatggatgagcccaccatcacagacctgaacacccgggaggaggccgaggaggagattgactttgagaaggacctgctgaccatccccccaggcttcaagaagggcatggactttgcccccaaggactgccccaccccagcccctggcctgctgagcctgagctgcatgctggagcccctggacctgggcggcggagatgaagatgaaaatgaggccgtgggccagcccggcggccccaggggggacacagtgtctgccagcccctgcagcgcccccctggcccgggccagcagcctggaggacctggtgctgaaggaggccagcacagctgtgtccaccccagaggcccctgagccccccagccaggagcagtgggccatccctgtggatgccaccagccctgtgggggacttctaccgcctcatcccccagcctgccttccagtgggcctttgagccagatgtgttccagaagcaggccatcctgcacctggagagacatgattctgtgtttgtggccgcccacaccagcgctgggaagacagtggtggccgagtatgccatcgccctggcccagaagcacatgaccaggaccatctacaccagccccatcaaggccctgagcaaccagaagttccgggacttcaggaacacctttggagatgtgggcctgctgactggagatgtgcagctgcaccctgaggccagctgcctgatcatgaccacagagatcctgcgctccatgctgtacagcggcagtgatgtgatccgggacctggagtgggtgatctttgatgaggtgcactacatcaatgatgtggagcggggcgtggtgtgggaggaggtgctgatcatgctgcctgaccacgtgtccatcatcctgctgagcgccaccgtgcccaatgccctggagtttgctgactggattggccgcctgaagaggcggcagatctacgtgatcagcacagtgaccaggcctgtgcccctggagcactacctgttcaccggcaacagcagcaagacccagggcgagctgttcctgctgctggacagcagaggagccttccacaccaagggctactatgctgctgtggaggccaagaaggagaggatgagcaagcacgcccagaccttcggggccaagcagcccacccaccagggcggccctgcccaggaccggggcgtgtacctgagcctgctggccagcctgcggacccgggcccagctgcctgtggtggtgttcaccttcagccggggccgctgtgatgagcaggccagcggcctgaccagcctggacctgaccaccagcagcgagaagtctgagatccacctgttcctgcagcgctgcctggcccggctgcggggcagtgaccggcagctgccccaggtgctgcacatgtctgagctgctgaacagaggcctgggcgtgcaccacagcggcatcctgcccatcctgaaggagatcgtggagatgctgttcagccggggcctggtgaaggtgctgtttgccacagagacctttgccatgggcgtgaacatgcctgccaggacagtggtgtttgacagcatgaggaagcatgatggcagcaccttccgggacctgctgcccggggagtatgtgcagatggccggccgggccggccggcggggcctggaccccaccggcaccgtcatcctgctgtgcaagggccgggtgcctgagatggctgacctgcacaggatgatgatgggcaagcccagccagctgcagagccagttccggctgacctacaccatgatcctgaacctgctgcgggtggatgccctgcgggtggaggacatgatgaagaggagcttcagcgagttccccagcaggaaggacagcaaggcccacgagcaggccctggccgagctgaccaagaggctgggcgccctggaggagccagacatgacaggccagctggtggacctgcctgagtactacagctggggcgaggagctgacagagacccagcacatgatccagaggcgcatcatggagagcgtgaatggcctgaagagcctgtctgctggccgggtggtggtggtgaagaaccaggagcaccacaatgccctgggcgtcatcctgcaggtgagcagcaacagcaccagcagggtcttcaccaccctggtgctgtgtgacaagcccctgagccaggacccccaggaccggggccctgccacagctgaggtgccctacccagatgacctggtgggcttcaagctgttcctgcctgagggcccctgtgaccacacagtggtgaagctgcagcccggggacatggccgccatcaccaccaaggtgctgcgggtgaatggagagaagatcctggaggacttcagcaagaggcagcagcccaagttcaagaaggacccccccctggccgctgtgaccacagctgtgcaggagctgctgcggctggcccaggcccaccctgctggcccccccaccctggaccctgtgaatgacctgcagctgaaggacatgtctgtggtggagggcggcctgcgggccaggaagctggaggagctgatccagggcgcccagtgtgtgcacagcccccgcttccctgcccagtacctgaagctgcgggagaggatgcagatccagaaggagatggagcggctgcgcttcctgctgagtgaccagagcctgctgctgctgcctgagtaccaccagagggtggaggtgctgcggaccctgggctacgtggatgaagctggcaccgtgaagctggccggccgggtggcctgtgccatgagcagccatgagctgctgctgacagagctgatgtttgacaatgccctgagcaccctgcggcctgaggagattgctgccctgctgagcggcctggtgtgccagagccctggagatgctggggaccagctgcccaacaccctgaagcagggcatcgagcgggtgcgggctgtggccaagagaattggagaggtgcaggtggcctgtggcctgaaccagacagtggaggagtttgtgggggagctgaactttggcctggtggaggtggtgtatgagtgggcccggggcatgcccttcagcgagctggccggcctgagcggcaccccagagggcctggtggtgcgctgcatccagaggctggccgagatgtgccgcagcctgcggggagctgcccggctggtgggggagcctgtgctgggcgccaagatggagacagctgccaccctgctgcggcgggacatcgtgtttgctgccagcctgtacacccagtag

SEQ ID NO: 171989 - DNA, 3741 bp, synthetic construct
  misc_feature 1..3741: note = Description of Artificial Sequence: Synthetic coding sequence
  source 1..3741: mol_type = other DNA
atgatggagacagagcggctggtgctgcccccaccagaccccctggacctgcccctgcgggctgtggagctgggctgcaccggccactgggagctgctgaacctgcccggggcccctgagagcagcctgccccacggcctgcccccctgtgccccagacctgcagcaggaggccgagcagctgttcctgagcagccctgcctggctgcccctgcacggcgtggagcacagcgccaggaagtggcagaggaagacagacccctggagcctgctggccgtgctgggcgcccctgtgcccagcgacctgcaggcccagaggcaccccaccaccggccagatcctgggctacaaggaggtgctgctggagaacaccaacctgagcgccaccaccagcctgagcctgcggcggcccccaggccctgccagccagagcctgtggggcaaccccacccagtaccccttctggccaggcggcatggatgagcccaccatcacagacctgaacacccgggaggaggccgaggaggagattgactttgagaaggacctgctgaccatccccccaggcttcaagaagggcatggactttgcccccaaggactgccccaccccagcccctggcctgctgagcctgagctgcctgctggagcccctggacctgggcggcggagatgaagatgaaaatgaggccgtgggccagcccggcggccccaggggggacacagtgtctgccagcccctgcagcgcccccctggcccgggccagcagcctggaggacctggtgctgaaggaggccagcacagctgtgtccaccccagaggcccctgagccccccagccaggagcagtgggccatccctgtggatgccaccagccctgtgggggacttctaccgcctcatcccccagcctgccttccagtgggcctttgagccagatgtgttccagaagcaggccatcctgcacctggagagacatgattctgtgtttgtggccgcccacaccagcgctgggaagacagtggtggccgagtatgccatcgccctggcccagaagcacatgaccaggaccatctacaccagccccatcaaggccctgagcaaccagaagttccgggacttcaggaacacctttggagatgtgggcctgctgactggagatgtgcagctgcaccctgaggccagctgcctgatcatgaccacagagatcctgcgctccatgctgtacagcggcagtgatgtgatccgggacctggagtgggtgatctttgatgaggtgcactacatcaatgatgtggagcggggcgtggtgtgggaggaggtgctgatcatgctgcctgaccacgtgtccatcatcctgctgagcgccaccgtgcccaatgccctggagtttgctgactggattggccgcctgaagaggcggcagatctacgtgatcagcacagtgaccaggcctgtgcccctggagcactacctgttcaccggcaacagcagcaagacccagggcgagctgttcctgctgctggacagcagaggagccttccacaccaagggctactatgctgctgtggaggccaagaaggagaggatgagcaagcacgcccagaccttcggggccaagcagcccacccaccagggcggccctgcccaggaccggggcgtgtacctgagcctgctggccagcctgcggacccgggcccagctgcctgtggtggtgttcaccttcagccggggccgctgtgatgagcaggccagcggcctgaccagcctggacctgaccaccagcagcgagaagtctgagatccacctgttcctgcagcgctgcctggcccggctgcggggcagtgaccggcagctgccccaggtgctgcacatgtctgagctgctgaacagaggcctgggcgtgcaccacagcggcatcctgcccatcctgaaggagatcgtggagatgctgttcagccggggcctggtgaaggtgctgtttgccacagagacctttgccatgggcgtgaacatgcctgccaggacagtggtgtttgacagcatgaggaagcatgatggcagcaccttccgggacctgctgcccggggagtatgtgcagatggccggccgggccggccggcggggcctggaccccaccggcaccgtcatcctgctgtgcaagggccgggtgcctgagatggctgacctgcacaggatgatgatgggcaagcccagccagctgcagagccagttccggctgacctacaccatgatcctgaacctgctgcgggtggatgccctgcgggtggaggacatgatgaagaggagcttcagcgagttccccagcaggaaggacagcaaggcccacgagcaggccctggccgagctgaccaagaggctgggcgccctggaggagccagacatgacaggccagctggtggacctgcctgagtactacagctggggcgaggagctgacagagacccagcacatgatccagaggcgcatcatggagagcgtgaatggcctgaagagcctgtctgctggccgggtggtggtggtgaagaaccaggagcaccacaatgccctgggcgtcatcctgcaggtgagcagcaacagcaccagcagggtcttcaccaccctggtgctgtgtgacaagcccctgagccaggacccccaggaccggggccctgccacagctgaggtgccctacccagatgacctggtgggcttcaagctgttcctgcctgagggcccctgtgaccacacagtggtgaagctgcagcccggggacatggccgccatcaccaccaaggtgctgcgggtgaatggagagaagatcctggaggacttcagcaagaggcagcagcccaagttcaagaaggacccccccctggccgctgtgaccacagctgtgcaggagctgctgcggctggcccaggcccaccctgctggcccccccaccctggaccctgtgaatgacctgcagctgaaggacatgtctgtggtggagggcggcctgcgggccaggaagctggaggagctgatccagggcgcccagtgtgtgcacagcccccgcttccctgcccagtacctgaagctgcgggagaggatgcagatccagaaggagatggagcggctgcgcttcctgctgagtgaccagagcctgctgctgctgcctgagtaccaccagagggtggaggtgctgcggaccctgggctacgtggatgaagctggcaccgtgaagctggccggccgggtggcctgtgccatgagcagccatgagctgctgctgacagagctgatgtttgacaatgccctgagcaccctgcggcctgaggagattgctgccctgctgagcggcctggtgtgccagagccctggagatgctggggaccagctgcccaacaccctgaagcagggcatcgagcgggtgcgggctgtggccaagagaattggagaggtgcaggtggcctgtggcctgaaccagacagtggaggagtttgtgggggagctgaactttggcctggtggaggtggtgtatgagtgggcccggggcatgcccttcagcgagctggccggcctgagcggcaccccagagggcctggtggtgcgctgcatccagaggctggccgagatgtgccgcagcctgcggggagctgcccggctggtgggggagcctgtgctgggcgccaagatggagacagctgccaccctgctgcggcgggacatcgtgtttgctgccagcctgtacacccagtag

SEQ ID NO: 171990 - DNA, 3741 bp, synthetic construct; identical to SEQ ID NO: 171989
  misc_feature 1..3741: note = Description of Artificial Sequence: Synthetic coding sequence
  source 1..3741: mol_type = other DNA

SEQ ID NO: 171991 - DNA, 3741 bp, synthetic construct; identical to SEQ ID NO: 171989
  misc_feature 1..3741: note = Description of Artificial Sequence: Synthetic coding sequence
  source 1..3741: mol_type = other DNA

SEQ ID NO: 171992 - DNA, 3741 bp, synthetic construct; identical to SEQ ID NO: 171989
  misc_feature 1..3741: note = Description of Artificial Sequence: Synthetic coding sequence
  source 1..3741: mol_type = other DNA

SEQ ID NO: 171993 - DNA, 3267 bp, synthetic construct
  misc_feature 1..3267: note = Description of Artificial Sequence: Synthetic coding sequence
  source 1..3267: mol_type = other DNA
atggatgagcccaccatcacagacctgaacacccgggaggaggccgaggaggagattgactttgagaaggacctgctgaccatccccccaggcttcaagaagggcatggactttgcccccaaggactgccccaccccagcccctggcctgctgagcctgagctgcatgctggagcccctggacctgggcggcggagatgaagatgaaaatgaggccgtgggccagcccggcggccccaggggggacacagtgtctgccagcccctgcagcgcccccctggcccgggccagcagcctggaggacctggtgctgaaggaggccagcacagctgtgtccaccccagaggcccctgagccccccagccaggagcagtgggccatccctgtggatgccaccagccctgtgggggacttctaccgcctcatcccccagcctgccttccagtgggcctttgagccagatgtgttccagaagcaggccatcctgcacctggagagacatgattctgtgtttgtggccgcccacaccagcgctgggaagacagtggtggccgagtatgccatcgccctggcccagaagcacatgaccaggaccatctacaccagccccatcaaggccctgagcaaccagaagttccgggacttcaggaacacctttggagatgtgggcctgctgactggagatgtgcagctgcaccctgaggccagctgcctgatcatgaccacagagatcctgcgctccatgctgtacagcggcagtgatgtgatccgggacctggagtgggtgatctttgatgaggtgcactacatcaatgatgtggagcggggcgtggtgtgggaggaggtgctgatcatgctgcctgaccacgtgtccatcatcctgctgagcgccaccgtgcccaatgccctggagtttgctgactggattggccgcctgaagaggcggcagatctacgtgatcagcacagtgaccaggcctgtgcccctggagcactacctgttcaccggcaacagcagcaagacccagggcgagctgttcctgctgctggacagcagaggagccttccacaccaagggctactatgctgctgtggaggccaagaaggagaggatgagcaagcacgcccagaccttcggggccaagcagcccacccaccagggcggccctgcccaggaccggggcgtgtacctgagcctgctggccagcctgcggacccgggcccagctgcctgtggtggtgttcaccttcagccggggccgctgtgatgagcaggccagcggcctgaccagcctggacctgaccaccagcagcgagaagtctgagatccacctgttcctgcagcgctgcctggcccggctgcggggcagtgaccggcagctgccccaggtgctgcacatgtctgagctgctgaacagaggcctgggcgtgcaccacagcggcatcctgcccatcctgaaggagatcgtggagatgctgttcagccggggcctggtgaaggtgctgtttgccacagagacctttgccatgggcgtgaacatgcctgccaggacagtggtgtttgacagcatgaggaagcatgatggcagcaccttccgggacctgctgcccggggagtatgtgcagatggccggccgggccggccggcggggcctggaccccaccggcaccgtcatcctgctgtgcaagggccgggtgcctgagatggctgacctgcacaggatgatgatgggcaagcccagccagctgcagagccagttccggctgacctacaccatgatcctgaacctgctgcgggtggatgccctgcgggtggaggacatgatgaagaggagcttcagcgagttccccagcaggaaggacagcaaggcccacgagcaggccctggccgagctgaccaagaggctgggcgccctggaggagccagacatgacaggccagctggtggacctgcctgagtactacagctggggcgaggagctgacagagacccagcacatgatccagaggcgcatcatggagagcgtgaatggcctgaagagcctgtctgctggccgggtggtggtggtgaagaaccaggagcaccacaatgccctgggcgtcatcctgcaggtgagcagcaacagcaccagcagggtcttcaccaccctggtgctgtgtgacaagcccctgagccaggacccccaggaccggggccctgccacagctgaggtgccctacccagatgacctggtgggcttcaagctgttcctgcctgagggcccctgtgaccacacagtggtgaagctgcagcccggggacatggccgccatcaccaccaaggtgctgcgggtgaatggagagaagatcctggaggacttcagcaagaggcagcagcccaagttcaagaaggacccccccctggccgctgtgaccacagctgtgcaggagctgctgcggctggcccaggcccaccctgctggcccccccaccctggaccctgtgaatgacctgcagctgaaggacatgtctgtggtggagggcggcctgcgggccaggaagctggaggagctgatccagggcgcccagtgtgtgcacagcccccgcttccctgcccagtacctgaagctgcgggagaggatgcagatccagaaggagatggagcggctgcgcttcctgctgagtgaccagagcctgctgctgctgcctgagtaccaccagagggtggaggtgctgcggaccctgggctacgtggatgaagctggcaccgtgaagctggccggccgggtggcctgtgccatgagcagccatgagctgctgctgacagagctgatgtttgacaatgccctgagcaccctgcggcctgaggagattgctgccctgctgagcggcctggtgtgccagagccctggagatgctggggaccagctgcccaacaccctgaagcagggcatcgagcgggtgcgggctgtggccaagagaattggagaggtgcaggtggcctgtggcctgaaccagacagtggaggagtttgtgggggagctgaactttggcctggtggaggtggtgtatgagtgggcccggggcatgcccttcagcgagctggccggcctgagcggcaccccagagggcctggtggtgcgctgcatccagaggctggccgagatgtgccgcagcctgcggggagctgcccggctggtgggggagcctgtgctgggcgccaagatggagacagctgccaccctgctgcggcgggacatcgtgtttgctgccagcctgtacacccagtag

SEQ ID NO: 171994 - DNA, 3741 bp, synthetic construct; identical to SEQ ID NO: 171988
  misc_feature 1..3741: note = Description of Artificial Sequence: Synthetic coding sequence
  source 1..3741: mol_type = other DNA

SEQ ID NO: 171995 - DNA, 3162 bp, synthetic construct
  misc_feature 1..3162: note = Description of Artificial Sequence: Synthetic coding sequence
  source 1..3162: mol_type = other DNA
atggactttgcccccaaggactgccccaccccagcccctggcctgctgagcctgagctgcatgctggagcccctggacctgggcggcggagatgaagatgaaaatgaagctgtgggccagcccggcggccccaggggggacacagtgtctgccagcccctgcagcgcccccctggcccgggccagcagcctggaggacctggtgctgaaggaggccagcacagctgtgtccaccccagaggcccctgagccccccagccaggagcagtgggccatccctgtggatgccaccagccctgtgggggacttctaccgcctcatcccccagcctgccttccagtgggcctttgagccagatgtgttccagaagcaggccatcctgcacctggagagacatgacagcgtgtttgtggccgcccacaccagcgctgggaagacagtggtggccgagtatgccatcgccctggcccagaagcacatgaccaggaccatctacaccagccccatcaaggccctgagcaaccagaagttccgggacttcaggaacacctttggagatgtgggcctgctgactggagatgtgcagctgcaccctgaggccagctgcctgatcatgaccacagagatcctgcgctccatgctgtacagcggcagtgatgtgatccgggacctggagtgggtgatctttgatgaggtgcactacatcaatgatgtggagcggggcgtggtgtgggaggaggtgctgatcatgctgcctgaccacgtgtccatcatcctgctgagcgccaccgtgcccaatgccctggagtttgctgactggattggccgcctgaagaggcggcagatctacgtgatcagcacagtgaccaggcctgtgcccctggagcactacctgttcaccggcaacagcagcaagacccagggcgagctgttcctgctgctggacagcagaggagccttccacaccaagggctactatgctgctgtggaggccaagaaggagaggatgagcaagcacgcccagacctttggagccaagcagcccacccaccagggcggccctgcccaggacagaggagtgtacctgagcctgctggccagcctgcggacccgggcccagctgcctgtggtggtgttcaccttcagccggggccgctgtgatgagcaggccagcggcctgaccagcctggacctgaccaccagcagcgagaagtctgagatccacctgttcctgcagcgctgcctggcccggctgcggggcagtgaccggcagctgccccaggtgctgcacatgtctgagctgctgaacagaggcctgggcgtgcaccacagcggcatcctgcccatcctgaaggagatcgtggagatgctgttcagccggggcctggtgaaggtgctgtttgccacagagacctttgccatgggcgtgaacatgcctgccaggacagtggtgtttgacagcatgaggaagcatgatggcagcaccttccgggacctgctgcctggagaatatgtgcagatggccggccgggccggcagaagaggcctggaccccactggaacagtcatcctgctgtgcaagggccgggtgcctgagatggctgacctgcacaggatgatgatgggcaagcccagccagctgcagagccagttccggctgacctacaccatgatcctgaacctgctgcgggtggatgccctgcgggtggaggacatgatgaagaggagcttcagcgagttccccagcaggaaggacagcaaggcccacgagcaggccctggccgagctgaccaagaggctgggcgccctggaggagccagacatgacaggccagctggtggacctgcctgagtactacagctggggcgaggagctgacagagacccagcacatgatccagaggcgcatcatggagagcgtgaatggcctgaagagcctgtctgctggccgggtggtggtggtgaagaaccaggagcaccacaatgccctgggcgtcatcctgcaggtgagcagcaacagcaccagcagggtcttcaccaccctggtgctgtgtgacaagcccctgagccaggacccccaggaccggggccctgccacagctgaggtgccctacccagatgacctggtgggcttcaagctgttcctgcctgagggcccctgtgaccacacagtggtgaagctgcagcccggggacatggccgccatcaccaccaaggtgctgcgggtgaatggagagaagatcctggaggacttcagcaagaggcagcagcccaagttcaagaaggacccccccctggccgctgtgaccacagctgtgcaggagctgctgcggctggcccaggcccaccctgctggcccccccaccctggaccctgtgaatgacctgcagctgaaggacatgtctgtggtggagggcggcctgcgggccaggaagctggaggagctgatccagggcgcccagtgtgtgcacagcccccgcttccctgcccagtacctgaagctgcgggagaggatgcagatccagaaggagatggagcggctgcgcttcctgctgagtgaccagagcctgctgctgctgcctgagtaccaccagagggtggaggtgctgcggaccctgggctacgtggatgaggccggcaccgtgaagctggccggccgggtggcctgtgccatgagcagccatgagctgctgctgacagagctgatgtttgacaatgccctgagcaccctgcggcctgaggagattgctgccctgctgagcggcctggtgtgccagagccctggagatgctggggaccagctgcccaacaccctgaagcagggcatcgagcgggtgcgggctgtggccaagagaattggagaggtgcaggtggcctgtggcctgaaccagacagtggaggagtttgtgggggagctgaactttggcctggtggaggtggtgtatgagtgggcccggggcatgcccttcagcgagctggccggcctgagcggcaccccagagggcctggtggtgcgctgcatccagaggctggccgagatgtgccgcagcctgcggggggccgcccggctggtgggggagcctgtgctgggcgccaagatggagacagctgccaccctgctgcggcgggacatcgtgtttgctgccagcctgtacacccagtag

SEQ ID NO: 171996 - DNA, 3162 bp, synthetic construct; identical to SEQ ID NO: 171995
  misc_feature 1..3162: note = Description of Artificial Sequence: Synthetic coding sequence
  source 1..3162: mol_type = other DNA

SEQ ID NO: 171997 - DNA, 693 bp, synthetic construct
  misc_feature 1..693: note = Description of Artificial Sequence: Synthetic coding sequence
  source 1..693: mol_type = other DNA
atgatggagacagagcggctggtgctgcccccaccagaccccctggacctgcccctgcgggctgtggagctgggctgcaccggccactgggagctgctgaacctgcccggggcccctgagagcagcctgccccacggcctgcccccctgtgccccagacctgcagcaggaggccgagcagctgttcctgagcagccctgcctggctgcccctgcacggcgtggagcacagcgccaggaagtggcagaggaagacagacccctggagcctgctggccgtgctgggcgcccctgtgcccagcgacctgcaggcccagaggcaccccaccaccggccagatcctgggctacaaggaggtgctgctggagaacaccaacctgagcgccaccaccagcctgagcctgcggcggcccccaggccctgccagccagagcctgtggggcaaccccacccagtaccccttctggccaggcggcatggatgagcccaccatcacagacctgaacacccgggaggaggccgaggaggagattgactttgagaaggacctgctgaccatccccccaggcttcaagaagggcatggactttgcccccaagggctctgtgcacagctgcatccacccccggggcccccgggccagcatcagcggggctgtgggccacccctgtggccgccacctgccctgctggtag

SEQ ID NO: 171998 - DNA, 3267 bp, synthetic construct
  misc_feature 1..3267: note = Description of Artificial Sequence: Synthetic coding sequence
  source 1..3267: mol_type = other DNA
atggatgagcccaccatcacagacctgaacacccgggaggaggccgaggaggagattgactttgagaaggacctgctgaccatccccccaggcttcaagaagggcatggactttgcccccaaggactgccccaccccagcccctggcctgctgagcctgagctgcctgctggagcccctggacctgggcggcggagatgaagatgaaaatgaggccgtgggccagcccggcggccccaggggggacacagtgtctgccagcccctgcagcgcccccctggcccgggccagcagcctggaggacctggtgctgaaggaggccagcacagctgtgtccaccccagaggcccctgagccccccagccaggagcagtgggccatccctgtggatgccaccagccctgtgggggacttctaccgcctcatcccccagcctgccttccagtgggcctttgagccagatgtgttccagaagcaggccatcctgcacctggagagacatgattctgtgtttgtggccgcccacaccagcgctgggaagacagtggtggccgagtatgccatcgccctggcccagaagcacatgaccaggaccatctacaccagccccatcaaggccctgagcaaccagaagttccgggacttcaggaacacctttggagatgtgggcctgctgactggagatgtgcagctgcaccctgaggccagctgcctgatcatgaccacagagatcctgcgctccatgctgtacagcggcagtgatgtgatccgggacctggagtgggtgatctttgatgaggtgcactacatcaatgatgtggagcggggcgtggtgtgggaggaggtgctgatcatgctgcctgaccacgtgtccatcatcctgctgagcgccaccgtgcccaatgccctggagtttgctgactggattggccgcctgaagaggcggcagatctacgtgatcagcacagtgaccaggcctgtgcccctggagcactacctgttcaccggcaacagcagcaagacccagggcgagctgttcctgctgctggacagcagaggagccttccacaccaagggctactatgctgctgtggaggccaagaaggagaggatgagcaagcacgcccagaccttcggggccaagcagcccacccaccagggcggccctgcccaggaccggggcgtgtacctgagcctgctggccagcctgcggacccgggcccagctgcctgtggtggtgttcaccttcagccggggccgctgtgatgagcaggccagcggcctgaccagcctggacctgaccaccagcagcgagaagtctgagatccacctgttcctgcagcgctgcctggcccggctgcggggcagtgaccggcagctgccccaggtgctgcacatgtctgagctgctgaacagaggcctgggcgtgcaccacagcggcatcctgcccatcctgaaggagatcgtggagatgctgttcagccggggcctggtgaaggtgctgtttgccacagagacctttgccatgggcgtgaacatgcctgccaggacagtggtgtttgacagcatgaggaagcatgatggcagcaccttccgggacctgctgcccggggagtatgtgcagatggccggccgggccggccggcggggcctggaccccaccggcaccgtcatcctgctgtgcaagggccgggtgcctgagatggctgacctgcacaggatgatgatgggcaagcccagccagctgcagagccagttccggctgacctacaccatgatcctgaacctgctgcgggtggatgccctgcgggtggaggacatgatgaagaggagcttcagcgagttccccagcaggaaggacagcaaggcccacgagcaggccctggccgagctgaccaagaggctgggcgccctggaggagccagacatgacaggccagctggtggacctgcctgagtactacagctggggcgaggagctgacagagacccagcacatgatccagaggcgcatcatggagagcgtgaatggcctgaagagcctgtctgctggccgggtggtggtggtgaagaaccaggagcaccacaatgccctgggcgtcatcctgcaggtgagcagcaacagcaccagcagggtcttcaccaccctggtgctgtgtgacaagcccctgagccaggacccccaggaccggggccctgccacagctgaggtgccctacccagatgacctggtgggcttcaagctgttcctgcctgagggcccctgtgaccacacagtggtgaagctgcagcccggggacatggccgccatcaccaccaaggtgctgcgggtgaatggagagaagatcctggaggacttcagcaagaggcagcagcccaagttcaagaaggacccccccctggccgctgtgaccacagctgtgcaggagctgctgcggctggcccaggcccaccctgctggcccccccaccctggaccctgtgaatgacctgcagctgaaggacatgtctgtggtggagggcggcctgcgggccaggaagctggaggagctgatccagggcgcccagtgtgtgcacagcccccgcttccctgcccagtacctgaagctgcgggagaggatgcagatccagaaggagatggagcggctgcgcttcctgctgagtgaccagagcctgctgctgctgcctgagtaccaccagagggtggaggtgctgcggaccctgggctacgtggatgaagctggcaccgtgaagctggccggccgggtggcctgtgccatgagcagccatgagctgctgctgacagagctgatgtttgacaatgccctgagcaccctgcggcctgaggagattgctgccctgctgagcggcctggtgtgccagagccctggagatgctggggaccagctgcccaacaccctgaagcagggcatcgagcgggtgcgggctgtggccaagagaattggagaggtgcaggtggcctgtggcctgaaccagacagtggaggagtttgtgggggagctgaactttggcctggtggaggtggtgtatgagtgggcccggggcatgcccttcagcgagctggccggcctgagcggcaccccagagggcctggtggtgcgctgcatccagaggctggccgagatgtgccgcagcctgcggggagctgcccggctggtgggggagcctgtgctgggcgccaagatggagacagctgccaccctgctgcggcgggacatcgtgtttgctgccagcctgtacacccagtag

SEQ ID NO: 171999 - DNA, 3162 bp, synthetic construct
  misc_feature 1..3162: note = Description of Artificial Sequence: Synthetic coding sequence
  source 1..3162: mol_type = other DNA
atggactttgcccccaaggactgccccaccccagcccctggcctgctgagcctgagctgcctgctggagcccctggacctgggcggcggagatgaagatgaaaatgaagctgtgggccagcccggcggccccaggggggacacagtgtctgccagcccctgcagcgcccccctggcccgggccagcagcctggaggacctggtgctgaaggaggccagcacagctgtgtccaccccagaggcccctgagccccccagccaggagcagtgggccatccctgtggatgccaccagccctgtgggggacttctaccgcctcatcccccagcctgccttccagtgggcctttgagccagatgtgttccagaagcaggccatcctgcacctggagagacatgacagcgtgtttgtggccgcccacaccagcgctgggaagacagtggtggccgagtatgccatcgccctggcccagaagcacatgaccaggaccatctacaccagccccatcaaggccctgagcaaccagaagttccgggacttcaggaacacctttggagatgtgggcctgctgactggagatgtgcagctgcaccctgaggccagctgcctgatcatgaccacagagatcctgcgctccatgctgtacagcggcagtgatgtgatccgggacctggagtgggtgatctttgatgaggtgcactacatcaatgatgtggagcggggcgtggtgtgggaggaggtgctgatcatgctgcctgaccacgtgtccatcatcctgctgagcgccaccgtgcccaatgccctggagtttgctgactggattggccgcctgaagaggcggcagatctacgtgatcagcacagtgaccaggcctgtgcccctggagcactacctgttcaccggcaacagcagcaagacccagggcgagctgttcctgctgctggacagcagaggagccttccacaccaagggctactatgctgctgtggaggccaagaaggagaggatgagcaagcacgcccagacctttggagccaagcagcccacccaccagggcggccctgcccaggacagaggagtgtacctgagcctgctggccagcctgcggacccgggcccagctgcctgtggtggtgttcaccttcagccggggccgctgtgatgagcaggccagcggcctgaccagcctggacctgaccaccagcagcgagaagtctgagatccacctgttcctgcagcgctgcctggcccggctgcggggcagtgaccggcagctgccccaggtgctgcacatgtctgagctgctgaacagaggcctgggcgtgcaccacagcggcatcctgcccatcctgaaggagatcgtggagatgctgttcagccggggcctggtgaaggtgctgtttgccacagagacctttgccatgggcgtgaacatgcctgccaggacagtggtgtttgacagcatgaggaagcatgatggcagcaccttccgggacctgctgcctggagaatatgtgcagatggccggccgggccggcagaagaggcctggaccccactggaacagtcatcctgctgtgcaagggccgggtgcctgagatggctgacctgcacaggatgatgatgggcaagcccagccagctgcagagccagttccggctgacctacaccatgatcctgaacctgctgcgggtggatgccctgcgggtggaggacatgatgaagaggagcttcagcgagttccccagcaggaaggacagcaaggcccacgagcaggccctggccgagctgaccaagaggctgggcgccctggaggagccagacatgacaggccagctggtggacctgcctgagtactacagctggggcgaggagctgacagagacccagcacatgatccagaggcgcatcatggagagcgtgaatggcctgaagagcctgtctgctggccgggtggtggtggtgaagaaccaggagcaccacaatgccctgggcgtcatcctgcaggtgagcagcaacagcaccagcagggtcttcaccaccctggtgctgtgtgacaagcccctgagccaggacccccaggaccggggccctgccacagctgaggtgccctacccagatgacctggtgggcttcaagctgttcctgcctgagggcccctgtgaccacacagtggtgaagctgcagcccggggacatggccgccatcaccaccaaggtgctgcgggtgaatggagagaagatcctggaggacttcagcaagaggcagcagcccaagttcaagaaggacccccccctggccgctgtgaccacagctgtgcaggagctgctgcggctggcccaggcccaccctgctggcccccccaccctggaccctgtgaatgacctgcagctgaaggacatgtctgtggtggagggcggcctgcgggccaggaagctggaggagctgatccagggcgcccagtgtgtgcacagcccccgcttccctgcccagtacctgaagctgcgggagaggatgcagatccagaaggagatggagcggctgcgcttcctgctgagtgaccagagcctgctgctgctgcctgagtaccaccagagggtggaggtgctgcggaccctgggctacgtggatgaggccggcaccgtgaagctggccggccgggtggcctgtgccatgagcagccatgagctgctgctgacagagctgatgtttgacaatgccctgagcaccctgcggcctgaggagattgctgccctgctgagcggcctggtgtgccagagccctggagatgctggggaccagctgcccaacaccctgaagcagggcatcgagcgggtgcgggctgtggccaagagaattggagaggtgcaggtggcctgtggcctgaaccagacagtggaggagtttgtgggggagctgaactttggcctggtggaggtggtgtatgagtgggcccggggcatgcccttcagcgagctggccggcctgagcggcaccccagagggcctggtggtgcgctgcatccagaggctggccgagatgtgccgcagcctgcggggggccgcccggctggtgggggagcctgtgctgggcgccaagatggagacagctgccaccctgctgcggcgggacatcgtgtttgctgccagcctgtacacccagtag

SEQ ID NO: 172000 - DNA, 2643 bp, synthetic construct
  misc_feature 1..2643: note = Description of Artificial Sequence: Synthetic coding sequence
  source 1..2643: mol_type = other DNA
atgatggagacagagcggctggtgctgcccccaccagaccccctggacctgcccctgcgggctgtggagctgggctgcaccggccactgggagctgctgaacctgcccggggcccctgagagcagcctgccccacggcctgcccccctgtgccccagacctgcagcaggaggccgagcagctgttcctgagcagccctgcctggctgcccctgcacggcgtggagcacagcgccaggaagtggcagaggaagacagacccctggagcctgctggccgtgctgggcgcccctgtgcccagcgacctgcaggcccagaggcaccccaccaccggccagatcctgggctacaaggaggtgctgctggagcactacctgttcaccggcaacagcagcaagacccagggcgagctgttcctgctgctggacagcagaggagccttccacaccaagggctactatgctgctgtggaggccaagaaggagaggatgagcaagcacgcccagaccttcggggccaagcagcccacccaccagggcggccctgcccaggaccggggcgtgtacctgagcctgctggccagcctgcggacccgggcccagctgcctgtggtggtgttcaccttcagccggggccgctgtgatgagcaggccagcggcctgaccagcctggacctgaccaccagcagcgagaagtctgagatccacctgttcctgcagcgctgcctggcccggctgcggggcagtgaccggcagctgccccaggtgctgcacatgtctgagctgctgaacagaggcctgggcgtgcaccacagcggcatcctgcccatcctgaaggagatcgtggagatgctgttcagccggggcctggtgaaggtgctgtttgccacagagacctttgccatgggcgtgaacatgcctgccaggacagtggtgtttgacagcatgaggaagcatgatggcagcaccttccgggacctgctgcccggggagtatgtgcagatggccggccgggccggccggcggggcctggaccccaccggcaccgtcatcctgctgtgcaagggccgggtgcctgagatggctgacctgcacaggatgatgatgggcaagcccagccagctgcagagccagttccggctgacctacaccatgatcctgaacctgctgcgggtggatgccctgcgggtggaggacatgatgaagaggagcttcagcgagttccccagcaggaaggacagcaaggcccacgagcaggccctggccgagctgaccaagaggctgggcgccctggaggagccagacatgacaggccagctggtggacctgcctgagtactacagctggggcgaggagctgacagagacccagcacatgatccagaggcgcatcatggagagcgtgaatggcctgaagagcctgtctgctggccgggtggtggtggtgaagaaccaggagcaccacaatgccctgggcgtcatcctgcaggtgagcagcaacagcaccagcagggtcttcaccaccctggtgctgtgtgacaagcccctgagccaggacccccaggaccggggccctgccacagctgaggtgccctacccagatgacctggtgggcttcaagctgttcctgcctgagggcccctgtgaccacacagtggtgaagctgcagcccggggacatggccgccatcaccaccaaggtgctgcgggtgaatggagagaagatcctggaggacttcagcaagaggcagcagcccaagttcaagaaggacccccccctggccgctgtgaccacagctgtgcaggagctgctgcggctggcccaggcccaccctgctggcccccccaccctggaccctgtgaatgacctgcagctgaaggacatgtctgtggtggagggcggcctgcgggccaggaagctggaggagctgatccagggcgcccagtgtgtgcacagcccccgcttccctgcccagtacctgaagctgcgggagaggatgcagatccagaaggagatggagcggctgcgcttcctgctgagtgaccagagcctgctgctgctgcctgagtaccaccagagggtggaggtgctgcggaccctgggctacgtggatgaagctggcaccgtgaagctggccggccgggtggcctgtgccatgagcagccatgagctgctgctgacagagctgatgtttgacaatgccctgagcaccctgcggcctgaggagattgctgccctgctgagcggcctggtgtgccagagccctggagatgctggggaccagctgcccaacaccctgaagcagggcatcgagcgggtgcgggctgtggccaagagaattggagaggtgcaggtggcctgtggcctgaaccagacagtggaggagtttgtgggggagctgaactttggcctggtggaggtggtgtatgagtgggcccggggcatgcccttcagcgagctggccggcctgagcggcaccccagagggcctggtggtgcgctgcatccagaggctggccgagatgtgccgcagcctgcggggagctgcccggctggtgggggagcctgtgctgggcgccaagatggagacagctgccaccctgctgcggcgggacatcgtgtttgctgccagcctgtacacccagtag

SEQ ID NO: 172001 - DNA, 3267 bp, synthetic construct; identical to SEQ ID NO: 171998
  misc_feature 1..3267: note = Description of Artificial Sequence: Synthetic coding sequence
  source 1..3267: mol_type = other DNA

SEQ ID NO: 172002 - DNA, 2643 bp, synthetic construct; identical to SEQ ID NO: 172000
  misc_feature 1..2643: note = Description of Artificial Sequence: Synthetic coding sequence
  source 1..2643: mol_type = other DNA

SEQ ID NO: 172003 - DNA, 2643 bp, synthetic construct; identical to SEQ ID NO: 172000
  misc_feature 1..2643: note = Description of Artificial Sequence: Synthetic coding sequence
  source 1..2643: mol_type = other DNA

SEQ ID NO: 172004 - DNA, 693 bp, synthetic construct; identical to SEQ ID NO: 171997
  misc_feature 1..693: note = Description of Artificial Sequence: Synthetic coding sequence
  source 1..693: mol_type = other DNA

SEQ ID NO: 172005 - DNA, 2643 bp, synthetic construct; identical to SEQ ID NO: 172000
  misc_feature 1..2643: note = Description of Artificial Sequence: Synthetic coding sequence
  source 1..2643: mol_type = other DNA

SEQ ID NO: 172006 - DNA, 3267 bp, synthetic construct; identical to SEQ ID NO: 171998
  misc_feature 1..3267: note = Description of Artificial Sequence: Synthetic coding sequence
  source 1..3267: mol_type = other DNA

SEQ ID NO: 172007 - DNA, 3267 bp, synthetic construct; identical to SEQ ID NO: 171998
  misc_feature 1..3267: note = Description of Artificial Sequence: Synthetic coding sequence
  source 1..3267: mol_type = other DNA

SEQ ID NO: 172008 - DNA, 693 bp, synthetic construct; identical to SEQ ID NO: 171997
  misc_feature 1..693: note = Description of Artificial Sequence: Synthetic coding sequence
  source 1..693: mol_type = other DNA

SEQ ID NO: 172009 - DNA, 3267 bp, synthetic construct; identical to SEQ ID NO: 171993
  misc_feature 1..3267: note = Description of Artificial Sequence: Synthetic coding sequence
  source 1..3267: mol_type = other DNA

SEQ ID NO: 172010 - DNA, 693 bp, synthetic construct; identical to SEQ ID NO: 171997
  misc_feature 1..693: note = Description of Artificial Sequence: Synthetic coding sequence
  source 1..693: mol_type = other DNA

SEQ ID NO: 172011 - DNA, 2643 bp, synthetic construct; identical to SEQ ID NO: 172000
  misc_feature 1..2643: note = Description of Artificial Sequence: Synthetic coding sequence
  source 1..2643: mol_type = other DNA

SEQ ID NO: 172012 - DNA, 693 bp, synthetic construct; identical to SEQ ID NO: 171997
  misc_feature 1..693: note = Description of Artificial Sequence: Synthetic coding sequence
  source 1..693: mol_type = other DNA

SEQ ID NO: 172013 - DNA, 3162 bp, synthetic construct; identical to SEQ ID NO: 171999
  misc_feature 1..3162: note = Description of Artificial Sequence: Synthetic coding sequence
  source 1..3162: mol_type = other DNA

SEQ ID NO: 172014 - DNA, 3162 bp, synthetic construct; identical to SEQ ID NO: 171999
  misc_feature 1..3162: note = Description of Artificial Sequence: Synthetic coding sequence
  source 1..3162: mol_type = other DNA

SEQ ID NO: 172015 - DNA, 3162 bp, synthetic construct; identical to SEQ ID NO: 171999
  misc_feature 1..3162: note = Description of Artificial Sequence: Synthetic coding sequence
  source 1..3162: mol_type = other DNA

SEQ ID NO: 172016 - DNA, 465 bp, synthetic construct
  misc_feature 1..465: note = Description of Artificial Sequence: Synthetic coding sequence
  source 1..465: mol_type = other DNA
atggccaccaaggctgtgtgtgtgctgaagggagatggccctgtgcagggcatcatcaactttgagcagaaggagagcaatggacctgtgaaggtgtggggcagcatcaagggcctgacagagggcctgcacggcttccacgtgcatgaatttggagacaacacagctggctgcaccagcgctggcccccacttcaaccccctgagcaggaagcacggcggccccaaggatgaggagagacatgtgggggacctgggcaatgtgacagctgacaaggatggagtggctgatgtgtccattgaagattctgtcatcagcctgagcggggaccactgcatcatcggccgcaccctggtggtgcatgagaaggcagatgacctgggcaaaggaggaaatgaggagagcaccaagacaggaaatgccggcagccggctggcctgtggggtcatcggcatcgcccagtag

SEQ ID NO: 172017 - DNA, 108 bp, synthetic construct
  misc_feature 1..108: note = Description of Artificial Sequence: Synthetic coding sequence
  source 1..108: mol_type = other DNA
atggccaccaaggctgtgtgtgtgctgaagggagatggccctgtgcagggcatcatcaactttgagcagaaggagagcaatggacctgagggcgtgggcaagcactag

SEQ ID NO: 172018 - DNA, 1074 bp, synthetic construct
  misc_feature 1..1074: note = Description of Artificial Sequence: Synthetic coding sequence
  source 1..1074: mol_type = other DNA
atggattctgtggagaagaccaccaacagaagtgagcagaagagcaggaagttcctgaagagcctcatcaggaagcagccccaggagctgctgctggtgattggcaccggggtgtctgctgctgtggcccctggcatcccagccctgtgctcctggaggagctgcatcgaggccgtcatcgaggccgctgagcagctggaggtgctgcaccctggagatgtggccgagttccggaggaaggtgaccaaggaccgggacctgctggtggtggcccatgacctgatcaggaagatgagccccaggactggagatgccaagcccagcttcttccaggactgcctgatggaggtgtttgatgacctggagcagcacatccgcagccctgtggtgctgcagagcatcctgagcctgatggacagaggagccatggtgctgaccaccaactatgacaacctgctggaggccttcggccggcggcagaacaagcccatggagagcctggacctgaaggacaagaccaaggtgctggagtgggcccggggccacatgaagtatggagtgctgcacatccacggcctgtacacagacccctgtggggtggtgctggaccccagcggctacaaggatgtgacccaggatgctgaggtgatggaggtgctgcagaacctgtaccgcaccaagagcttcctgtttgtgggctgtggggagaccctgcgggaccagatcttccaggccctcttcctgtacagcgtgcccaacaaggtggacctggagcactacatgctggtgctgaaggaaaatgaagaccacttcttcaagcaccaggccgacatgctgctgcacggcatcaaggtggtgtcctatggagactgctttgaccacttccctggctacgtgcaggacctggccacccagatctgcaagcagcagagcccagatgctgacagagtggacagcaccaccctgctgggcaatgcctgccaggactgtgccaagaggaagctggaggagaatggcatcgaggtgtccaagaagaggacccagagcgacacagatgatgctgggggcagctag

SEQ ID NO: 172019 - DNA, 636 bp, synthetic construct
  misc_feature 1..636: note = Description of Artificial Sequence: Synthetic coding sequence
  source 1..636: mol_type = other DNA
atggaccccaggaaggtgaatgagctgcgggcctttgtgaagatgtgcaagcaggaccccagcgtgctgcacacagaggagatgaggttcctgcgggagtgggtggagagcatgggcggcaaggtgcccccagccacccagaaggccaagtctgaggagaacaccaaggaggagaagccagacagcaagaaggtggaggaggacctgaaggcagatgagcccagcagcgaggagagtgacctggagattgacaaggagggcgtgattgaaccagacacagatgccccccaggagatgggagatgaaaatgctgagatcacagaggagatgatggaccaggccaatgacaagaaggtggccgccatcgaggccctgaatgatggagagctgcagaaggccatcgacctcttcacagatgccatcaagctgaacccccggctggccatcctgtatgccaagagggcctctgtgtttgtgaagctgcagaagcccaatgctgccatccgggactgtgaccgggccatcgagatcaacccagattctgcccagccctacaagtggaggggcaaggcccaccggctgctgggccactgggaggaggccgcccatgacctggccctggcctggacccagtag

SEQ ID NO: 172020 - DNA, 489 bp, synthetic construct
  misc_feature 1..489: note = Description of Artificial Sequence: Synthetic coding sequence
  source 1..489: mol_type = other DNA
atgggcggcaaggtgcccccagccacccagaaggccaagtctgaggagaacaccaaggaggagaagccagacagcaagaaggtggaggaggacctgaaggcagatgagcccagcagcgaggagagtgacctggagattgacaaggagggcgtcatcgagccagacacagatgccccccaggagatgggagatgaaaatgctgagatcacagaggagatgatggaccaggccaatgacaagaaggtggccgccatcgaggccctgaatgatggagagctgcagaaggccatcgacctcttcacagatgccatcaagctgaacccccggctggccatcctgtatgccaagagggcctctgtgtttgtgaagctgcagaagcccaatgctgccatccgggactgtgaccgggccatcgagatcaacccagacagcgcccagccctacaagtggaggggcaaggcccaccggctgctgggccactgggagtag

SEQ ID NO: 172021 - DNA, 366 bp, synthetic construct
  misc_feature 1..366: note = Description of Artificial Sequence: Synthetic coding sequence
  source 1..366: mol_type = other DNA
atggaccccaggaaggtgaatgagctgcgggcctttgtgaagatgtgcaagcaggaccccagcgtgctgcacacagaggagatgaggttcctgcgggagtgggtggagagcatgggcggcaaggtgcccccagccacccagaaggccaagtctgaggagaacaccaaggaggagaagccagacagcaagaaggtggaggaggacctgaaggcagatgagcccagcagcgaggagagtgacctggagattgacaaggagggcgtgattgaaccagacacagatgccccccaggagatgggagatgaaaatgctgagatcacagaggagatgatggaccaggccaatgacaagagcggctgctactag

SEQ ID NO: 172022 - DNA, 2568 bp, synthetic construct
  misc_feature 1..2568: note = Description of Artificial Sequence: Synthetic coding sequence
  source 1..2568: mol_type = other DNA
atgggcagtgaccgggccaggaagggcggcggcggccccaaggactttggagctggcctgaagtacaacagcagacatgagaaggtgaatggcctggaggagggcgtggagttcctgcctgtgaacaacgtgaagaaggtggagaagcacggccctggccgctgggtggtgctggccgctgtgctgattggcctgctgctggtgctgctgggcatcggcttcctggtgtggcacctgcagtacagagatgtgcgggtgcagaaggtgttcaacggctacatgaggatcaccaatgaaaattttgtggatgcctatgagaacagcaacagcacagaatttgtgtccctggccagcaaggtgaaggatgccctgaagctgctgtacagcggcgtgcccttcctgggcccctaccacaaggagagcgctgtgacagccttcagcgagggcagcgtcatcgcctactactggagcgagttcagcatcccccagcacctggtggaggaggccgagcgggtgatggccgaggagcgggtggtgatgctgcccccccgggcccggagcctgaagagctttgtggtgacctctgtggtggccttccccacagacagcaagacagtgcagaggacccaggacaacagctgcagctttggcctgcacgcccggggcgtggagctgatgaggttcaccaccccaggcttcccagacagcccctacccagcccacgcccgctgccagtgggccctgcggggagatgctgacagcgtgctgagcctgaccttccgcagctttgacctggccagctgtgatgagcggggcagtgacctggtgacagtgtacaacaccctgagccccatggagccccacgccctggtgcagctgtgtggcacctacccacccagctacaacctgaccttccacagcagccagaatgtgctgctgatcaccctcatcaccaacacagagcggcggcaccctggctttgaggccaccttcttccagctgcccaggatgagcagctgtggcggccgcctgaggaaggcccagggcaccttcaacagcccctactacccaggccactacccacccaacatcgactgcacctggaacatcgaggtgcccaacaaccagcacgtgaaggtgcgcttcaagttcttctacctgctggagcccggggtgcctgctggcacctgccccaaggactatgtggagatcaatggagagaagtactgtggggagaggagccagtttgtggtgaccagcaacagcaacaagatcaccgtgcgcttccacagcgaccagagctacacagacaccggcttcctggccgagtacctgtcctatgacagcagtgacccctgccccggccagttcacctgcaggacaggccgctgcatcaggaaggagctgcgctgtgatggctgggccgactgcacagaccacagtgatgagctgaactgcagctgtgatgctggccaccagttcacctgcaagaacaagttctgcaagcccctcttctgggtgtgtgacagcgtgaatgactgtggggacaacagtgatgagcagggctgcagctgcccagcccagaccttccgctgcagcaatggcaagtgcctgagcaagagccagcagtgcaatggcaaggatgactgtggagatggcagtgatgaggccagctgccccaaggtgaatgtggtgacctgcaccaagcacacctaccgctgcctgaatggcctgtgcctgagcaagggcaacccagaatgtgatggcaaggaggactgcagtgatggcagtgatgagaaggactgtgactgtggcctgcggagcttcacccggcaggcccgggtggtgggcggcacagatgctgatgaaggagagtggccctggcaggtgtccctgcacgccctgggccagggccacatctgtggggccagcctcatcagccccaactggctggtgtctgctgcccactgctacattgatgaccggggcttccgctacagcgaccccacccagtggacagccttcctgggcctgcatgaccagagccagaggtctgcccctggggtgcaggagcggcggctgaagaggatcatcagccaccccttcttcaatgacttcacctttgattatgacatcgccctgctggagctggagaagccagctgagtacagctccatggtgcggcccatctgcctgcctgatgccagccacgtgtttcctgctgggaaggccatctgggtgacaggctggggccacacccagtatggaggcaccggggccctgatcctgcagaagggggagatccgggtcatcaaccagaccacctgtgagaacctgctgccccagcagatcacccccaggatgatgtgtgtgggcttcctgtctggaggagtggacagctgccagggcgacagcggcggccccctgagctctgtggaggctgatggccgcatcttccaggccggcgtggtgtcctggggagatggctgtgcccagaggaacaagccaggagtgtacacccggctgcccctcttccgggactggatcaaggaaaatactggagtgtag

SEQ ID NO: 172023 - DNA, 3414 bp, synthetic construct
  misc_feature 1..3414: note = Description of Artificial Sequence: Synthetic coding sequence
  source 1..3414: mol_type = other DNA
atgaccatgacagccaacaagaacagcagcatcacccatggagctgggggcaccaaggccccccggggcaccctgagccgcagccagagcgtgtccccacctcctgtgctgagccccccaagaagccccatctaccccctgagtgacagcgagaccagcgcctgccgctaccccagccacagcagcagccgggtgctgctgaaggacagacaccccccagcccccagcccccagaacccccaggaccccagcccagacaccagcccccccacctgccccttcaagacagccagctttggctacctggacaggagccccagcgcctgcaagagagatgcccagaaggagagcgtgcagggcgccgcccaggatgtggccggcgtggccgcctgcctgcccctggcccagagcacccccttccctggccctgctgctggcccccggggcgtgctgctgaccaggacaggcacccgggcccacagcctgggcatccgggagaagatcagcgcctgggagggccggcgggaggccagccccaggatgtccatgtgtggggagaagcgggagggcagcggcagcgagtgggccgccagcgagggctgccccagcctgggctgccccagcgtggtgcccagcccctgcagcagcgagaagacctttgacttcaagggcctgcggaggatgagcaggaccttcagcgagtgcagctacccagagacagaggaggagggggaggccctgcctgtgcgggacagcttctaccgcctggagaagaggctgggccgctctgagcccagcgccttcctgcggggccacggcagcaggaaggagagcagcgctgtgctgagccgcatccagaagattgagcaggtgctgaaggagcagcccggccggggcctgccccagctgcccagcagctgctacagcgtggaccggggcaagaggaagacaggcaccctgggcagcctggaggagcctgctggaggagcctctgtgtctgctggcagcagagctgtgggcgtggccggcgtggccggggaggccggccccccacctgagcgggagggcagcggcagcaccaagccaggcaccccaggcaacagccccagcagccagaggctgcccagcaagagcagcctggaccctgctgtgaaccctgtgcccaagcccaagaggacctttgaatatgaggccgacaagaaccccaagagcaagcccagcaatggcctgccccccagccccaccccagctgcccccccacccctgcccagcaccccagcccctcctgtgacccggcggcccaagaaggacatgaggggccacaggaagagccagagcaggaagagctttgaatttgaagatgccagcagcctgcagagcctgtaccccagcagccccacagaaaatggaacagagaaccagcccaagtttggcagcaagagcaccctggaggagaatgcctatgaagatattgtgggggacctgcccaaggagaacccctatgaagatgtggacctgaagagcagaagagctggcaggaagagccagcagctgtctgagaacagcctggacagcctgcacaggatgtggagcccccaggacaggaagtacaacagcccccccacccagctgagcctgaagcccaacagccagagcctgcggagcggcaactggagcgagaggaagagccaccggctgccccggctgcccaagaggcacagccatgatgacatgctgctgctggcccagctgagcctgcccagcagccccagcagcctgaatgaagacagcctgagcaccaccagcgagctgctgagcagccggcgggcccggcgcatccccaagctggtgcagaggatcaacagcatctacaatgccaagaggggcaagaagaggctgaagaagctgtccatgagcagcattgaaacagccagcctgagagatgaaaattctgagagcgagagtgacagtgatgaccgcttcaaggcccacacccagaggctggtgcacatccagagcatgctgaagagggcccccagctaccgcaccctggagctggagctgctggagtggcaggagcgggagctgtttgagtactttgtggtggtgtccctgaagaagaagcccagcaggaacacctacctgcctgaggtgtcctaccagttccccaagctggaccggcccaccaagcagatgagggaggccgaggagcggctgaaggccatcccccagttctgcttcccagatgccaaggactggctgcctgtgtctgagtacagcagcgagaccttctccttcatgctgactggagaagatggcagcagaagatttggctactgccggcggctgctgcccagcggcaagggcccccggctgcctgaggtgtactgtgtgatcagccggctgggctgcttcggcctcttcagcaaggtgctggatgaggtggagcggcggcggggcatctctgctgccctggtgtaccccttcatgaggagcctgatggagagccccttccctgcccctgggaagaccatcaaggtgaagaccttcctgcccggggctggaaatgaggtgctggagctgcggcggcccatggacagccggctggagcacgtggactttgaatgtctcttcacctgcctgtctgtgcggcagctgatccgcatctttgccagcctgctgctggagaggagggtcatctttgtggccgacaagctgagcaccctgagcagctgcagccatgctgtggtggccctgctgtaccccttctcctggcagcacaccttcatccctgtgctgcctgcctccatgattgacatcgtgtgctgccccacccccttcctggtgggcctgctgagcagcagcctgcccaagctgaaggagctgcctgtggaggaggccctgatggtgaacctgggcagtgaccgcttcatccggcagatggatgatgaggacaccctgctgcccaggaagctgcaggccgccctggagcaggccctggagaggaagaatgagctgatcagccaggacagcgacagcgacagtgatgatgagtgcaacaccctgaatggcctggtgtctgaggtgttcatccgcttctttgtggagaccgtgggccactacagcctcttcctgacccagagcgagaagggggagcgggccttccagcgggaggccttcaggaagtctgtggccagcaagagcatccgccgcttcctggaggtgttcatggagagccagatgtttgctggcttcatccaggaccgggagctgaggaaatgtcgggccaagggcctgtttgagcagagggtggagcagtacctggaggagctgcctgacacagagcagagcggcatgaacaagttcctgcggggcctgggcaacaagatgaagttcctgcacaagaagaactag

SEQ ID NO: 172024 - DNA, 3414 bp, synthetic construct; identical to SEQ ID NO: 172023
  misc_feature 1..3414: note = Description of Artificial Sequence: Synthetic coding sequence
  source 1..3414: mol_type = other DNA

SEQ ID NO: 172025 - DNA, 1263 bp, synthetic construct
  misc_feature 1..1263: note = Description of Artificial Sequence: Synthetic coding sequence
  source 1..1263: mol_type = other DNA
atgaccagcaggaagaatggaggaggagcccacagctggcaggagaccccctgggagcagaggcgggccctgggcctgcagagagctgagatgaccatgacagccaacaagaacagcagcatcacccatggagctgggggcaccaaggccccccggggcaccctgagcaggaagagctttgaatttgaagatgccagcagcctgcagagcctgtaccccagcagccccacagaaaatggaacagagaaccagcccaagtttggcagcaagagcaccctggaggagaatgcctatgaagatattgtgggggacctgcccaaggagaacccctatgaagatgtggacctgaagagcagaagagctggcaggaagagccagcagctgtctgagaacagcctggacagcctgcacaggatgtggagcccccaggacaggaagtacaacagcccccccacccagctgagcctgaagcccaacagccagagcctgcggagcggcaactggagcgagaggaagagccaccggctgccccggctgcccaagaggcacagccatgatgacatgctgctgctggcccagctgagcctgcccagcagccccagcagcctgaatgaagacagcctgagcaccaccagcgagctgctgagcagccggcgggcccggcgcatccccaagctggtgcagaggatcaacagcatctacaatgccaagaggggcaagaagaggctgaagaagctgtccatgagcagcattgaaacagccagcctgagagatgaaaattctgagagcgagagtgacagtgatgaccgcttcaaggcccacacccagaggctggtgcacatccagagcatgctgaagagggcccccagctaccgcaccctggagctggagctgctggagtggcaggagcgggagctgctgagcaccctgtggtggtgccccagccgccgcagccaccgggagacccccaccagccccaagagccccaccagcttccccagaaatgtgctgagccctgccctgcacgtggccgccggcagcttctccttcctgcggctgtgcagcagcaggaccagcttcagaagatctgtgcagaccccagcctggagccccagccctgcccagctggccctgctggaccggcccaccaagcagatgagggaggccgaggagcggctgaaggccatcccccagttctgcttcccagatgccaaggactggctgcctgtgtctgagtacatgaggcccttcctgagctgctag

SEQ ID NO: 172026 - DNA, 174 bp, synthetic construct
  misc_feature 1..174: note = Description of Artificial Sequence: Synthetic coding sequence
  source 1..174: mol_type = other DNA
atgaccatgacagccaacaagaacagcagcatcacccatggagctgggggcaccaaggccccccggggcaccctgagccgcagccagagcgtgtccccacctcctgtgctgagccccccaagaagccccatctaccccctgagtgacagcgagaccagcgcctgccgctactag

SEQ ID NO: 172027 - DNA, 123 bp, synthetic construct
  misc_feature 1..123: note = Description of Artificial Sequence: Synthetic coding sequence
  source 1..123: mol_type = other DNA
atgaccatgacagccaacaagaacagcagcatcacccatggagctgggggcaccaaggccccccggggcaccctgagccgcagccagagcgtgtccccacctcctgtgctgagccccccatag

SEQ ID NO: 172028 - DNA, 144 bp, synthetic construct
  misc_feature 1..144: note = Description of Artificial Sequence: Synthetic coding sequence
  source 1..144: mol_type = other DNA
atgtggagcccccaggacaggaagtacaacagcccccccacccagctgagcctgaagcccaacagccagagcctgcggagcggcaactggagcgagaggaagagccaccggctgccccggctgcccaagaggcacagccactag

SEQ ID NO: 172029 - DNA, 219 bp, synthetic construct
  misc_feature 1..219: note = Description of Artificial Sequence: Synthetic coding sequence
  source 1..219: mol_type = other DNA
atgaccatgacagccaacaagaacagcagcatcacccatggagctgggggcaccaaggccccccggggcaccctgagcaggaagagctttgaatttgaagatgccagcagcctgcagagcctgtaccccagcagccccacagaaaatggaacagagaaccagcccaagtttggcagcaagagcaccctggaggagaatgcctatgaagatattgtgtag

SEQ ID NO: 172030 - DNA, 375 bp, synthetic construct
  misc_feature 1..375: note = Description of Artificial Sequence: Synthetic coding sequence
  source 1..375: mol_type = other DNA
atgaccatgacagccaacaagaacagcagcatcacccatggagctgggggcaccaaggccccccggggcaccctgagccgcagccagagcgtgtccccacctcctgtgctgagccccccaagaagccccatctaccccctgagtgacagcgagaccagcgcctgccgctaccccagccacagcagcagccgggtgctgctgaaggacagacaccccccagcccccagcccccagaacccccaggaccccagcccagacaccagcccccccacctgccccttcaagacagccagctttggctacctggacaggagccccagcgcctgcaagagagatgcccagaaggagagcgtgcagggcgccgcccaggactag

SEQ ID NO: 172031 - DNA, 429 bp, synthetic construct
  misc_feature 1..429: note = Description of Artificial Sequence: Synthetic coding sequence
  source 1..429: mol_type = other DNA
atgaccatgacagccaacaagaacagcagcatcacccatggagctgggggcaccaaggccccccggggcaccctgagccgcagccagagcgtgtccccacctcctgtgctgagccccccaagaagccccatctaccccctgagtgacagcgagaccagcgcctgccgctaccccagccacagcagcagccgggtgctgctgaaggacagacaccccccagcccccagcccccagaacccccaggaccccagcccagacaccagcccccccacctgccccttcaagacagccagctttggctacctggacaggagccccagcgcctgcaagagagatgcccagaaggagagcgtgcagggcgccgcccaggatgtggccggcgtggccgcctgcctgcccctggcccagagcacccccttccctggatag

SEQ ID NO: 172032 - DNA, 2154 bp, synthetic construct
  misc_feature 1..2154: note = Description of Artificial Sequence: Synthetic coding sequence
  source 1..2154: mol_type = other DNA
atgaccatgacagccaacaagaacagcagcatcacccatggagctgggggcaccaaggccccccggggcaccctgagcaggaagagctttgaatttgaagatgccagcagcctgcagagcctgtaccccagcagccccacagaaaatggaacagagaaccagcccaagtttggcagcaagagcaccctggaggagaatgcctatgaagatattgtgggggacctgcccaaggagaacccctatgaagatgtggacctgaagagcagaagagctggcaggaagagccagcagctgtctgagaacagcctggacagcctgcacaggatgtggagcccccaggacaggaagtacaacagcccccccacccagctgagcctgaagcccaacagccagagcctgcggagcggcaactggagcgagaggaagagccaccggctgccccggctgcccaagaggcacagccatgatgacatgctgctgctggcccagctgagcctgcccagcagccccagcagcctgaatgaagacagcctgagcaccaccagcgagctgctgagcagccggcgggcccggcgcatccccaagctggtgcagaggatcaacagcatctacaatgccaagaggggcaagaagaggctgaagaagctgtccatgagcagcattgaaacagccagcctgagagatgaaaattctgagagcgagagtgacagtgatgaccgcttcaaggcccacacccagaggctggtgcacatccagagcatgctgaagagggcccccagctaccgcaccctggagctggagctgctggagtggcaggagcgggagctgtttgagtactttgtggtggtgtccctgaagaagaagcccagcaggaacacctacctgcctgaggtgtcctaccagttccccaagctggaccggcccaccaagcagatgagggaggccgaggagcggctgaaggccatcccccagttctgcttcccagatgccaaggactggctgcctgtgtctgagtacagcagcgagaccttctccttcatgctgactggagaagatggcagcagaagatttggctactgccggcggctgctgcccagcggcaagggcccccggctgcctgaggtgtactgtgtgatcagccggctgggctgcttcggcctcttcagcaaggtgctggatgaggtggagcggcggcggggcatctctgctgccctggtgtaccccttcatgaggagcctgatggagagccccttccctgcccctgggaagaccatcaaggtgaagaccttcctgcccggggctggaaatgaggtgctggagctgcggcggcccatggacagccggctggagcacgtggactttgaatgtctcttcacctgcctgtctgtgcggcagctgatccgcatctttgccagcctgctgctggagaggagggtcatctttgtggccgacaagctgagcaccctgagcagctgcagccatgctgtggtggccctgctgtaccccttctcctggcagcacaccttcatccctgtgctgcctgcctccatgattgacatcgtgtgctgccccacccccttcctggtgggcctgctgagcagcagcctgcccaagctgaaggagctgcctgtggaggaggccctgatggtgaacctgggcagtgaccgcttcatccggcagatggatgatgaggacaccctgctgcccaggaagctgcaggccgccctggagcaggccctggagaggaagaatgagctgatcagccaggacagcgacagcgacagtgatgatgagtgcaacaccctgaatggcctggtgtctgaggtgttcatccgcttctttgtggagaccgtgggccactacagcctcttcctgacccagagcgagaagggggagcgggccttccagcgggaggccttcaggaagtctgtggccagcaagagcatccgccgcttcctggaggtgttcatggagagccagatgtttgctggcttcatccaggaccgggagctgaggaaatgtcgggccaagggcctgtttgagcagagggtggagcagtacctggaggagctgcctgacacagagcagagcggcatgaacaagttcctgcggggcctgggcaacaagatgaagttcctgcacaagaagaactag

SEQ ID NO: 172033 - DNA, 159 bp, synthetic construct
  misc_feature 1..159: note = Description of Artificial Sequence: Synthetic coding sequence
  source 1..159: mol_type = other DNA
atgaccatgacagccaacaagaacagcagcatcacccatggagctgggggcaccaaggccccccggggcaccctgagccgcagccagagcgtgtccccacctcctgtgctgagccccccaagaagccccatctaccccctgagtgacagcgagacctag

SEQ ID NO: 172034 - DNA, 336 bp, synthetic construct
  misc_feature 1..336: note = Description of Artificial Sequence: Synthetic coding sequence
  source 1..336: mol_type = other DNA
atgaccatgacagccaacaagaacagcagcatcacccatggagctgggggcaccaaggccccccggggcaccctgagccgcagccagagcgtgtccccacctcctgtgctgagccccccaagaagccccatctaccccctgagtgacagcgagaccagcgcctgccgctaccccagccacagcagcagccgggtgctgctgaaggacagacaccccccagcccccagcccccagaacccccaggaccccagcccagacaccagcccccccacctgccccttcaagacagccagctttggctacctggacaggagccccagcgcctgcaagaggtag

SEQ ID NO: 172035 - DNA, 162 bp, synthetic construct
  misc_feature 1..162: note = Description of Artificial Sequence: Synthetic coding sequence
  source 1..162: mol_type = other DNA
atgaccatgacagccaacaagaacagcagcatcacccatggagctgggggcaccaaggccccccggggcaccctgagccgcagccagagcgtgtccccacctcctgtgctgagccccccaagaagccccatctaccccctgagtgacagcgagaccagctag

SEQ ID NO: 172036 - DNA, 252 bp, synthetic construct
  misc_feature 1..252: note = Description of Artificial Sequence: Synthetic coding sequence
  source 1..252: mol_type = other DNA
atgaccatgacagccaacaagaacagcagcatcacccatggagctgggggcaccaaggccccccggggcaccctgagccgcagccagagcgtgtccccacctcctgtgctgagccccccaagaagccccatctaccccctgagtgacagcgagaccagcgcctgccgctaccccagccacagcagcagccgggtgctgctgaaggacagacaccccccagcccccagcccccagaacccccaggacccctag

SEQ ID NO: 172037 - DNA, 288 bp, synthetic construct
  misc_feature 1..288: note = Description of Artificial Sequence: Synthetic coding sequence
  source 1..288: mol_type = other DNA
atgaccatgacagccaacaagaacagcagcatcacccatggagctgggggcaccaaggccccccggggcaccctgagccgcagccagagcgtgtccccacctcctgtgctgagccccccaagaagccccatctaccccctgagtgacagcgagaccagcgcctgccgctaccccagccacagcagcagccgggtgctgctgaaggacagacaccccccagcccccagcccccagaacccccaggaccccagcccagacaccagcccccccacctgccccttcaagtag

SEQ ID NO: 172038 - DNA, 465 bp, synthetic construct
  misc_feature 1..465: note = Description of Artificial Sequence: Synthetic coding sequence
  source 1..465: mol_type = other DNA
atgaccatgacagccaacaagaacagcagcatcacccatggagctgggggcaccaaggccccccggggcaccctgagccgcagccagagcgtgtccccacctcctgtgctgagccccccaagaagccccatctaccccctgagtgacagcgagaccagcgcctgccgctaccccagccacagcagcagccgggtgctgctgaaggacagacaccccccagcccccagcccccagaacccccaggaccccagcccagacaccagcccccccacctgccccttcaagacagccagctttggctacctggacaggagccccagcgcctgcaagagagatgcccagaaggagagcgtgcagggcgccgcccaggatgtggccggcgtggccgcctgcctgcccctggcccagagcacccccttccctggccctgctgctggcccccggggcgtgctgctgaccaggtag

SEQ ID NO: 172039 - DNA, 540 bp, synthetic construct
  misc_feature 1..540: note = Description of Artificial Sequence: Synthetic coding sequence
  source 1..540: mol_type = other DNA
atgtggagcccccaggacaggaagtacaacagcccccccacccagctgagcctgaagcccaacagccagagcctgcggagcggcaactggagcgagaggaagagccaccggctgccccggctgcccaagaggcacagccatgatgacatgctgctgctggcccagctgagcctgcccagcagccccagcagcctgaatgaagacagcctgagcaccaccagcgagctgctgagcagccggcgggcccggcgcatccccaagctggtgcagaggatcaacagcatctacaatgccaagaggggcaagaagaggctgaagaagctgtccatgagcagcattgaaacagccagcctgagagatgaaaattctgagagcgagagtgacagtgatgaccgcttcaaggcccacacccagaggctggtgcacatccagagcatgctgaagagggcccccagctaccgcaccctggagctggagctgctggagtggcaggagcgggagctgtttgagtactttgtggtggtgtccctgaagaagtag

SEQ ID NO: 172040 - DNA, 2154 bp, synthetic construct; identical to SEQ ID NO: 172032
  misc_feature 1..2154: note = Description of Artificial Sequence: Synthetic coding sequence
  source 1..2154: mol_type = other DNA

SEQ ID NO: 172041 - DNA, 411 bp, synthetic construct
  misc_feature 1..411: note = Description of Artificial Sequence: Synthetic coding sequence
  source 1..411: mol_type = other DNA
atgaccatgacagccaacaagaacagcagcatcacccatggagctgggggcaccaaggccccccggggcaccctgagcaggaagagctttgaatttgaagatgccagcagcctgcagagcctgtaccccagcagccccacagaaaatggaacagagaaccagcccaagtttggcagcaagagcaccctggaggagaatgcctatgaagatattgtgggggacctgcccaaggagaacccctatgaagatgtggacctgaagagcagaagagctggcaggaagagccagcagctgtctgagaacagcctggacagcctgcacaggatgtggagcccccaggacaggaagtacaacagcccccccacccagctgagcctgaagcccaacagccagagcctgcggtctggatag

SEQ ID NO: 172042 - DNA, 225 bp, synthetic construct
  misc_feature 1..225: note = Description of Artificial Sequence: Synthetic coding sequence
  source 1..225: mol_type = other DNA
atgaccatgacagccaacaagaacagcagcatcacccatggagctgggggcaccaaggccccccggggcaccctgagccgcagccagagcgtgtccccacctcctgtgctgagccccccaagaagccccatctaccccctgagtgacagcgagaccagcgcctgccgctaccccagccacagcagcagccgggtgctgctgaaggacagacaccccccagcctag

SEQ ID NO: 172043 - DNA, 420 bp, synthetic construct
  misc_feature 1..420: note = Description of Artificial Sequence: Synthetic coding sequence
  source 1..420: mol_type = other DNA
atgaccatgacagccaacaagaacagcagcatcacccatggagctgggggcaccaaggccccccggggcaccctgagccgcagccagagcgtgtccccacctcctgtgctgagccccccaagaagccccatctaccccctgagtgacagcgagaccagcgcctgccgctaccccagccacagcagcagccgggtgctgctgaaggacagacaccccccagcccccagcccccagaacccccaggaccccagcccagacaccagcccccccacctgccccttcaagacagccagctttggctacctggacaggagccccagcgcctgcaagagagatgcccagaaggagagcgtgcagggcgccgcccaggatgtggccggcgtggccgcctgcctgcccctggcccagagcaccccctag

SEQ ID NO: 172044 - DNA, 1830 bp, synthetic construct
  misc_feature 1..1830: note = Description of Artificial Sequence: Synthetic coding sequence
  source 1..1830: mol_type = other DNA
atgtggagcccccaggacaggaagtacaacagcccccccacccagctgagcctgaagcccaacagccagagcctgcggagcggcaactggagcgagaggaagagccaccggctgccccggctgcccaagaggcacagccatgatgacatgctgctgctggcccagctgagcctgcccagcagccccagcagcctgaatgaagacagcctgagcaccaccagcgagctgctgagcagccggcgggcccggcgcatccccaagctggtgcagaggatcaacagcatctacaatgccaagaggggcaagaagaggctgaagaagctgtccatgagcagcattgaaacagccagcctgagagatgaaaattctgagagcgagagtgacagtgatgaccgcttcaaggcccacacccagaggctggtgcacatccagagcatgctgaagagggcccccagctaccgcaccctggagctggagctgctggagtggcaggagcgggagctgtttgagtactttgtggtggtgtccctgaagaagaagcccagcaggaacacctacctgcctgaggtgtcctaccagttccccaagctggaccggcccaccaagcagatgagggaggccgaggagcggctgaaggccatcccccagttctgcttcccagatgccaaggactggctgcctgtgtctgagtacagcagcgagaccttctccttcatgctgactggagaagatggcagcagaagatttggctactgccggcggctgctgcccagcggcaagggcccccggctgcctgaggtgtactgtgtgatcagccggctgggctgcttcggcctcttcagcaaggtgctggatgaggtggagcggcggcggggcatctctgctgccctggtgtaccccttcatgaggagcctgatggagagccccttccctgcccctgggaagaccatcaaggtgaagaccttcctgcccggggctggaaatgaggtgctggagctgcggcggcccatggacagccggctggagcacgtggactttgaatgtctcttcacctgcctgtctgtgcggcagctgatccgcatctttgccagcctgctgctggagaggagggtcatctttgtggccgacaagctgagcaccctgagcagctgcagccatgctgtggtggccctgctgtaccccttctcctggcagcacaccttcatccctgtgctgcctgcctccatgattgacatcgtgtgctgccccacccccttcctggtgggcctgctgagcagcagcctgcccaagctgaaggagctgcctgtggaggaggccctgatggtgaacctgggcagtgaccgcttcatccggcagatggatgatgaggacaccctgctgcccaggaagctgcaggccgccctggagcaggccctggagaggaagaatgagctgatcagccaggacagcgacagcgacagtgatgatgagtgcaacaccctgaatggcctggtgtctgaggtgttcatccgcttctttgtggagaccgtgggccactacagcctcttcctgacccagagcgagaagggggagcgggccttccagcgggaggccttcaggaagtctgtggccagcaagagcatccgccgcttcctggaggtgttcatggagagccagatgtttgctggcttcatccaggaccgggagctgaggaaatgtcgggccaagggcctgtttgagcagagggtggagcagtacctggaggagctgcctgacacagagcagagcggcatgaacaagttcctgcggggcctgggcaacaagatgaagttcctgcacaagaagaactag

SEQ ID NO: 172045 - DNA, 234 bp, synthetic construct
  misc_feature 1..234: note = Description of Artificial Sequence: Synthetic coding sequence
  source 1..234: mol_type = other DNA
atgaccatgacagccaacaagaacagcagcatcacccatggagctgggggcaccaaggccccccggggcaccctgagcaggaagagctttgaatttgaagatgccagcagcctgcagagcctgtaccccagcagccccacagaaaatggaacagagaaccagcccaagtttggcagcaagagcaccctggaggagaatgcctatgaagatattgtgggggacctgcccaagtag

SEQ ID NO: 172046 - DNA, 81 bp, synthetic construct
  misc_feature 1..81: note = Description of Artificial Sequence: Synthetic coding sequence
  source 1..81: mol_type = other DNA
atgaccatgacagccaacaagaacagcagcatcacccatggagctgggggcaccaaggccccccggggcaccctgtcctag

SEQ ID NO: 172047 - DNA, 1035 bp, synthetic construct
  misc_feature 1..1035: note = Description of Artificial Sequence: Synthetic coding sequence
  source 1..1035: mol_type = other DNA
atgtggagcccccaggacaggaagtacaacagcccccccacccagctgagcctgaagcccaacagccagagcctgcggagcggcaactggagcgagaggaagagccaccggctgccccggctgcccaagaggcacagccatgatgacatgctgctgctggcccagctgagcctgcccagcagccccagcagcctgaatgaagacagcctgagcaccaccagcgagctgctgagcagccggcgggcccggcgcatccccaagctggtgcagaggatcaacagcatctacaatgccaagaggggcaagaagaggctgaagaagctgtccatgagcagcattgaaacagccagcctgagagatgaaaattctgagagcgagagtgacagtgatgaccgcttcaaggcccacacccagaggctggtgcacatccagagcatgctgaagagggcccccagctaccgcaccctggagctggagctgctggagtggcaggagcgggagctgtttgagtactttgtggtggtgtccctgaagaagaagcccagcaggaacacctacctgcctgaggtgtcctaccagttccccaagctggaccggcccaccaagcagatgagggaggccgaggagcggctgaaggccatcccccagttctgcttcccagatgccaaggactggctgcctgtgtctgagtacagcagcgagaccttctccttcatgctgactggagaagatggcagcagaagatttggctactgccggcggctgctgcccagcggcaagggcccccggctgcctgaggtgtactgtgtgatcagccggctgggctgcttcggcctcttcagcaaggtgctggatgaggtggagcggcggcggggcatctctgctgccctggtgtaccccttcatgaggagcctgatggagagccccttccctgcccctgggaagaccatcaaggtgaagaccttcctgcccggggctggaaatgaggtgctggagctgcggcggcccatggacagccggctggagcacgtgtag

SEQ ID NO: 172048 - DNA, 231 bp, synthetic construct
  misc_feature 1..231: note = Description of Artificial Sequence: Synthetic coding sequence
  source 1..231: mol_type = other DNA
atgaccatgacagccaacaagaacagcagcatcacccatggagctgggggcaccaaggccccccggggcaccctgagcaggaagagctttgaatttgaagatgccagcagcctgcagagcctgtaccccagcagccccacagaaaatggaacagagaaccagcccaagtttggcagcaagagcaccctggaggagaatgcctatgaagatattgtgggggacctgccctag

SEQ ID NO: 172049 - DNA, 225 bp, synthetic construct; identical to SEQ ID NO: 172042
  misc_feature 1..225: note = Description of Artificial Sequence: Synthetic coding sequence
  source 1..225: mol_type = other DNA

SEQ ID NO: 172050 - DNA, 435 bp, synthetic construct
  misc_feature 1..435: note = Description of Artificial Sequence: Synthetic coding sequence
  source 1..435: mol_type = other DNA
atgaccatgacagccaacaagaacagcagcatcacccatggagctgggggcaccaaggccccccggggcaccctgagccgcagccagagcgtgtccccacctcctgtgctgagccccccaagaagccccatctaccccctgagtgacagcgagaccagcgcctgccgctaccccagccacagcagcagccgggtgctgctgaaggacagacaccccccagcccccagcccccagaacccccaggaccccagcccagacaccagcccccccacctgccccttcaagacagccagctttggctacctggacaggagccccagcgcctgcaagagagatgcccagaaggagagcgtgcagggcgccgcccaggatgtggccggcgtggccgcctgcctgcccctggcccagagcacccccttccctggccctgcctag

SEQ ID NO: 172051 - DNA, 3414 bp, synthetic construct; identical to SEQ ID NO: 172023
  misc_feature 1..3414: note = Description of Artificial Sequence: Synthetic coding sequence
  source 1..3414: mol_type = other DNA

SEQ ID NO: 172052 - DNA, 369 bp, synthetic construct
  misc_feature 1..369: note = Description of Artificial Sequence: Synthetic coding sequence
  source 1..369: mol_type = other DNA
atgaccatgacagccaacaagaacagcagcatcacccatggagctgggggcaccaaggccccccggggcaccctgagccgcagccagagcgtgtccccacctcctgtgctgagccccccaagaagccccatctaccccctgagtgacagcgagaccagcgcctgccgctaccccagccacagcagcagccgggtgctgctgaaggacagacaccccccagcccccagcccccagaacccccaggaccccagcccagacaccagcccccccacctgccccttcaagacagccagctttggctacctggacaggagccccagcgcctgcaagagagatgcccagaaggagagcgtgcagggcgccgcctag

SEQ ID NO: 172053 - DNA, 93 bp, synthetic construct
  misc_feature 1..93: note = Description of Artificial Sequence: Synthetic coding sequence
  source 1..93: mol_type = other DNA
atgaccatgacagccaacaagaacagcagcatcacccatggagctgggggcaccaaggccccccggggcaccctgagccgcagccagagctag

SEQ ID NO: 172054 - DNA, 1758 bp, synthetic construct
  misc_feature 1..1758: note = Description of Artificial Sequence: Synthetic coding sequence
  source 1..1758: mol_type = other DNA
atggccgaggccgccaccggcttcctggagcagctgaagagctgcatcgtgtggagctggacctacctgtggacagtgtggttcttcatcgtgctcttcctggtgtacatcctgcgggtgcccctgaagatcaatgacaacctgagcacagtgtccatgttcctgaacaccctgacccccaagttctacgtggccctgaccggcaccagcagcctcatcagcggcctcatcctgatctttgagtggtggtacttcagaaaatatggcaccagcttcatcgagcaggtgtctgtgagccacctgcggcccctgctgggcggcgtggacaacaacagcagcaacaacagcaacagcagcaatggagacagcgacagcaaccggcagagcgtgtctgagtgcaaggtgtggaggaaccccctgaacctcttcagaggagctgagtacaaccgctacacctgggtgacaggccgggagcccctgacctactatgacatgaacctgagcgcccaggaccaccagaccttcttcacctgtgacagcgaccacctgcggccagcagatgccatcatgcagaaggcctggagggagaggaacccccaggcccgcatctctgctgcccacgaggccctggagatcaatgagatccgcagccgggtggaggtgcccctcatcgccagcagcaccatctgggagatcaagctgctgcccaagtgtgccacagcctacatcctgctggccgaggaggaggccaccaccatcgccgaggccgagaagctgttcaagcaggccctgaaggctggagatggctgctaccgccgcagccagcagctgcagcaccacggcagccagtatgaggcccagcacagaagagacaccaacgtgctggtgtacatcaagaggcggctggccatgtgtgcccggcggctgggccgcacccgggaggccgtgaagatgatgagggacctgatgaaggagttccccctgctgtccatgttcaacatccacgagaacctgctggaggccctgctggagctgcaggcctatgcagatgtgcaggccgtgctggccaagtatgatgacatcagcctgcccaagagcgccaccatctgctacacagctgccctgctgaaggcccgggctgtgtctgacaagttcagccctgaggccgccagccggcggggcctgagcacagctgagatgaatgctgtggaggccatccacagagctgtggagttcaacccccacgtgcccaagtacctgctggagatgaagagcctcatcctgcccccagagcacatcctgaagagaggagacagcgaggccatcgcctatgccttcttccacctggcccactggaagagggtggagggcgccctgaacctgctgcactgcacctgggagggcaccttcaggatgatcccctaccccctggagaagggccacctgttctacccctaccccatctgcacagaaacagctgaccgggagctgctgcccagcttccacgaggtgtctgtgtaccccaagaaggagctgcccttcttcatcctcttcaccgctggcctgtgcagcttcaccgccatgctggccctgctgacccaccagtttcctgagctgatgggcgtgtttgccaaggccatgattgacatcttctgcagcgctgagttccgggactggaactgcaagagcatcttcatgagggtggaggatgagctggagatccccccagccccccagagccagcacttccagaactag

SEQ ID NO: 172055 - DNA, 1500 bp, synthetic construct
  misc_feature 1..1500: note = Description of Artificial Sequence: Synthetic coding sequence
  source 1..1500: mol_type = other DNA
atgtccatgttcctgaacaccctgacccccaagttctacgtggccctgaccggcaccagcagcctcatcagcggcctcatcctgatctttgagtggtggtacttcagaaaatatggcaccagcttcatcgagcaggtgtctgtgagccacctgcggcccctgctgggcggcgtggacaacaacagcagcaacaacagcaacagcagcaatggagacagcgacagcaaccggcagagcgtgtctgagtgcaaggtgtggaggaaccccctgaacctcttcagaggagctgagtacaaccgctacacctgggtgacaggccgggagcccctgacctactatgacatgaacctgagcgcccaggaccaccagaccttcttcacctgtgacagcgaccacctgcggccagcagatgccatcatgcagaaggcctggagggagaggaacccccaggcccgcatctctgctgcccacgaggccctggagatcaatgaatgtgccacagcctacatcctgctggccgaggaggaggccaccaccatcgccgaggccgagaagctgttcaagcaggccctgaaggctggagatggctgctacagaagaagccagcagctgcagcaccacggcagccagtatgaggcccagcaccggcgggacaccaacgtgctggtgtacatcaagaggcggctggccatgtgtgcccggcggctgggccgcacccgggaggccgtgaagatgatgagggacctgatgaaggagttccccctgctgtccatgttcaacatccacgagaacctgctggaggccctgctggagctgcaggcctatgcagatgtgcaggccgtgctggccaagtatgatgacatcagcctgcccaagagcgccaccatctgctacacagctgccctgctgaaggcccgggctgtgtctgacaagttcagccctgaggccgccagcagaagaggcctgagcacagctgagatgaatgctgtggaggccatccacagagctgtggagttcaacccccacgtgcccaagtacctgctggagatgaagagcctcatcctgcccccagagcacatcctgaagagaggagacagcgaggccatcgcctatgccttcttccacctggcccactggaagagggtggagggcgccctgaacctgctgcacagcttcaggatgatcccctaccccctggagaagggccacctgttctacccctaccccatctgcacagaaacagctgaccgggagctgctgcccagcttccacgaggtgtctgtgtaccccaagaaggagctgcccttcttcatcctcttcaccgctggcctgtgcagcttcaccgccatgctggccctgctgacccaccagtttcctgagctgatgggcgtgtttgccaaggccttcctgagcaccctgtttgcccccctgaactttgtgatggagaaggtggagagcatcctgcccagcagcctgtggcaccagctgacccgcatctag

SEQ ID NO: 172056 - DNA, 1536 bp, synthetic construct
  misc_feature 1..1536: note = Description of Artificial Sequence: Synthetic coding sequence
  source 1..1536: mol_type = other DNA
atgtttggaacagagagcagcctgtccatgttcctgaacaccctgacccccaagttctacgtggccctgaccggcaccagcagcctcatcagcggcctcatcctgatctttgagtggtggtacttcagaaaatatggcaccagcttcatcgagcaggtgtctgtgagccacctgcggcccctgctgggcggcgtggacaacaacagcagcaacaacagcaacagcagcaatggagacagcgacagcaaccggcagagcgtgtctgagtgcaaggtgtggaggaaccccctgaacctcttcagaggagctgagtacaaccgctacacctgggtgacaggccgggagcccctgacctactatgacatgaacctgagcgcccaggaccaccagaccttcttcacctgtgacagcgaccacctgcggccagcagatgccatcatgcagaaggcctggagggagaggaacccccaggcccgcatctctgctgcccacgaggccctggagatcaatgaatgtgccacagcctacatcctgctggccgaggaggaggccaccaccatcgccgaggccgagaagctgttcaagcaggccctgaaggctggagatggctgctaccgccgcagccagcagctgcagcaccacggcagccagtatgaggcccagcacagaagagacaccaacgtgctggtgtacatcaagaggcggctggccatgtgtgcccggcggctgggccgcacccgggaggccgtgaagatgatgagggacctgatgaaggagttccccctgctgtccatgttcaacatccacgagaacctgctggaggccctgctggagctgcaggcctatgcagatgtgcaggccgtgctggccaagtatgatgacatcagcctgcccaagagcgccaccatctgctacacagctgccctgctgaaggcccgggctgtgtctgacaagttcagccctgaggccgccagccggcggggcctgagcacagctgagatgaatgctgtggaggccatccacagagctgtggagttcaacccccacgtgcccaagtacctgctggagatgaagagcctcatcctgcccccagagcacatcctgaagagaggagacagcgaggccatcgcctatgccttcttccacctggcccactggaagagggtggagggcgccctgaacctgctgcactgcacctgggagggcaccttcaggatgatcccctaccccctggagaagggccacctgttctacccctaccccatctgcacagaaacagctgaccgggagctgctgcccagcttccacgaggtgtctgtgtaccccaagaaggagctgcccttcttcatcctcttcaccgctggcctgtgcagcttcaccgccatgctggccctgctgacccaccagtttcctgagctgatgggcgtgtttgccaaggccttcctgagcaccctgtttgcccccctgaactttgtgatggagaaggtggagagcatcctgcccagcagcctgtggcaccagctgacccgcatctag

SEQ ID NO: 172057 - DNA, 1605 bp, synthetic construct
  misc_feature 1..1605: note = Description of Artificial Sequence: Synthetic coding sequence
  source 1..1605: mol_type = other DNA
atgtttggaacagagagcagcctgtccatgttcctgaacaccctgacccccaagttctacgtggccctgaccggcaccagcagcctcatcagcggcctcatcctgatctttgagtggtggtacttcagaaaatatggcaccagcttcatcgagcaggtgtctgtgagccacctgcggcccctgctgggcggcgtggacaacaacagcagcaacaacagcaacagcagcaatggagacagcgacagcaaccggcagagcgtgtctgagtgcaaggtgtggaggaaccccctgaacctcttcagaggagctgagtacaaccgctacacctgggtgacaggccgggagcccctgacctactatgacatgaacctgagcgcccaggaccaccagaccttcttcacctgtgacagcgaccacctgcggccagcagatgccatcatgcagaaggcctggagggagaggaacccccaggcccgcatctctgctgcccacgaggccctggagatcaatgagatccgcagccgggtggaggtgcccctgattgccagcagcaccatctgggagatcaagctgctgcccaagtgtgccacagcctacatcctgctggccgaggaggaggccaccaccatcgccgaggccgagaagctgttcaagcaggccctgaaggctggagatggctgctacagaagaagccagcagctgcagcaccacggcagccagtatgaggcccagcaccggcgggacaccaacgtgctggtgtacatcaagaggcggctggccatgtgtgcccggcggctgggccgcacccgggaggccgtgaagatgatgagggacctgatgaaggagttccccctgctgtccatgttcaacatccacgagaacctgctggaggccctgctggagctgcaggcctatgcagatgtgcaggccgtgctggccaagtatgatgacatcagcctgcccaagagcgccaccatctgctacacagctgccctgctgaaggcccgggctgtgtctgacaagttcagccctgaggccgccagcagaagaggcctgagcacagctgagatgaatgctgtggaggccatccacagagctgtggagttcaacccccacgtgcccaagtacctgctggagatgaagagcctcatcctgcccccagagcacatcctgaagagaggagacagcgaggccatcgcctatgccttcttccacctggcccactggaagagggtggagggcgccctgaacctgctgcactgcacctgggagggcaccttcaggatgatcccctaccccctggagaagggccacctgttctacccctaccccatctgcacagaaacagctgaccgggagctgctgcccagcttccacgaggtgtctgtgtaccccaagaaggagctgcccttcttcatcctcttcaccgctggcctgtgcagcttcaccgccatgctggccctgctgacccaccagtttcctgagctgatgggcgtgtttgccaaggccttcctgagcaccctgtttgcccccctgaactttgtgatggagaaggtggagagcatcctgcccagcagcctgtggcaccagctgacccgcatctag

SEQ ID NO: 172058 - DNA, 1665 bp, synthetic construct
  misc_feature 1..1665: note = Description of Artificial Sequence: Synthetic coding sequence
  source 1..1665: mol_type = other DNA
atggccgaggccgccaccggcttcctggagcagctgaagagctgcatcgtgtggagctggacctacctgtggacagtgtggttcttcatcgtgctcttcctggtgtacatcctgcgggtgcccctgaagatcaatgacaacctgagcacagtgtccatgttcctgaacaccctgacccccaagttctacgtggccctgaccggcaccagcagcctcatcagcggcctcatcctgatctttgagtggtggtacttcagaaaatatggcaccagcttcatcgagcaggtgtctgtgagccacctgcggcccctgctgggcggcgtggacaacaacagcagcaacaacagcaacagcagcaatggagacagcgacagcaaccggcagagcgtgtctgagtgcaaggtgtggaggaaccccctgaacctcttcagaggagctgagtacaaccgctacacctgggtgacaggccgggagcccctgacctactatgacatgaacctgagcgcccaggaccaccagaccttcttcacctgtgacagcgaccacctgcggccagcagatgccatcatgcagaaggcctggagggagaggaacccccaggcccgcatctctgctgcccacgaggccctggagatcaatgaatgtgccacagcctacatcctgctggccgaggaggaggccaccaccatcgccgaggccgagaagctgttcaagcaggccctgaaggctggagatggctgctacagaagaagccagcagctgcagcaccacggcagccagtatgaggcccagcaccggcgggacaccaacgtgctggtgtacatcaagaggcggctggccatgtgtgcccggcggctgggccgcacccgggaggccgtgaagatgatgagggacctgatgaaggagttccccctgctgtccatgttcaacatccacgagaacctgctggaggccctgctggagctgcaggcctatgcagatgtgcaggccgtgctggccaagtatgatgacatcagcctgcccaagagcgccaccatctgctacacagctgccctgctgaaggcccgggctgtgtctgacaagttcagccctgaggccgccagcagaagaggcctgagcacagctgagatgaatgctgtggaggccatccacagagctgtggagttcaacccccacgtgcccaagtacctgctggagatgaagagcctcatcctgcccccagagcacatcctgaagagaggagacagcgaggccatcgcctatgccttcttccacctggcccactggaagagggtggagggcgccctgaacctgctgcactgcacctgggagggcaccttcaggatgatcccctaccccctggagaagggccacctgttctacccctaccccatctgcacagaaacagctgaccgggagctgctgcccagcttccacgaggtgtctgtgtaccccaagaaggagctgcccttcttcatcctcttcaccgctggcctgtgcagcttcaccgccatgctggccctgctgacccaccagtttcctgagctgatgggcgtgtttgccaaggccttcctgagcaccctgtttgcccccctgaactttgtgatggagaaggtggagagcatcctgcccagcagcctgtggcaccagctgacccgcatctag

SEQ ID NO: 172059 - DNA, 189 bp, synthetic construct
  misc_feature 1..189: note = Description of Artificial Sequence: Synthetic coding sequence
  source 1..189: mol_type = other DNA
atgtccatgttcctgaacaccctgacccccaagttctacgtggccctgaccggcaccagcagcctcatcagcggcctcatcctgatctttgagtggtggtacttcagaaaatatggcaccagcttcatcgagcaggtgtctgtgagccacctgcggcccctgctgggcggcgtggacaacaacagctag

SEQ ID NO: 172060 - DNA, 264 bp, synthetic construct
  misc_feature 1..264: note = Description of Artificial Sequence: Synthetic coding sequence
  source 1..264: mol_type = other DNA
atgtccatgttcctgaacaccctgacccccaagttctacgtggccctgaccggcaccagcagcctcatcagcggcctcatcctgatctttgagtggtggtacttcagaaaatatggcaccagcttcatcgagcaggtgtctgtgagccacctgcggcccctgctgggcggcgtggacaacaacagcagcaacaacagcaacagcagcaatggagacagcgacagcaaccggcagagcgtgtctgagtgcaaggtgtggaggtag

SEQ ID NO: 172061 - DNA, 1323 bp, synthetic construct
  misc_feature 1..1323: note = Description of Artificial Sequence: Synthetic coding sequence
  source 1..1323: mol_type = other DNA
atggctgaaaataatgaaaacatcagcaagaatgtggatgtgcggcccaagaccagccgcagccgctctgctgacaggaaggatggctacgtgtggagcggcaagaagctgtcctggagcaagaagtctgagagctacagtgatgctgagaccgtgaatggaattgagaagacagaggtgtccctgaggaaccaggagaggaagcacagctgcagcagcattgagctggacctggaccacagctgtggccaccgcttcctgggccgcagcctgaagcagaagctgcaggatgctgtgggccagtgcttccccatcaagaactgcagcagccgccacagcagcggcctgcccagcaagaggaagatccacatcagcgagctgatgctggacaagtgccccttccccccaagaagtgacctggccttccgctggcacttcatcaagaggcacacagcccccatcaacagcaagagtgatgagtgggtgtccacagacctgagccagacagagctgagagatggccagctgaagagaagaaacatggaggagaacatcaactgcttcagccacaccaacgtgcagccctgcgtcatcaccacagacaatgccctgtgccgggagggccccatgactggatctgtgatgaacctggtgagcaacaacagcattgaggacagcgacatggacagtgatgatgagatcctgaccctgtgcaccagcagcaggaagaggaacaagcccaagtgggacctggatgatgagatcctgcagctggagaccccacccaagtaccacacccagattgattatgtgcactgcctggtgcctgacctgctgcagatcaacaacaacccctgctactggggcgtgatggacaagtatgctgctgaggccctgctggagggcaagccagagggcaccttcctgctgcgggacagcgcccaggaggactacctgttctctgtgtccttccgccgctacagccgcagcctgcacgccagaattgagcagtggaaccacaacttctcctttgatgcccatgacccctgtgtgttccacagcccagacatcaccggcctgctggagcactacaaggaccccagcgcctgcatgttctttgagcccctgctgagcacccccctcatccgcaccttccccttcagcctgcagcacatctgcaggacagtcatctgcaactgcaccacctatgatggcattgatgccctgcccatccccagctccatgaagctgtacctgaaggagtaccactacaagagcaaggtgcgggtgctgagaattgatgcccctgagcagcagtgctag

SEQ ID NO: 172062 - DNA, 1323 bp, synthetic construct; identical to SEQ ID NO: 172061
  misc_feature 1..1323: note = Description of Artificial Sequence: Synthetic coding sequence
  source 1..1323: mol_type = other DNA

SEQ ID NO: 172063 - DNA, 1323 bp, synthetic construct; identical to SEQ ID NO: 172061
  misc_feature 1..1323: note = Description of Artificial Sequence: Synthetic coding sequence
  source 1..1323: mol_type = other DNA

SEQ ID NO: 172064 - DNA, 1611 bp, synthetic construct
  misc_feature 1..1611: note = Description of Artificial Sequence: Synthetic coding sequence
  source 1..1611: mol_type = other DNA
atggacaaggtgggcaagatgtggaacaacttcaagtaccgctgccagaacctgtttggacatgaaggaggcagccgctcagaaaatgtggacatgaacagcaaccgctgcctgtctgtgaaggagaagaacatcagcattggagacagcaccccccagcagcagagcagccccctgagagaaaatattgccctgcagctgggcctgagccccagcaagaacagcagcagaagaaaccagaactgtgccacagagatcccccagatcgtggagatcagcattgagaaggacaatgacagctgtgtgaccccaggcacccggctggcccggcgggacagctacagcagacatgccccctggggcggcaagaagaagcacagctgcagcaccaagacccagagcagcctggatgctgacaagaagtttggccgcaccaggagcggcctgcagaggcgggagcggcgctatggagtgtcctctgtgcatgacatggacagcgtgagcagcaggacagtgggcagccgcagcctgcggcagaggctgcaggacacagtgggcctgtgcttccccatgaggacctacagcaagcagagcaagcccctcttcagcaacaagaggaagatccacctgtctgagctgatgctggagaagtgccccttccctgctggcagtgacctggcccagaagtggcacctgatcaagcagcacacagcccctgtgagcccccacagcaccttctttgacacctttgaccccagcctggtgtccacagaagatgaagaagatcggctgcgggagcggcggcggctgagcattgaggagggcgtggaccccccaccaaatgcccagatccacacctttgaggccacagcccaggtgaaccccctgtacaagctgggccccaagctggcccctggcatgacagagatcagcggggacagcagcgccatcccccaggccaactgtgacagcgaggaggacaccaccaccctgtgcctgcagagccggcggcagaagcagaggcagatcagcggggacagccacacccacgtgtcccggcagggcgcctggaaggtgcacacccagattgactacatccactgcctggtgcctgacctgctgcagatcactggaaacccctgctactggggcgtgatggacagatatgaagctgaggccctgctggagggcaagccagagggcaccttcctgctgcgggacagcgcccaggaggactacctgttctctgtgtccttccgccgctacaacagaagcctgcacgcccgcatcgagcagtggaaccacaacttctcctttgatgcccatgacccctgtgtgttccacagcagcacagtgacaggcctgctggagcactacaaggaccccagcagctgcatgttctttgagcccctgctgaccatcagcctgaacagaaccttccccttcagcctgcagtacatctgccgggccgtcatctgccgctgcaccacctatgatggcattgatggcctgcccctgcccagcatgctgcaggacttcctgaaggagtaccactacaagcagaaggtgcgggtgcgctggctggagcgggagcctgtgaaggccaagtag

SEQ ID NO: 172065 - DNA, 1611 bp, synthetic construct; identical to SEQ ID NO: 172064
  misc_feature 1..1611: note = Description of Artificial Sequence: Synthetic coding sequence
  source 1..1611: mol_type = other DNA

SEQ ID NO: 172066 - DNA, 3264 bp, synthetic construct
  misc_feature 1..3264: note = Description of Artificial Sequence: Synthetic coding sequence
  source 1..3264: mol_type = other DNA
atgtctgacagcgaggacagcaacttcagcgaggaggaggacagcgagaggagcagtgatggagaggaggccgaggtggatgaggagcggcgctctgctgctggcagcgagaaggaggaggagccagaagatgaggaggaggaggaggaggaggaggagtatgatgaggaggaggaggaggaggatgatgaccggccccccaagaagcccaggcatggaggcttcatcctggatgaagcagatgtggatgatgaatatgaagatgaggaccagtgggaggatggagctgaggacatcctggagaaggaggagattgaggccagcaacatcgacaacgtggtgctggatgaagatagaagtggggcccggcggctgcagaacctgtggagggaccagcgggaggaggagctgggggagtactacatgaagaagtatgccaagagctctgtgggggagaccgtgtatggaggcagtgatgagctgagtgatgacatcacccagcagcagctgctgcccggggtgaaggaccccaacctgtggacagtgaagtgcaagatcggggaggagcgggccacagccatcagcctgatgaggaagttcatcgcctaccagttcacagacacccccctgcagatcaagtctgtggtggcccctgagcacgtgaagggctacatctacgtggaggcctacaagcagacccacgtgaagcaggccattgaaggagtgggcaacctgcggctgggctactggaaccagcagatggtgcccatcaaggagatgacagatgtgctgaaggtggtgaaggaggtggccaacctgaagcccaagtcctgggtgcggctgaagaggggcatctacaaggatgacatcgcccaggtggactatgtggagcccagccagaacaccatcagcctgaagatgatccccagaattgattatgaccgcatcaaggccaggatgagcctgaaggactggtttgccaagaggaagaagttcaagaggcctccccagaggctgtttgatgctgagaagatccgcagcctgggcggagatgtggccagtgatggagacttcctgatctttgagggcaaccgctacagcaggaagggcttcctgttcaagagctttgccatgtctgctgtgatcacagaaggagtgaagcccaccctgtctgagctggagaagtttgaggaccagcctgagggcatcgacctggaggtggtgacagagagcacaggcaaggagcgggagcacaacttccagcccggggacaacgtggaggtgtgtgagggggagctgatcaacctgcagggcaagatcctgtctgtggatggcaacaagatcaccatcatgcccaagcatgaggacctgaaggacatgctggagttccctgcccaggagctgaggaagtacttcaagatgggagaccacgtgaaggtgattgctggccgctttgaaggagacaccggcctcatcgtgcgggtggaggagaactttgtgatcctcttcagtgacctgaccatgcatgagctgaaggtgctgccccgggacctgcagctgtgcagcgagacagccagcggcgtggatgtgggcggccagcacgagtggggcgagctggtgcagctggacccccagacagtgggcgtcatcgtgcggctggagcgggagaccttccaggtgctgaacatgtatggcaaggtggtgacagtgcgccaccaggccgtgaccaggaagaaggacaacagatttgctgtggccctggacagcgagcagaacaacatccacgtgaaggacatcgtgaaggtgattgatggcccccacagcggccgggagggggagatccgccacctgttccgcagctttgccttcctgcactgcaagaagctggtggagaatggaggcatgtttgtgtgcaagaccaggcacctggtgctggccggcggcagcaagcccagagatgtgaccaacttcaccgtgggcggctttgcccccatgagcccccgcatcagcagccccatgcaccccagcgctgggggccagaggggcggcttcggcagccctgggggcggcagcggcggcatgagccggggccggggccggcgggacaatgaactcatcggccagacagtgcgcatcagccagggcccctacaagggctacatcggcgtggtgaaggatgccacagagagcacagcccgggtggagctgcacagcacctgccagaccatctctgtggaccggcagaggctgaccaccgtgggcagccggcggcctgggggcatgaccagcacctacggccgcacccccatgtatggcagccagacccccatgtatggcagcggcagcaggacccccatgtatggcagccagacccccctgcaggacggcagcaggaccccccactacggcagccagacccccctgcatgatggcagcaggaccccagcccagagcggggcctgggaccccaacaaccccaacacccccagcagagctgaggaggagtatgaatatgcctttgatgatgagcccacccccagcccccaggcctatggaggcacccccaacccccagaccccaggctacccagaccccagcagcccccaggtgaacccccagtacaacccccagaccccaggcaccccagccatgtacaacacagaccagttcagcccctatgctgcccccagcccccagggcagctaccagcccagccccagcccccagagctaccaccaggtggcccccagccctgctggctaccagaacacccacagccctgccagctaccaccccacccccagccccatggcctaccaggccagccccagccccagccctgtgggctacagccccatgacccctggggcccccagccctgggggctacaacccccacaccccaggcagcggcatcgagcagaacagcagtgactgggtgaccacagacatccaggtgaaggtgcgggacacctacctggacacccaggtggtgggccagacaggagtcatccgctctgtgactggaggcatgtgcagcgtgtacctgaaggacagcgagaaggtggtgtccatcagcagcgagcacctggagcccatcacccccaccaagaacaacaaggtgaaggtgatcctgggagaagatcgggaggccaccggggtgctgctgagcattgatggagaagatggcatcgtgaggatggacctggatgagcagctgaagatcctgaacctgcgcttcctgggcaagctgctggaggcctag

SEQ ID NO: 172067 - DNA, 3198 bp, synthetic construct
  misc_feature 1..3198: note = Description of Artificial Sequence: Synthetic coding sequence
  source 1..3198: mol_type = other DNA
atgtctgacagcgaggacagcaacttcagcgaggaggaggacagcgagaggagcagtgatggagaggaggccgaggtggatgaggagcggcgctctgctgctggcagcgagaaggaggatgatgaccggccccccaagaagcccaggcatggaggcttcatcctggatgaagcagatgtggatgatgaatatgaagatgaggaccagtgggaggatggagctgaggacatcctggagaaggaggagattgaggccagcaacatcgacaacgtggtgctggatgaagatagaagtggggcccggcggctgcagaacctgtggagggaccagcgggaggaggagctgggggagtactacatgaagaagtatgccaagagctctgtgggggagaccgtgtatggaggcagtgatgagctgagtgatgacatcacccagcagcagctgctgcccggggtgaaggaccccaacctgtggacagtgaagtgcaagatcggggaggagcgggccacagccatcagcctgatgaggaagttcatcgcctaccagttcacagacacccccctgcagatcaagtctgtggtggcccctgagcacgtgaagggctacatctacgtggaggcctacaagcagacccacgtgaagcaggccattgaaggagtgggcaacctgcggctgggctactggaaccagcagatggtgcccatcaaggagatgacagatgtgctgaaggtggtgaaggaggtggccaacctgaagcccaagtcctgggtgcggctgaagaggggcatctacaaggatgacatcgcccaggtggactatgtggagcccagccagaacaccatcagcctgaagatgatccccagaattgattatgaccgcatcaaggccaggatgagcctgaaggactggtttgccaagaggaagaagttcaagaggcctccccagaggctgtttgatgctgagaagatccgcagcctgggcggagatgtggccagtgatggagacttcctgatctttgagggcaaccgctacagcaggaagggcttcctgttcaagagctttgccatgtctgctgtgatcacagaaggagtgaagcccaccctgtctgagctggagaagtttgaggaccagcctgagggcatcgacctggaggtggtgacagagagcacaggcaaggagcgggagcacaacttccagcccggggacaacgtggaggtgtgtgagggggagctgatcaacctgcagggcaagatcctgtctgtggatggcaacaagatcaccatcatgcccaagcatgaggacctgaaggacatgctggagttccctgcccaggagctgaggaagtacttcaagatgggagaccacgtgaaggtgattgctggccgctttgaaggagacaccggcctcatcgtgcgggtggaggagaactttgtgatcctcttcagtgacctgaccatgcatgagctgaaggtgctgccccgggacctgcagctgtgcagcgagacagccagcggcgtggatgtgggcggccagcacgagtggggcgagctggtgcagctggacccccagacagtgggcgtcatcgtgcggctggagcgggagaccttccaggtgctgaacatgtatggcaaggtggtgacagtgcgccaccaggccgtgaccaggaagaaggacaacagatttgctgtggccctggacagcgagcagaacaacatccacgtgaaggacatcgtgaaggtgattgatggcccccacagcggccgggagggggagatccgccacctgttccgcagctttgccttcctgcactgcaagaagctggtggagaatggaggcatgtttgtgtgcaagaccaggcacctggtgctggccggcggcagcaagcccagagatgtgaccaacttcaccgtgggcggctttgcccccatgagcccccgcatcagcagccccatgcaccccagcgctgggggccagaggggcggcttcggcagccctgggggcggcagcggcggcatgagccggggccggggccggcgggacaatgaactcatcggccagacagtgcgcatcagccagggcccctacaagggctacatcggcgtggtgaaggatgccacagagagcacagcccgggtggagctgcacagcacctgccagaccatctctgtggaccggcagaggctgaccaccgtgggcagccggcggcctgggggcatgaccagcacctacggccgcacccccatgtatggcagccagacccccatgtatggcagcggcagcaggacccccatgtatggcagccagacccccctgcaggacggcagcaggaccccccactacggcagccagacccccctgcatgatggcagcaggaccccagcccagagcggggcctgggaccccaacaaccccaacacccccagcagagctgaggaggagtatgaatatgcctttgatgatgagcccacccccagcccccaggcctatggaggcacccccaacccccagaccccaggctacccagaccccagcagcccccaggtgaacccccagtacaacccccagaccccaggcaccccagccatgtacaacacagaccagttcagcccctatgctgcccccagcccccagggcagctaccagcccagccccagcccccagagctaccaccaggtggcccccagccctgctggctaccagaacacccacagccctgccagctaccaccccacccccagccccatggcctaccaggccagccccagccccagccctgtgggctacagccccatgacccctggggcccccagccctgggggctacaacccccacaccccaggcagcggcatcgagcagaacagcagtgactgggtgaccacagacatccaggtgaaggtgcgggacacctacctggacacccaggtggtgggccagacaggagtcatccgctctgtgactggaggcatgtgcagcgtgtacctgaaggacagcgagaaggtggtgtccatcagcagcgagcacctggagcccatcacccccaccaagaacaacaaggtgaaggtgatcctgggagaagatcgggaggccaccggggtgctgctgagcattgatggagaagatggcatcgtgaggatggacctggatgagcagctgaagatcctgaacctgcgcttcctgggcaagctgctggaggcctag

SEQ ID NO: 172068 - DNA, 3252 bp, synthetic construct
  misc_feature 1..3252: note = Description of Artificial Sequence: Synthetic coding sequence
  source 1..3252: mol_type = other DNA
atgtctgacagcgaggacagcaacttcagcgaggaggaggacagcgagaggagcagtgatggagaggaggccgaggtggatgaggagcggcgctctgctgctggcagcgagaaggaggaggagccagaagatgaggaggaggaggaggaggaggaggagtatgatgaggaggaggaggaggaggatgatgaccggccccccaagaagcccaggcatggaggcttcatcctggatgaagcagatgtggatgatgaatatgaagatgaggaccagtgggaggatggagctgaggacatcctggagaaggccagcaacatcgacaacgtggtgctggatgaagatagaagtggggcccggcggctgcagaacctgtggagggaccagcgggaggaggagctgggggagtactacatgaagaagtatgccaagagctctgtgggggagaccgtgtatggaggcagtgatgagctgagtgatgacatcacccagcagcagctgctgcccggggtgaaggaccccaacctgtggacagtgaagtgcaagatcggggaggagcgggccacagccatcagcctgatgaggaagttcatcgcctaccagttcacagacacccccctgcagatcaagtctgtggtggcccctgagcacgtgaagggctacatctacgtggaggcctacaagcagacccacgtgaagcaggccattgaaggagtgggcaacctgcggctgggctactggaaccagcagatggtgcccatcaaggagatgacagatgtgctgaaggtggtgaaggaggtggccaacctgaagcccaagtcctgggtgcggctgaagaggggcatctacaaggatgacatcgcccaggtggactatgtggagcccagccagaacaccatcagcctgaagatgatccccagaattgattatgaccgcatcaaggccaggatgagcctgaaggactggtttgccaagaggaagaagttcaagaggcctccccagaggctgtttgatgctgagaagatccgcagcctgggcggagatgtggccagtgatggagacttcctgatctttgagggcaaccgctacagcaggaagggcttcctgttcaagagctttgccatgtctgctgtgatcacagaaggagtgaagcccaccctgtctgagctggagaagtttgaggaccagcctgagggcatcgacctggaggtggtgacagagagcacaggcaaggagcgggagcacaacttccagcccggggacaacgtggaggtgtgtgagggggagctgatcaacctgcagggcaagatcctgtctgtggatggcaacaagatcaccatcatgcccaagcatgaggacctgaaggacatgctggagttccctgcccaggagctgaggaagtacttcaagatgggagaccacgtgaaggtgattgctggccgctttgaaggagacaccggcctcatcgtgcgggtggaggagaactttgtgatcctcttcagtgacctgaccatgcatgagctgaaggtgctgccccgggacctgcagctgtgcagcgagacagccagcggcgtggatgtgggcggccagcacgagtggggcgagctggtgcagctggacccccagacagtgggcgtcatcgtgcggctggagcgggagaccttccaggtgctgaacatgtatggcaaggtggtgacagtgcgccaccaggccgtgaccaggaagaaggacaacagatttgctgtggccctggacagcgagcagaacaacatccacgtgaaggacatcgtgaaggtgattgatggcccccacagcggccgggagggggagatccgccacctgttccgcagctttgccttcctgcactgcaagaagctggtggagaatggaggcatgtttgtgtgcaagaccaggcacctggtgctggccggcggcagcaagcccagagatgtgaccaacttcaccgtgggcggctttgcccccatgagcccccgcatcagcagccccatgcaccccagcgctgggggccagaggggcggcttcggcagccctgggggcggcagcggcggcatgagccggggccggggccggcgggacaatgaactcatcggccagacagtgcgcatcagccagggcccctacaagggctacatcggcgtggtgaaggatgccacagagagcacagcccgggtggagctgcacagcacctgccagaccatctctgtggaccggcagaggctgaccaccgtgggcagccggcggcctgggggcatgaccagcacctacggccgcacccccatgtatggcagccagacccccatgtatggcagcggcagcaggacccccatgtatggcagccagacccccctgcaggacggcagcaggaccccccactacggcagccagacccccctgcatgatggcagcaggaccccagcccagagcggggcctgggaccccaacaaccccaacacccccagcagagctgaggaggagtatgaatatgcctttgatgatgagcccacccccagcccccaggcctatggaggcacccccaacccccagaccccaggctacccagaccccagcagcccccaggtgaacccccagtacaacccccagaccccaggcaccccagccatgtacaacacagaccagttcagcccctatgctgcccccagcccccagggcagctaccagcccagccccagcccccagagctaccaccaggtggcccccagccctgctggctaccagaacacccacagccctgccagctaccaccccacccccagccccatggcctaccaggccagccccagccccagccctgtgggctacagccccatgacccctggggcccccagccctgggggctacaacccccacaccccaggcagcggcatcgagcagaacagcagtgactgggtgaccacagacatccaggtgaaggtgcgggacacctacctggacacccaggtggtgggccagacaggagtcatccgctctgtgactggaggcatgtgcagcgtgtacctgaaggacagcgagaaggtggtgtccatcagcagcgagcacctggagcccatcacccccaccaagaacaacaaggtgaaggtgatcctgggagaagatcgggaggccaccggggtgctgctgagcattgatggagaagatggcatcgtgaggatggacctggatgagcagctgaagatcctgaacctgcgcttcctgggcaagctgctggaggcctag

SEQ ID NO: 172069 - DNA, 3264 bp, synthetic construct; identical to SEQ ID NO: 172066
  misc_feature 1..3264: note = Description of Artificial Sequence: Synthetic coding sequence
  source 1..3264: mol_type = other DNA

SEQ ID NO: 172070 - DNA, 3264 bp, synthetic construct; identical to SEQ ID NO: 172066
  misc_feature 1..3264: note = Description of Artificial Sequence: Synthetic coding sequence
  source 1..3264: mol_type = other DNA

SEQ ID NO: 172071 - DNA, 3264 bp, synthetic construct; identical to SEQ ID NO: 172066
  misc_feature 1..3264: note = Description of Artificial Sequence: Synthetic coding sequence
  source 1..3264: mol_type = other DNA

SEQ ID NO: 172072 - DNA, 5181 bp, synthetic construct
  misc_feature 1..5181: note = Description of Artificial Sequence: Synthetic coding sequence
  source 1..5181: mol_type = other DNA
atgtctgactttgtggagagcgaggccgaggagagcgaggaggagtacaatgatgaaggagaggtggtgccccgggtgaccaagaagtttgtggaggaggaggatgatgatgaggaggaggaggaggagaacctggatgaccaggatgagcagggcaacctgaagggcttcatcaatgatgatgatgatgaagatgaaggagaagaagatgagggcagtgacagcggggacagtgaagatgatgtgggccacaagaagaggaagaggaccagctttgatgaccggctggaggatgatgactttgacctgattgaggagaacctgggcgtgaaggtgaagaggggccagaagtacagaagagtgaagaagatgtctgatgatgaagatgatgatgaggaggagtatggcaaggaggagcacgagaaggaggccatcgccgaggagatcttccaggatggagagggggaggagggccaggaggccatggaggcccccatggcccctcctgaggaggaggaggaggatgatgaggagagtgacattgatgacttcatcgtggatgatgatggccagcccctgaagaagcccaagtggaggaagaagctgcccggctacacagatgctgccctgcaggaggcccaggagatctttggagtggactttgattatgatgaatttgagaagtacaatgaatatgatgaggagctggaggaggagtatgaatatgaagatgatgaagctgagggggagatccgggtgcggcccaagaagaccaccaagaagagggtgtccagaagaagcatctttgagatgtatgagcccagcgagctggagagcagccacctgacagaccaggacaatgagatccgggccacagacctgcctgagcgcttccagctgcggagcatccctgtgaagggagcagaagatgatgagctggaggaggaggccgactggatctacagaaatgcctttgccacccccaccatcagcctgcaggagagctgtgactacctggaccggggccagcctgccagcagcttcagcaggaagggccccagcaccatccagaagatcaaggaggccctgggcttcatgaggaaccagcactttgaggtgcccttcatcgccttctacaggaaggagtatgtggagcctgagctgcacatcaatgacctgtggagggtgtggcagtgggatgagaagtggacccagctgcgcatcagaaaagaaaacctgacccggctgtttgagaagatgcaggcctaccagtatgagcagatctctgctgaccctgacaagcccctggctgatggcatccgggccctggacaccacagacatggagcggctgaaggatgtgcagagcatggatgagctgaaggatgtgtacaaccacttcctgctgtactacggccgggacatccccaagatgcagaatgctgccaaggccagcaggaagaagctgaagagggtgcgggaggagggagatgaggagggggagggagatgaagcagaagatgaggagcagaggggccctgagctgaagcaggccagccggcgggacatgtacaccatctgccagagcgctggcctggatggcctggccaagaagtttggcctgaccccagagcagtttggagagaacctgcgggacagctaccagagacatgaaacagagcagtttcctgctgagcccctggagctggccaaggactatgtgtgcagccagttccccaccccagaggccgtgctggagggcgcccgctacatggtggccctgcagatcgcccgggagcccctggtgcggcaggtgctgcggcagaccttccaggagcgggccaagctgaacatcacccccaccaagaagggcaggaaggatgtggatgaggcccactacgcctacagcttcaagtacctgaagaacaagcctgtgaaggagctgagagatgaccagttcctgaagatctgcctggccgaggatgagggcctgctgaccacagacatcagcattgacctgaagggcgtggagggctatggaaatgaccagacctactttgaggagatcaagcagttctactacagagatgagttcagccaccaggtgcaggagtggaaccggcagaggaccatggccatcgagcgggccctgcagcagttcctgtatgtgcagatggccaaggagctgaagaacaagctgctggccgaggccaaggagtatgtgatcaaggcctgcagcaggaagctgtacaactggctgcgggtggccccctacagaccagaccagcaggtggaggaggatgatgacttcatggatgagaaccagggcaagggcatccgggtgctgggcatcgccttcagcagcgcccgggaccaccctgtgttctgtgccctggtgaatggagagggggaggtgacagacttcctgcggctgccccacttcaccaagagaagaacagcctggagggaggaggagcgggagaagaaggcccaggacatcgagaccctgaagaagttcctgctgaacaagaagccccacgtggtgacagtggccggagaaaatagagatgcccagatgctgattgaagatgtgaagagaattgtgcatgagctggaccagggccagcagctgagcagcattggagtggagctggtggacaatgagctggccatcctgtacatgaacagcaagaagtctgaggccgagttccgggactacccacctgtgctgcggcaggccgtgtccctggcccggcgcatccaggaccccctgattgaatttgcccaggtgtgcagcagtgatgaggacatcctgtgcctgaagttccaccccctgcaggagcacgtggtgaaggaggagctgctgaatgccctgtactgtgagttcatcaacagagtgaatgaggtgggcgtggatgtgaacagagccatcgcccacccctacagccaggccctgatccagtatgtgtgtggcctgggccccaggaagggcacccacctgctgaagatcctgaagcagaacaacacccggctggagagcaggacccagctggtgaccatgtgccacatgggccccaaggtgttcatgaactgtgccggcttcctgaagattgacacagccagcctgggggacagcacagacagctacatcgaggtgctggatggcagccgggtgcaccctgagacctatgagtgggccaggaagatggctgtggatgccctggagtatgatgaatctgcagaagatgccaacccagctggggccctggaggagatcctggagaaccctgagcggctgaaggacctggacctggatgcctttgctgaggagctggagcggcagggctacggggacaagcacatcaccctgtatgacatccgggcagagctgagctgccgctacaaggacctgaggacagcctaccgcagccccaacacagaggagatcttcaacatgctgaccaaggagaccccagagaccttctacatcggcaagctgatcatctgcaatgtgacaggcatcgcccacagaagaccccagggcgagagctatgaccaggccatcagaaatgatgaaacaggcctgtggcagtgccccttctgccagcaggacaacttccctgagctgtctgaggtgtggaaccactttgacagcggcagctgccccggccaggccatcggcgtgaagacccggctggacaacggggtgacaggcttcatccccaccaagttcctgagtgacaaggtggtgaagaggcctgaggagcgggtgaaggtgggcatgacagtgcactgccgcatcatgaagattgacatcgagaagttctctgctgacctgacctgcaggaccagtgacctgatggacagaaataatgagtggaagctgcccaaggacacctactatgactttgatgctgaggccgctgaccacaagcaggaggaggacatgaagaggaagcagcagaggaccacctacatcaagagggtcatcgcccaccccagcttccacaacatcaacttcaagcaggccgagaagatgatggagaccatggaccagggagatgtgatcatccggcccagcagcaagggggagaaccacctgactgtgacctggaaggtgtctgatggcatctaccagcacgtggatgtgcgggaggagggcaaggaaaatgccttcagcctgggcgccaccctgtggatcaacagcgaggagtttgaggacctggatgaaattgtggcccgctacgtgcagcccatggccagctttgcccgggacctgctgaaccacaagtactaccaggactgcagcggcggggacaggaagaagctggaggagctgctgatcaagaccaagaaggagaagcccaccttcatcccctacttcatctgtgcctgcaaggagctgcccgggaagttcctgctgggctaccagccccggggcaagccccgcatcgagtatgtgacagtgaccccagagggcttccgctaccggggccagatcttccccaccgtgaatggcctcttccgctggttcaaggaccactaccaggaccctgtgcccggcatcacccccagcagcagcagcaggaccaggaccccagccagcatcaatgccaccccagccaacatcaacctggccgacctgaccagggctgtgaatgccctgccccagaacatgaccagccagatgttttctgccatcgctgctgtgacaggccagggccagaaccccaatgccaccccagcccagtgggccagcagccagtatggctatggaggcagcggcggcggcagcagcgcctaccacgtgttccccaccccagcccagcagcctgtggccacccccctgatgacccccagctacagctacaccacccccagccagcccatcaccaccccccagtaccaccagctgcaggccagcaccaccccccagagcgcccaggcccagccccagcccagcagcagcagccggcagaggcagcagcagcccaagagcaacagccacgccgccatcgactggggcaagatggccgagcagtggctgcaggagaaggaggccgagaggaggaagcagaagcagaggctgaccccccggcccagccccagccccatgattgagagcacccccatgagcattgctggagatgccacccccctgctggatgagatggacagatag

SEQ ID NO: 172073 - DNA, 2181 bp, synthetic construct
  misc_feature 1..2181: note = Description of Artificial Sequence: Synthetic coding sequence
  source 1..2181: mol_type = other DNA
atgtctgactttgtggagagcgaggccgaggagagcgaggaggagtacaatgatgaaggagaggtggtgccccgggtgaccaagaagtttgtggaggaggaggatgatgatgaggaggaggaggaggagaacctggatgaccaggatgagcagggcaacctgaagggcttcatcaatgatgatgatgatgaagatgaaggagaagaagatgagggcagtgacagcggggacagtgaagatgatgtgggccacaagaagaggaagaggaccagctttgatgaccggctggaggatgatgactttgacctgattgaggagaacctgggcgtgaaggtgaagaggggccagaagtacagaagagtgaagaagatgtctgatgatgaagatgatgatgaggaggagtatggcaaggaggagcacgagaaggaggccatcgccgaggagatcttccaggatggagagggggaggagggccaggaggccatggaggcccccatggcccctcctgaggaggaggaggaggatgatgaggagagtgacattgatgacttcatcgtggatgatgatggccagcccctgaagaagcccaagtggaggaagaagctgcccggctacacagatgctgccctgcaggaggcccaggagatctttggagtggactttgattatgatgaatttgagaagtacaatgaatatgatgaggagctggaggaggagtatgaatatgaagatgatgaagctgagggggagatccgggtgcggcccaagaagaccaccaagaagagggtgtccagaagaagcatctttgagatgtatgagcccagcgagctggagagcagccacctgacagaccaggacaatgagatccgggccacagacctgcctgagcgcttccagctgcggagcatccctgtgaagggagcagaagatgatgagctggaggaggaggccgactggatctacagaaatgcctttgccacccccaccatcagcctgcaggagagctgtgactacctggaccggggccagcctgccagcagcttcagcaggaagggccccagcaccatccagaagatcaaggaggccctgggcttcatgaggaaccagcactttgaggtgcccttcatcgccttctacaggaaggagtatgtggagcctgagctgcacatcaatgacctgtggagggtgtggcagtgggatgagaagtggacccagctgcgcatcagaaaagaaaacctgacccggctgtttgagaagatgcaggcctaccagtatgagcagatctctgctgaccctgacaagcccctggctgatggcatccgggccctggacaccacagacatggagcggctgaaggatgtgcagagcatggatgagctgaaggatgtgtacaaccacttcctgctgtactacggccgggacatccccaagatgcagaatgctgccaaggccagcaggaagaagctgaagagggtgcgggaggagggagatgaggagggggagggagatgaagcagaagatgaggagcagaggggccctgagctgaagcaggccagccggcgggacatgtacaccatctgccagagcgctggcctggatggcctggccaagaagtttggcctgaccccagagcagtttggagagaacctgcgggacagctaccagagacatgaaacagagcagtttcctgctgagcccctggagctggccaaggactatgtgtgcagccagttccccaccccagaggccgtgctggagggcgcccgctacatggtggccctgcagatcgcccgggagcccctggtgcggcaggtgctgcggcagaccttccaggagcgggccaagctgatgacccccagctacagctacaccacccccagccagcccatcaccaccccccagtaccaccagctgcaggccagcaccaccccccagagcgcccaggcccagccccagcccagcagcagcagccggcagaggcagcagcagcccaagagcaacagccacgccgccatcgactggggcaagatggccgagcagtggctgcaggagaaggaggccgagaggaggaagcagaagcagaggctgaccccccggcccagccccagccccatgattgagagcacccccatgagcattgctggagatgccacccccctgctggatgagatggacagatag

SEQ ID NO: 172074 - DNA, 2361 bp, synthetic construct
  misc_feature 1..2361: note = Description of Artificial Sequence: Synthetic coding sequence
  source 1..2361: mol_type = other DNA
atgtccttcagccgggccctgctgtgggcccggctgcctgctggccggcaggccggccaccgggccgccatctgcagcgccctgcggccccacttcggccccttccctggggtgctgggccaggtgtctgtgctggccacagccagcagcagcgccagcggcggcagcaagatccccaacaccagcctgtttgtgcccctgactgtgaagccccagggccccagcgcagatggagatgtgggcgctgagctgacccggcccctggacaagaatgaggtgaagaaggtgctggacaagttctacaagaggaaggagatccagaagctgggcgctgactatggcctggatgcccggctcttccaccaggccttcatctccttcaggaactacatcatgcagagccacagcctggatgtggacatccacatcgtgctgaatgacatctgcttcggggccgcccatgctgatgacctcttccccttcttcctgcggcatgccaagcagatcttccctgtgctggactgcaaggatgacctgaggaagatcagtgacctgcgcatcccccccaactggtacccagatgcccgggccatgcagaggaagatcatcttccacagcggccccaccaacagcggcaagacctaccacgccatccagaagtacttcagcgccaagagcggcgtgtactgcggccccctgaagctgctggcccacgagatctttgagaagagcaatgctgctggggtgccctgtgacctggtgactggagaggagcgggtgacagtgcagcccaacgggaagcaggccagccacgtgtcctgcaccgtggagatgtgcagcgtgaccaccccctatgaggtggccgtgattgatgagatccagatgatccgggaccctgcccggggctgggcctggacccgggccctgctgggcctgtgtgccgaggaggtgcacctgtgtggggagcctgctgccatcgacctggtgatggagctgatgtacaccaccggggaggaggtggaggtgcgggactacaagaggctgacccccatctctgtgctggaccacgccctggagagcctggacaacctgcggcctggggactgcatcgtgtgcttcagcaagaatgacatctacagcgtgtcccggcagatcgagatccggggcctggagagcgctgtgatctacggcagcctgcccccaggcaccaagctggcccaggccaagaagttcaatgaccccaatgacccctgcaagatcctggtggccacagatgccatcggcatgggcctgaacctgagcatccgccgcatcatcttctacagcctcatcaagcccagcatcaatgaaaaaggagagcgggagctggagcccatcaccaccagccaggccctgcagattgctggccgggccggccgcttcagcagccgcttcaaggagggggaggtgaccaccatgaaccacgaggacctgagcctgctgaaggagatcctgaagaggcctgtggaccccatccgggccgccggcctgcaccccacagctgagcagatcgagatgtttgcctaccacctgcctgatgccaccctgagcaacctgattgacatctttgtggacttcagccaggtggatggccagtactttgtgtgcaacatggatgacttcaagttctctgctgagctgatccagcacatccccctgagcctgcgggtgcgctacgtgttctgcacagcccccatcaacaagaagcagccctttgtgtgcagcagcctgctgcagtttgcccggcagtacagcagaaatgagcccctgacctttgcctggctgcggcgctacatcaagtggcccctgctgccccccaagaacatcaaggacctgatggacctggaggccgtgcatgatgtgctggacctgtacctgtggctgagctaccgcttcatggacatgtttcctgatgccagcctcatccgggacctgcagaaggagctggatggcatcatccaggatggagtgcacaacatcaccaagctgatcaagatgtctgagacccacaagctgctgaacctggagggcttccccagcggcagccagagccggctgagcggcaccctgaagagccaggcccggaggacccggggcaccaaggccctgggcagcaaggccacagagccccccagcccagatgctggggagctgagcctggccagccggctggtgcagcagggcctgctgaccccagacatgctgaagcagctggagaaggagtggatgacccagcagacagagcacaacaaggagaagacagaaagtggcacccaccccaagggcaccaggaggaagaagaaggagccagacagcgactag

SEQ ID NO: 172075 - DNA, 792 bp, synthetic construct
  misc_feature 1..792: note = Description of Artificial Sequence: Synthetic coding sequence
  source 1..792: mol_type = other DNA
atgtccttcagccgggccctgctgtgggcccggctgcctgctggccggcaggccggccaccgggccgccatctgcagcgccctgcggccccacttcggccccttccctggggtgctgggccaggtgtctgtgctggccacagccagcagcagcgccagcggcggcagcaagatccccaacaccagcctgtttgtgcccctgactgtgaagccccagggccccagcgcagatggagatgtgggcgctgagctgacccggcccctggacaagaatgaggtggccgtgattgatgagatccagatgatccgggaccctgcccggggctgggcctggacccgggccctgctgggcctgtgtgccgaggaggtgcacctgtgtggggagcctgctgccatcgacctggtgatggagctgatgtacaccaccggggaggaggtggaggtgcgggactacaagaggctgacccccatctctgtgctggaccacgccctggagagcctggacaacctgcggcctggggactgcatcgtgtgcttcagcaagaatgacatctacagcgtgtcccggcagatcgagatccggggcctggagagcgctgtgatctacggcagcctgcccccaggcaccaagctggcccaggccaagaagttcaatgaccccaatgacccctgcaagatcctggtggccacagatgccatcggcatgggcctgaacctgagcatccgccgcatcatcttctacagcctcatcaagcccagcatcaatgaaaaaggagagcgggagctggagtag

SEQ ID NO: 172076 - DNA, 1233 bp, synthetic construct
  misc_feature 1..1233: note = Description of Artificial Sequence: Synthetic coding sequence
  source 1..1233: mol_type = other DNA
atggctgctgtgggcgctgaggcccggggggcctggtgtgtgccctgcctggtgtccctggacaccctgcaggagctgtgcaggaaggagaagctgacctgcaagagcatcggcatcaccaagaggaacctgaacaactatgaggtggagtacctgtgtgactacaaggtggtgaaggacatggagtactacctggtgaagtggaagggctggccagacagcaccaacacctgggagcccctgcagaacctgaagtgccccctgctgctgcagcagttcagcaatgacaagcacaactacctgagccaggtgaagaagggcaaggccatcacccccaaggacaacaacaagaccctgaagccagccatcgccgagtacatcgtgaagaaggccaagcagagaattgccctgcagcgctggcaggatgagctgaacagaaggaagaaccacaagggcatgatctttgtggagaacacagtggacctggagggccccccaagtgacttctactacatcaatgagtacaagccagcccctggcatcagcctggtgaatgaggccaccttcggctgcagctgcacagactgcttcttccagaagtgctgcccagctgaggccggcgtgctgctggcctacaacaagaaccagcagatcaagatccccccaggcacccccatctatgagtgcaacagccgctgccagtgtggccctgactgccccaacagaattgtgcagaagggcacccagtacagcctgtgcatcttccgcaccagcaatggccggggctggggcgtgaagaccctggtgaagatcaagaggatgagctttgtgatggagtatgtgggggaggtgatcaccagcgaggaggccgagcggcggggccagttctatgacaacaagggcatcacctacctgtttgacctggactatgaaagtgatgagttcaccgtggatgctgcccgctatggaaatgtgagccactttgtgaaccacagctgtgaccccaacctgcaggtgttcaacgtgttcatcgacaacctggacacccggctgccccgcatcgccctcttcagcaccaggaccatcaatgctggggaggagctgacctttgactaccagatgaagggcagcggggacatcagcagtgacagcattgaccacagccctgccaagaagagggtgaggacagtgtgcaagtgtggggctgtgacctgccggggctacctgaactag

SEQ ID NO: 172077 - DNA, 693 bp, synthetic construct
  misc_feature 1..693: note = Description of Artificial Sequence: Synthetic coding sequence
  source 1..693: mol_type = other DNA
atggctgctgtgggcgctgaggcccggggggcctggtgtgtgccctgcctggtgtccctggacaccctgcaggagctgtgcaggaaggagaagctgacctgcaagagcatcggcatcaccaagaggaacctgaacaactatgaggtggagtacctgtgtgactacaaggtggtgaaggacatggagtactacctggtgaagtggaagggctggccagacagcaccaacacctgggagcccctgcagaacctgaagtgccccctgctgctgcagcagttcagcaatgacaagcacaactacctgagccaggtgatcaccagcgaggaggccgagcggcggggccagttctatgacaacaagggcatcacctacctgtttgacctggactatgaaagtgatgagttcaccgtggatgctgcccgctatggaaatgtgagccactttgtgaaccacagctgtgaccccaacctgcaggtgttcaacgtgttcatcgacaacctggacacccggctgccccgcatcgccctcttcagcaccaggaccatcaatgctggggaggagctgacctttgactaccagatgaagggcagcggggacatcagcagtgacagcattgaccacagccctgccaagaagagggtgaggacagtgtgcaagtgtggggctgtgacctgccggggctacctgaactag

SEQ ID NO: 172078 - DNA, 459 bp, synthetic construct
  misc_feature 1..459: note = Description of Artificial Sequence: Synthetic coding sequence
  source 1..459: mol_type = other DNA
atggagtactacctggtgaagtggaagggctggccagacagcaccaacacctgggagcccctgcagaacctgaagtgccccctgctgctgcagcagttcagcaatgacaagcacaactacctgagccaggtgatcaccagcgaggaggccgagcggcggggccagttctatgacaacaagggcatcacctacctgtttgacctggactatgaaagtgatgagttcaccgtggatgctgcccgctatggaaatgtgagccactttgtgaaccacagctgtgaccccaacctgcaggtgttcaacgtgttcatcgacaacctggacacccggctgccccgcatcgccctcttcagcaccaggaccatcaatgctggggaggagctgacctttgactaccagatgaagggcagcggggacatcagcagtgacagcattgaccacagccctgccaagaagtag

SEQ ID NO: 172079 - DNA, 1053 bp, synthetic construct
  misc_feature 1..1053: note = Description of Artificial Sequence: Synthetic coding sequence
  source 1..1053: mol_type = other DNA
atggagtactacctggtgaagtggaagggctggccagacagcaccaacacctgggagcccctgcagaacctgaagtgccccctgctgctgcagcagttcagcaatgacaagcacaactacctgagccaggtgaagaagggcaaggccatcacccccaaggacaacaacaagaccctgaagccagccatcgccgagtacatcgtgaagaaggccaagcagagaattgccctgcagcgctggcaggatgagctgaacagaaggaagaaccacaagggcatgatctttgtggagaacacagtggacctggagggccccccaagtgacttctactacatcaatgagtacaagccagcccctggcatcagcctggtgaatgaggccaccttcggctgcagctgcacagactgcttcttccagaagtgctgcccagctgaggccggcgtgctgctggcctacaacaagaaccagcagatcaagatccccccaggcacccccatctatgagtgcaacagccgctgccagtgtggccctgactgccccaacagaattgtgcagaagggcacccagtacagcctgtgcatcttccgcaccagcaatggccggggctggggcgtgaagaccctggtgaagatcaagaggatgagctttgtgatggagtatgtgggggaggtgatcaccagcgaggaggccgagcggcggggccagttctatgacaacaagggcatcacctacctgtttgacctggactatgaaagtgatgagttcaccgtggatgctgcccgctatggaaatgtgagccactttgtgaaccacagctgtgaccccaacctgcaggtgttcaacgtgttcatcgacaacctggacacccggctgccccgcatcgccctcttcagcaccaggaccatcaatgctggggaggagctgacctttgactaccagatgaagggcagcggggacatcagcagtgacagcattgaccacagccctgccaagaagagggtgaggacagtgtgcaagtgtggggctgtgacctgccggggctacctgaactag

SEQ ID NO: 172080 - DNA, 2658 bp, synthetic construct
  misc_feature 1..2658: note = Description of Artificial Sequence: Synthetic coding sequence
  source 1..2658: mol_type = other DNA
atgaagtggctgggggagagcaagatcatggtggtgaatggaagaagaaatggaggcaagctgagcaatgaccaccagcagaaccagagcaagctgcagcacacaggcaaggacaccctgaaggccggcaagaatgctgtggagaggaggagcaaccgctgcaatggaaacagcggctttgagggccagagccgctacgtgcccagcagcggcatgtctgccaaggagctgtgtgaaaatgatgacctggccaccagcctggtgctggacccctacctgggcttccagacccacaagatgaacaccagcgccttccccagccgcagcagccgccacttcagcaagagtgacagcttcagccacaacaaccctgtgcgcttccggcccatcaagggccggcaggaggagctgaaggaggtgattgagcgcttcaagaaggatgagcacctggagaaggccttcaagtgcctgaccagcggggagtgggcccggcactacttcctgaacaagaacaagatgcaggagaagctgttcaaggagcacgtgttcatctacctgaggatgtttgccacagattctggctttgagatcctgccctgcaaccgctacagcagcgagcagaatggagccaagatcgtggccaccaaggagtggaagagaaatgacaagattgagctgctggtgggctgcatcgccgagctgtctgaaattgaggagaacatgctgctgcggcatggagaaaatgacttctctgtgatgtacagcaccaggaagaactgtgcccagctgtggctgggccctgctgccttcatcaaccacgactgccggcccaactgcaagtttgtgtccacaggccgggacacagcctgtgtgaaggccctgcgggacatcgagcctggagaggagatcagctgctactatggagatggcttcttcggggagaacaatgagttctgtgagtgctacacctgtgagcggcggggcactggagccttcaagagccgggtgggcctgcctgccccagcccctgtgatcaacagcaaatatggcctgcgggagacagacaagaggctgaaccggctgaagaagctgggggacagcagcaagaacagcgacagccagagcgtgagcagcaacacagatgctgacaccacccaggagaagaacaatgccaccagcaacaggaagagctctgtgggcgtgaagaagaacagcaagagcaggaccctgacccggcagagcatgagccgcatcccagccagcagcaacagcaccagcagcaagctgacccacatcaacaacagccgggtgcccaagaagctgaagaagccagccaagcccctgctgagcaagatcaagctgaggaaccactgcaagaggctggagcagaagaatgccagcaggaagctggagatgggcaacctggtgctgaaggagcccaaggtggtgctgtacaagaacctgcccatcaagaaggacaaggagcctgagggccctgcccaggccgctgtggccagcggctgcctgaccaggcatgctgcccgggagcaccggcagaaccctgtgcggggggcccacagccagggcgagagcagcccctgcacctacatcaccaggagatctgtgaggaccaggaccaacctgaaggaggccagtgacatcaagctggagcccaacaccctgaatggctacaagagctctgtgacagagccctgcccagattctggagagcagctgcagcctgcccctgtgctgcaggaggaggagctggcccacgagacagcccagaagggggaggccaagtgccacaagagtgacaccggcatgagcaagaagaagagccggcagggcaagctggtgaagcagtttgccaagattgaggagagcacccctgtgcatgacagccctgggaaggatgatgctgtgcctgacctgatgggcccccacagcgaccagggcgagcacagcggcaccgtgggcgtgcctgtgtcctacacagactgtgcccccagccctgtgggctgcagcgtggtgaccagtgacagcttcaagaccaaggacagcttcagaacagccaagagcaagaagaagaggcgcatcaccaggtatgatgcccagctgatcctggagaacaacagcggcatccccaagctgaccctgcggaggagacatgacagcagcagcaagaccaatgaccaggagaatgatggcatgaacagcagcaagatcagcatcaagctgagcaaggaccatgacaatgacaacaacctgtatgtggccaagctgaacaacggcttcaacagcggcagcggcagcagcagcaccaagctgaagatccagctgaagagagatgaggagaacagaggcagctacacagagggcctgcatgaaaatggagtgtgctgcagcgaccccctgagcctgctggagagcaggatggaggtggatgactacagccagtatgaggaggagagcacagatgacagcagcagcagtgaaggagatgaggaggaggatgattatgatgatgactttgaagatgacttcatccccctgcccccagccaagaggctgcggctgattgtgggcaaggacagcattgatattgacatcagcagcagaagaagagaggaccagagcctgcggctgaatgcctag

SEQ ID NO: 172081 - DNA, 1182 bp, synthetic construct
  misc_feature 1..1182: note = Description of Artificial Sequence: Synthetic coding sequence
  source 1..1182: mol_type = other DNA
atgaagtggctgggggagagcaagatcatggtggtgaatggaagaagaaatggaggcaagctgagcaatgaccaccagcagaaccagagcaagctgcagcacacaggcaaggacaccctgaaggccggcaagaatgctgtggagaggaggagcaaccgctgcaatggaaacagcggctttgagggccagagccgctacgtgcccagcagcggcatgtctgccaaggagctgtgtgaaaatgatgacctggccaccagcctggtgctggacccctacctgggcttccagacccacaagatgaacaccagcgccttccccagccgcagcagccgccacttcagcaagagtgacagcttcagccacaacaaccctgtgcgcttccggcccatcaagggccggcaggaggagctgaaggaggtgattgagcgcttcaagaaggatgagcacctggagaaggccttcaagtgcctgaccagcggggagtgggcccggcactacttcctgaacaagaacaagatgcaggagaagctgttcaaggagcacgtgttcatctacctgaggatgtttgccacagattctggctttgagatcctgccctgcaaccgctacagcagcgagcagaatggagccaagatcgtggccaccaaggagtggaagagaaatgacaagattgagctgctggtgggctgcatcgccgagctgtctgaaattgaggagaacatgctgctgcggcatggagaaaatgacttctctgtgatgtacagcaccaggaagaactgtgcccagctgtggctgggccctgctgccttcatcaaccacgactgccggcccaactgcaagtttgtgtccacaggccgggacacagcctgtgtgaaggccctgcgggacatcgagcctggagaggagatcagctgctactatggagatggcttcttcggggagaacaatgagttctgtgagtgctacacctgtgagcggcggggcactggagccttcaagagccgggtgggcctgcctgccccagcccctgtgatcaacagcaaatatggcctgcgggagacagacaagaggctgaaccggctgaagaagctgggggacagcagcaagaacagcgacagccagagcgtgagcagcaacacagatgctgacaccacccaggagaagaacaatgccagcaagtag

SEQ ID NO: 172082 - DNA, 1182 bp, synthetic construct; identical to SEQ ID NO: 172081
  misc_feature 1..1182: note = Description of Artificial Sequence: Synthetic coding sequence
  source 1..1182: mol_type = other DNA

SEQ ID NO: 172083 - DNA, 357 bp, synthetic construct
  misc_feature 1..357: note = Description of Artificial Sequence: Synthetic coding sequence
  source 1..357: mol_type = other DNA
atgaagtggctgggggagagcaagatcatggtggtgaatggaagaagaaatggaggcaagctgagcaatgaccaccagcagaaccagagcaagctgcagcacacaggcaaggacaccctgaaggccggcaagaatgctgtggagaggaggagcaaccgctgcaatggaaacagcggctttgagggccagagccgctacgtgcccagcagcggcatgtctgccaaggagctgtgtgaaaatgatgacctggccaccagcctggtgctggacccctacctgggcttccagacccacaagatgaacaccagcgccttccccagccgcagcagccgccacttcagcaagagtgacagctag

SEQ ID NO: 172084 - DNA, 1389 bp, synthetic construct
  misc_feature 1..1389: note = Description of Artificial Sequence: Synthetic coding sequence
  source 1..1389: mol_type = other DNA
atgggccctgacagagtgacagcccgggagctgtgtgaaaatgatgacctggccaccagcctggtgctggacccctacctgggcttccgcacccacaagatgaatgtgtcccctgtgccccccctgcggcggcagcagcacctgcggagcgccctggagaccttcctgcggcagagggacctggaggccgcctaccgggccctgaccctgggcggctggacagcccgctacttccagagccggggcccccggcaggaggccgccctgaagacccacgtgtaccgctacctgcgggccttcctgcctgagagcggcttcaccatcctgccctgcacccgctacagcatggagaccaatggagccaagatcgtgtccacccgggcctggaagaagaatgagaagctggagctgctggtgggctgcatcgccgagctgcgggaggctgatgagggcctgctgcgggctggagaaaatgacttcagcatcatgtacagcaccaggaagaggtctgcccagctgtggctgggccctgctgccttcatcaaccacgactgcaagcccaactgcaagtttgtgcctgcagatggaaatgctgcctgtgtgaaggtgctgcgggacatcgagcctggagatgaggtgacctgcttctatggagagggcttcttcggggagaagaatgagcactgtgagtgccacacctgtgagaggaaaggagagggcgccttccgcacccggccccgggagcccgccctgcccccccggcccctggacaagtaccagctgcgggagaccaagaggcggctgcagcagggcctggacagcggcagccggcagggcctgctgggcccccgggcctgtgtgcaccccagccccctgcggcgggaccccttctgtgccgcctgccagcccctgcggctgcctgcctgcagcgcccggccagacaccagccccctgtggctgcagtggctgccccagccccagccccgggtgcggcccaggaagagaagaagaccccggccccggcgggcccctgtgctgagcacccaccacgccgcccgggtgtccctgcaccgctggggcggctgcggcccccactgccgcctgcggggggaggccctggtggccctgggccagccccctcatgcccgctgggccccccagcaggactggcactgggcccggcgctatggcctgccctacgtggtgcgggtggacctgcggcggctggccccagcccccccagccaccccagccccagctggcaccccaggccccatcctgatccccaagcaggccctggcctttgcccccttcagcccccccaagaggctgcggctggtggtgagccacggcagcattgacctggatgtgggcggggaggagctgtag

SEQ ID NO: 172085 - DNA, 390 bp, synthetic construct
  misc_feature 1..390: note = Description of Artificial Sequence: Synthetic coding sequence
  source 1..390: mol_type = other DNA
atgccccggcggggccgctggctgagctgcagccctgaggccgagggcatccggcgggtgggcagccgggccgccctgcgggtgcaccccctggagcaccggccccgctggggcacccctgggggcatgaccaagggcagccgcttcctggcccctgagagcgagctgtcctggggccctggagatgccaccccaggcctgtggttcttcatcagtgatggagtgggggaggacctgtggaacagcgctggctggagctctgtgcctgagggcttcggccagaggatgaggggccctggcctgaccccccacacagatgctggaggagatggcaacaagaggaggcacagcgagcggctgtgccgggcctctgtgctgcagcccccatag

SEQ ID NO: 172086 - DNA, 744 bp, synthetic construct
  misc_feature 1..744: note = Description of Artificial Sequence: Synthetic coding sequence
  source 1..744: mol_type = other DNA
atgcacctggcccggctggtgggcagctgcagcctgctgctgctgctgggcgccctgagcggctgggccgccagtgatgaccccatcgagaaggtgattgagggcatcaacagaggcctgagcaatgctgagcgggaggtgggcaaggccctggatggcatcaacagcggcatcacccatgctggccgggaggtggagaaggtgttcaacggcctgagcaacatgggcagccacacaggcaaggagctggacaagggcgtgcagggcctgaaccacggcatggacaaggtggcccacgagatcaaccacggcatcggccaggccggcaaggaggccgagaagctgggccatggagtgaacaatgctgctggccaggccggcaaggaggccgacaaggctgtgcagggcttccacactggagtgcaccaggccggcaaggaggccgagaagctgggccagggcgtgaaccacgccgctgaccaggccggcaaggaggtggagaagctgggccagggcgcccaccacgccgccggccaggccggcaaggagctgcagaatgcccacaatggagtgaaccaggccagcaaggaggccaaccagctgctgaatggaaaccaccagagcggcagcagcagccaccagggcggggccaccaccacccccctggccagcggggcctctgtgaacacccccttcatcaacctgcctgccctgtggaggtctgtggccaacatcatgccctag

SEQ ID NO: 172087 - DNA, 1773 bp, synthetic construct
  misc_feature 1..1773: note = Description of Artificial Sequence: Synthetic coding sequence
  source 1..1773: mol_type = other DNA
atgcacctggcccggctggtgggcagctgcagcctgctgctgctgctgggcgccctgagcggctgggccgccagtgatgaccccatcgagaaggtgattgagggcatcaacagaggcctgagcaatgctgagcgggaggtgggcaaggccctggatggcatcaacagcggcatcacccatgctggccgggaggtggagaaggtgttcaacggcctgagcaacatgggcagccacacaggcaaggagctggacaagggcgtgcagggcctgaaccacggcatggacaaggtggcccacgagatcaaccacggcatcggccaggccggcaaggaggccgagaagctgggccatggagtgaacaatgctgctggccaggtgggcaaggaggccgacaagctgatccaccacggcgtgcaccacggggccaaccaggccggcagcgaggccggcaagtttggccagggcgtggacaatgctgctggccaggccggaaatgaagctggccgcttcggccagggcgtgcaccacgccgccggccaggccggaaatgaagctggccgcttcggccagggcgtgcaccacgccgccggccaggccggaaatgaagctggccgcttcggccagggcgcccaccacggcctgtctgagggctggaaggagacagagaagtttggccagggcatccaccacgccgccggccaggtgggcaaggaggccgagaagtttggccagggcgcccaccacgccgccggccaggccggaaatgaagctggccgcttcggccagggcgtgcaccacggcctgtctgagggctggaaggagacagagaagtttggccagggcgtgcaccacacagctggccaggtgggcaaggaggccgagaagtttggccagggcgcccaccacgccgccggccaggccggaaatgaagctggccgcttcggccagggcgcccaccacgccgccggccaggccggaaatgaagctggccgcttcggccagggcgtgcaccacggcctgtctgagggctggaaggagacagagaagtttggccagggcgtgcaccacgccgccagccagtttgggaaggagacagagaagctgggccacggcgtgcaccacggcgtgaatgaggcctggaaggaggccgagaagtttggccagggcgtgcaccacgccgccagccaggtgggcaaggaggaggacagagtggtgcagggcctgcaccacggcgtgtcccaggccggccgggaggccggccagtttggacatgacatccaccacacagctggccaggccggcaaggagggggacattgctgtgcacggcgtgcagcccggggtgcatgaagctgggaaggaggccggccagtttggccagggcgtgcaccacaccctggagcaggccggcaaggaggccgacaaggctgtgcagggcttccacactggagtgcaccaggccggcaaggaggccgagaagctgggccagggcgtgaaccacgccgctgaccaggccggcaaggaggtggagaagctgggccagggcgcccaccacgccgccggccaggccggcaaggagctgcagaatgcccacaacggggtgaaccaggccagcaaggaggccaaccagctgctgaatggaaaccaccagagcggcagcagcagccaccagggcggggccaccaccacccccctggccagcggggcctctgtgaacacccccttcatcaacctgcctgccctgtggaggtctgtggccaacatcatgccctag

SEQ ID NO: 172088 - DNA, 288 bp, synthetic construct
  misc_feature 1..288: note = Description of Artificial Sequence: Synthetic coding sequence
  source 1..288: mol_type = other DNA
atgggcagccacacaggcaaggagctggacaagggcgtgcagggcctgaaccacggcatggacaaggtggcccacgagatcaaccacggcatcggccaggccggcaaggaggccgagaagctgggccatggagtgaacaatgctgctggccagggcaaccaccagagcggcagcagcagccaccagggcggggccaccaccacccccctggccagcggggcctctgtgaacacccccttcatcaacctgcctgccctgtggaggtctgtggccaacatcatgccctag

SEQ ID NO: 172089 - DNA, 738 bp, synthetic construct
  misc_feature 1..738: note = Description of Artificial Sequence: Synthetic coding sequence
  source 1..738: mol_type = other DNA
atgtggctgtgccccctggccctgaacctgatcctgatggccgccagcggggctgtgtgtgaggtgaaggatgtgtgtgtgggcagccctggcatccctggcaccccaggcagccacggcctgcccggcagagatggaagagatggcctgaagggggaccccggccccccaggccccatgggccccccaggagagatgccctgccccccaggaaatgatggcctgcccggggcccctggcatccctggagaatgtggggagaagggggagcctggagagcggggccccccaggcctgcctgcccacctggatgaggagctgcaggccaccctgcatgacttccgccaccagatcctgcagaccaggggggccctgagcctgcagggcagcatcatgacagtgggggagaaggtgttcagcagcaatggccagagcatcacctttgatgccatccaggaggcctgtgcccgggccggcggcagaattgctgtgcccaggaaccctgaggagaatgaggccatcgccagctttgtgaagaagtacaacacctacgcctacgtgggcctgacagagggccccagccctggggacttccgctacagtgatggcacccctgtgaactacaccaactggtacagaggagagcctgctggccggggcaaggagcagtgtgtggagatgtacacagatggccagtggaatgacaggaactgcctgtacagccggctgaccatctag

SEQ ID NO: 172090 - DNA, 570 bp, synthetic construct
  misc_feature 1..570: note = Description of Artificial Sequence: Synthetic coding sequence
  source 1..570: mol_type = other DNA
atgggccccccaggagagatgccctgccccccaggaaatgatggcctgcccggggcccctggcatccctggagaatgtggggagaagggggagcccggggagcggggccccccaggcctgcctgcccacctggatgaggagctgcaggccaccctgcatgacttccgccaccagatcctgcagaccaggggggccctgagcctgcagggcagcatcatgacagtgggggagaaggtgttcagcagcaatggccagagcatcacctttgatgccatccaggaggcctgtgcccgggccggcggcagaattgctgtgcccagaaatccagaagaaaatgaggccatcgccagctttgtgaagaagtacaacacctacgcctacgtgggcctgacagagggccccagccctggggacttccgctacagtgatggcacccctgtgaactacaccaactggtacagaggagagcccgccggccggggcaaggagcagtgtgtggagatgtacacagatggccagtggaatgacaggaactgcctgtacagccggctgaccatctgtgagttctag

SEQ ID NO: 172091 - DNA, 747 bp, synthetic construct
  misc_feature 1..747: note = Description of Artificial Sequence: Synthetic coding sequence
  source 1..747: mol_type = other DNA
atgtggctgtgccccctggccctgaacctgatcctgatggccgccagcggggctgtgtgtgaggtgaaggatgtgtgtgtgggcagccctggcatccctggcaccccaggcagccacggcctgcccggcagagatggaagagatggcctgaagggggaccccggccccccaggccccatgggccccccaggagagatgccctgccccccaggaaatgatggcctgcccggggcccctggcatccctggagaatgtggggagaagggggagcctggagagcggggccccccaggcctgcctgcccacctggatgaggagctgcaggccaccctgcatgacttccgccaccagatcctgcagaccaggggggccctgagcctgcagggcagcatcatgacagtgggggagaaggtgttcagcagcaatggccagagcatcacctttgatgccatccaggaggcctgtgcccgggccggcggcagaattgctgtgcccaggaaccctgaggagaatgaggccatcgccagctttgtgaagaagtacaacacctacgcctacgtgggcctgacagagggccccagccctggggacttccgctacagtgatggcacccctgtgaactacaccaactggtacagaggagagcctgctggccggggcaaggagcagtgtgtggagatgtacacagatggccagtggaatgacaggaactgcctgtacagccggctgaccatctgtgagttctag

SEQ ID NO: 172092 - DNA, 747 bp, synthetic construct; identical to SEQ ID NO: 172091
  misc_feature 1..747: note = Description of Artificial Sequence: Synthetic coding sequence
  source 1..747: mol_type = other DNA

SEQ ID NO: 172093 - DNA, 792 bp, synthetic construct
  misc_feature 1..792: note = Description of Artificial Sequence: Synthetic coding sequence
  source 1..792: mol_type = other DNA
atgaggccctgccaggtgcctggagctgccaccggcccccgggccatgtggctgtgccccctggccctgaacctgatcctgatggccgccagcggggctgtgtgtgaggtgaaggatgtgtgtgtgggcagccctggcatccctggcaccccaggcagccacggcctgcccggcagagatggaagagatggcctgaagggggaccccggccccccaggccccatgggccccccaggagagatgccctgccccccaggaaatgatggcctgcccggggcccctggcatccctggagaatgtggggagaagggggagcccggggagcggggccccccaggcctgcctgcccacctggatgaggagctgcaggccaccctgcatgacttccgccaccagatcctgcagaccaggggggccctgagcctgcagggcagcatcatgacagtgggggagaaggtgttcagcagcaatggccagagcatcacctttgatgccatccaggaggcctgtgcccgggccggcggcagaattgctgtgcccagaaatccagaagaaaatgaggccatcgccagctttgtgaagaagtacaacacctacgcctacgtgggcctgacagagggccccagccctggggacttccgctacagtgatggcacccctgtgaactacaccaactggtacagaggagagcccgccggccggggcaaggagcagtgtgtggagatgtacacagatggccagtggaatgacaggaactgcctgtacagccggctgaccatctgtgagttctag

SEQ ID NO: 172094 - DNA, 747 bp, synthetic construct; identical to SEQ ID NO: 172091
  misc_feature 1..747: note = Description of Artificial Sequence: Synthetic coding sequence
  source 1..747: mol_type = other DNA

SEQ ID NO: 172095 - DNA, 477 bp, synthetic construct
  misc_feature 1..477: note = Description of Artificial Sequence: Synthetic coding sequence
  source 1..477: mol_type = other DNA
atgtggctgtgccccctggccctgaacctgatcctgatggccgccagcggggctgtgtgtgaggtgaaggatgtgtgtgtgggcagccctggcatccctggcaccccaggcagccacggcctgcccggcagagatggaagagatggcctgaagggggaccccggccccccaggccccatgggccccccaggagagatgccctgccccccaggaaatgatggcctgcccggggcccctggcatccctggagaatgtggggagaagggggagcctggagagcggggccccccaggcctgcctgcccacctggatgaggagctgcaggccaccctgcatgacttccgccaccagatcctgcagaccaggggggccctgagcctgcagggcagcatcatgacagtgggggagaaggtgttcagcagcaatggccagagcatcacctttgatgccatccaggaggcctgtgcccgggcctag

SEQ ID NO: 172096 - DNA, 477 bp, synthetic construct; identical to SEQ ID NO: 172095
  misc_feature 1..477: note = Description of Artificial Sequence: Synthetic coding sequence
  source 1..477: mol_type = other DNA

SEQ ID NO: 172097 - DNA, 747 bp, synthetic construct
  misc_feature 1..747: note = Description of Artificial Sequence: Synthetic coding sequence
  source 1..747: mol_type = other DNA
atgtggctgtgccccctggccctgaccctcatcctgatggccgccagcggggccgcctgtgaggtgaaggatgtgtgtgtgggcagccctggcatccctggcaccccaggcagccacggcctgcccggcagagatggaagagatggagtgaagggggaccccggccccccaggccccatgggccccccaggagagaccccctgccccccaggcaacaacggcctgcccggggcccctggggtgcctggagagcggggggagaagggggaggccggggagcggggccccccaggcctgcctgcccacctggatgaggagctgcaggccaccctgcatgacttccgccaccagatcctgcagaccaggggggccctgagcctgcagggcagcatcatgacagtgggggagaaggtgttcagcagcaatggccagagcatcacctttgatgccatccaggaggcctgtgcccgggccggcggcagaattgctgtgcccaggaaccctgaggagaatgaggccatcgccagctttgtgaagaagtacaacacctacgcctacgtgggcctgacagagggccccagccctggggacttccgctacagtgatggcacccctgtgaactacaccaactggtacagaggagagcctgctggccggggcaaggagcagtgtgtggagatgtacacagatggccagtggaatgacaggaactgcctgtacagccggctgaccatctgtgagttctag

SEQ ID NO: 172098 - DNA, 747 bp, synthetic construct; identical to SEQ ID NO: 172097
  misc_feature 1..747: note = Description of Artificial Sequence: Synthetic coding sequence
  source 1..747: mol_type = other DNA

SEQ ID NO: 172099 - DNA, 477 bp, synthetic construct
  misc_feature 1..477: note = Description of Artificial Sequence: Synthetic coding sequence
  source 1..477: mol_type = other DNA
atgtggctgtgccccctggccctgaccctcatcctgatggccgccagcggggccgcctgtgaggtgaaggatgtgtgtgtgggcagccctggcatccctggcaccccaggcagccacggcctgcccggcagagatggaagagatggagtgaagggggaccccggccccccaggccccatgggccccccaggagagaccccctgccccccaggcaacaacggcctgcccggggcccctggggtgcctggagagcggggggagaagggggaggccggggagcggggccccccaggcctgcctgcccacctggatgaggagctgcaggccaccctgcatgacttccgccaccagatcctgcagaccaggggggccctgagcctgcagggcagcatcatgacagtgggggagaaggtgttcagcagcaatggccagagcatcacctttgatgccatccaggaggcctgtgcccgggcctag

SEQ ID NO: 172100 - DNA, 645 bp, synthetic construct
  misc_feature 1..645: note = Description of Artificial Sequence: Synthetic coding sequence
  source 1..645: mol_type = other DNA
atgaggccctgccaggtgcctggagctgccaccggcccccgggccatgtggctgtgccccctggccctgaccctcatcctgatggccgccagcggggccgcctgtgaggtgaaggatgtgtgtgtgggcagccctggcatccctgggaagagaggagagaagggggaggccggggagcggggccccccaggcctgcctgcccacctggatgaggagctgcaggccaccctgcatgacttccgccaccagatcctgcagaccaggggggccctgagcctgcagggcagcatcatgacagtgggggagaaggtgttcagcagcaatggccagagcatcacctttgatgccatccaggaggcctgtgcccgggccggcggcagaattgctgtgcccaggaaccctgaggagaatgaggccatcgccagctttgtgaagaagtacaacacctacgcctacgtgggcctgacagagggccccagccctggggacttccgctacagtgatggcacccctgtgaactacaccaactggtacagaggagagcctgctggccggggcaaggagcagtgtgtggagatgtacacagatggccagtggaatgacaggaactgcctgtacagccggctgaccatctgtgagttctag

SEQ ID NO: 172101 - DNA, 1146 bp, synthetic construct
  misc_feature 1..1146: note = Description of Artificial Sequence: Synthetic coding sequence
  source 1..1146: mol_type = other DNA
atggccgagagccacctgctgcagtggctgctgctgctgctgcccaccctgtgtggccctggaacagctgcctggaccaccagcagcctggcctgtgcccagggccctgagttctggtgccagagcctggagcaggccctgcagtgccgggccctgggccactgcctgcaggaggtgtggggccacgtgggcgcagatgacctgtgccaggagtgtgaagatattgtgcacatcctgaacaagatggccaaggaggccatcttccaggacaccatgaggaagttcctggagcaggagtgcaatgtgctgcccctgaagctgctgatgccccagtgcaaccaggtgctggatgactacttccccctggtgattgactacttccagaaccagacagacagcaatggcatctgcatgcacctgggcctgtgcaagagccggcagcctgagcctgagcaggagcccggcatgtctgaccccctgcccaagcccctgcgggaccccctgcctgaccccctgctggacaagctggtgctgcctgtgctgcccggggccctgcaggcccggcccggcccccacacccaggacctgtctgagcagcagttccccatccccctgccctactgctggctgtgccgggccctgatcaagaggatccaggccatgatccccaagggggccctggccgtggccgtggcccaggtgtgccgggtggtgcccctggtggccggcggcatctgccagtgcctggccgagcgctacagcgtcatcctgctggacaccctgctgggccgcatgctgccccagctggtgtgccgcctggtgctgcgctgcagcatggatgacagcgctggccccaggagccccactggagagtggctgccccgggacagcgagtgccacctgtgcatgtctgtgaccacccaggccggcaacagcagcgagcaggccatcccccaggccatgctgcaggcctgtgtgggctcctggctggaccgggagaagtgcaagcagtttgtggagcagcacaccccccagctgctgaccctggtgccccggggctgggatgcccacaccacctgccaggccctgggcgtgtgtggcaccatgagcagccccctgcagtgcatccacagcccagacctgtag

SEQ ID NO: 172102 - DNA, 1128 bp, synthetic construct
  misc_feature 1..1128: note = Description of Artificial Sequence: Synthetic coding sequence
  source 1..1128: mol_type = other DNA
atgctgctcttcctgctgagcgccctggtgctgctgacccagcccctgggctacctggaggccgagatgaagacctacagccacaggaccatgcccagcgcctgcaccctggtgatgtgcagctctgtggagagcggcctgcccggcagagatggaagagatggccgggagggccccagaggagagaagggggaccccggcctgcctggagctgctggccaggccggcatgcctggccaggccggccctgtgggccccaagggggacaatggatctgtgggggagcccggccccaagggggacaccggccccagcggccccccaggccccccaggagtgcccggccctgctggccgggagggccccctgggcaagcagggcaacatcggcccccagggcaagccaggccccaagggggaggccggccccaagggggaggtgggcgcccctggcatgcagggcagcgctggggcccggggcctggccggccccaagggggagcggggcgtgcctggagagcggggcgtgcccggcaacacaggagctgctggcagcgctggggccatgggcccccagggcagccctggggcccggggccccccaggcctgaagggggacaagggcatccctggggacaagggggccaagggggagagcggcctgcctgatgtggccagcctgcggcagcaggtggaggccctgcagggccaggtgcagcacctgcaggccgccttcagccagtacaagaaggtggagctgttccccaacggccagagcgtgggggagaagatcttcaagacagctggctttgtgaagcccttcacagaggcccagctgctgtgcacccaggccggcggccagctggccagccccaggtctgctgctgaaaatgctgccctgcagcagctggtggtggccaagaatgaggccgccttcctgtccatgacagacagcaagacagagggcaagttcacctaccccaccggggagagcctggtgtacagcaactgggcccctggagagcccaatgatgatggcggcagcgaggactgtgtggagatcttcaccaacgggaagtggaatgaccgggcctgtggggagaagaggctggtggtgtgtgagttctag

SEQ ID NO: 172103 - DNA, 657 bp, synthetic construct
  misc_feature 1..657: note = Description of Artificial Sequence: Synthetic coding sequence
  source 1..657: mol_type = other DNA
atgttcctgagcaccagcaagcacggccggcaggaggccatgctgctcttcctgctgagcgccctggtgctgctgacccagcccctgggctacctggaggccgagatgaagacctacagccacaggaccatgcccagcgcctgcaccctggtgatgtgcagctctgtggagagcggcctgcccggcagagatggaagagatggccgggagggccccagaggagagaagggggaccccggcctgcccggggctgctggccaggccggcatgcctggccaggccggccctgtgggccccaagggggacaatggatctgtgggggagcccggccccaagggggacaccggccccagcggccccccaggccccccaggagtgcccggccctgctggccgggagggccccctgggcaagcagggcaacatcggcccccagggcaagccaggccccaagggggaggccggccccaagggggaggtgggcgcccctggcatgcagggcagcgctggggcccggggcctggccggccccaagggggagcggggcgtgcctggagagcggggcgtgcccggcaacacaggagctgctggcagcgctggggccatgggcccccagggcagccctggggcccggggccccccaggcctgaagggctag

SEQ ID NO: 172104 - DNA, 903 bp, synthetic construct
  misc_feature 1..903: note = Description of Artificial Sequence: Synthetic coding sequence
  source 1..903: mol_type = other DNA
atggctgctgtggccgccctgcagctgggcctgcgggccgccggcctgggccgggccccagccagcgctgcctggaggtctgtgctgcgggtgagccccaggcctggggtggcctggaggcccagccgctgtggcagcagcgctgctgaggccagcgccaccaaggcagaagatgacagcttcctgcagtgggtgctgctgctgatccctgtgacagccttcggcctgggcacctggcaggtgcagaggaggaagtggaagctgaacctgattgctgagctggagagccgggtgctggccgagcctgtgcccctgcctgctgaccccatggagctgaagaacctggagtacagacctgtgaaggtgcggggctgctttgaccacagcaaggagctgtacatgatgcccaggaccatggtggaccctgtgcgggaggcccgggagggcggcctcatcagcagcagcacccagagcggggcctacgtggtgacccccttccactgcacagacctgggcgtgaccatcctggtgaacagaggatttgtgcccaggaagaaggtgaaccctgagacccggcagaagggccagattgaaggagaggtggacctgattggcatggtgcggctgacagagacccggcagccctttgtgcctgagaacaaccctgagaggaaccactggcactacagagacctggaggccatggcccgcatcactggagctgagcccatcttcattgatgccaacttccagagcacagtgcctgggggccccatcggcggccagaccagggtgaccctgagaaatgagcacctgcagtacatcgtgacctggtacggcctgtctgctgccaccagctacctgtggttcaagaagttcctgcggggcaccccaggagtgtag

SEQ ID NO: 172105 - DNA, 813 bp, synthetic construct
  misc_feature 1..813: note = Description of Artificial Sequence: Synthetic coding sequence
  source 1..813: mol_type = other DNA
gccccagccagcgctgcctggaggtctgtgctgcgggtgagccccaggcctggggtggcctggaggcccagccgctgtggcagcagcgctgctgaggccagcgccaccaaggcagaagatgacagcttcctgcagtgggtgctgctgctgatccctgtgacagccttcggcctgggcacctggcaggtgcagaggaggaagtggaagctgaacctgattgctgagctggagagccgggtgctggccgagcctgtgcccctgcctgctgaccccatggagctgaagaacctggagtacagacctgtgaaggtgcggggctgctttgaccacagcaaggagctgtacatgatgcccaggaccatggtggaccctgtgcgggaggcccgggagggcggcctcatcagcagcagcacccagagcggggcctacgtggtgacccccttccactgcacagacctgggcaagaaggtgaaccctgagacccggcagaagggccagattgaaggagaggtggacctgattggcatggtgcggctgacagagacccggcagccctttgtgcctgagaacaaccctgagaggaaccactggcactacagagacctggaggccatggcccgcatcactggagctgagcccatcttcattgatgccaacttccagagcacagtgcctgggggccccatcggcggccagaccagggtgaccctgagaaatgagcacctgcagtacatcgtgacctggtacggcctgtctgctgccaccagctacctgtggttcaagaagttcctgcggggcaccccaggagtgtag

SEQ ID NO: 172106 - DNA, 771 bp, synthetic construct
  misc_feature 1..771: note = Description of Artificial Sequence: Synthetic coding sequence
  source 1..771: mol_type = other DNA
atgtctgagctgcctggagatgtgcgggccttcctgcgggagcaccccagcctgcggctgcagacagatgccaggaaggtgcgctgcatcctgaccggccacgagctgccctgccgcctgcctgagctgcaggtgtacacccggggcaagaagtaccagaggctggtgcgggccagccctgcctttgattatgcagagtttgagccccacatcgtgcccagcaccaagaacccccaccagctgttctgcaagctgaccctgcggcacatcaacaagtgcccagagcacgtgctgcggcacacccagggccgccgctaccagagggccctgtgcaagtatgaggagtgccagaagcagggcgtggagtatgtgcctgcctgcctggtgcacagaagaagaagaagagaggaccagatggatggagatggcccccggccccgggaggccttctgggagcccaccagcagtgatgaaggaggagctgccagtgatgacagcatgacagacctgtacccacctgagctgttcaccaggaaggacctgggcagcacagaagatggagatggaacagatgacttcctgacagacaaggaggatgagaaggccaagccaccccgggagaaggccacagatgagagccggcgggagaccaccgtgtaccggggcctggtgcagaagaggggcaagaagcagctgggcagcctgaagaagaagttcaagagccaccacaggaagcccaagagcttcagcagctgcaagcagcctggatag

SEQ ID NO: 172107 - DNA, 810 bp, synthetic construct
  misc_feature 1..810: note = Description of Artificial Sequence: Synthetic coding sequence
  source 1..810: mol_type = other DNA
atgggccagaatgacctgatgggcacagcagaagattttgctgaccagttcctgcgggtgaccaagcagtacctgccccacgtggcccggctgtgcctgatcagcaccttcctggaggatggcatccgcatgtggttccagtggagcgagcagagggactacatcgacaccacctggaactgtggctacctgctggccagcagctttgtgttcctgaacctgctgggccagctgaccggctgtgtgctggtgctgagcaggaactttgtgcagtatgcctgcttcggcctgtttggcatcatcgccctgcagaccatcgcctacagcatcctgtgggacctgaagttcctgatgaggaacctggccctgggcggcggcctgctgctgctgctggccgagagccgctctgagggcaagtccatgtttgctggggtgcccaccatgagggagagcagccccaagcagtacatgcagctgggcggccgggtgctgctggtgctgatgttcatgaccctgctgcactttgatgccagcttcttcagcatcgtgcagaacatcgtgggcacagccctgatgatcctggtggccatcggcttcaagaccaagctggccgccctgaccctggtggtgtggctgtttgccatcaacgtgtacttcaatgccttctggaccatccctgtgtacaagcccatgcatgacttcctgaagtatgacttcttccagaccatgtctgtcatcggcggcctgctgctggtggtggccctgggccctggaggagtgtccatggatgagaagaagaaggagtggtag

SEQ ID NO: 172108 - DNA, 561 bp, synthetic construct
  misc_feature 1..561: note = Description of Artificial Sequence: Synthetic coding sequence
  source 1..561: mol_type = other DNA
atgggccagaatgacctgatgggcacagcagaagattttgctgaccagttcctgcgggtgaccaagcagtacctgccccacgtggcccggctgtgcctgatcagcaccttcctggaggatggcatccgcatgtggttccagtggagcgagcagagggactacatcgacaccacctggaactgtggctacctgctggccagcagctttgtgttcctgaacctgctgggccagctgaccggctgtgtgctggtgctgagcaggaactttgtgcagtatgcctgcttcggcctgtttggcatcatcgccctgcagaccatcgcctacagcatcctgtgggacctgaagttcctgatgaggaacctggccctgggcggcggcctgctgctgctgctggccgagagccgctctgagggcaagtccatgtttgctggggtgcccaccatgagggagagcagccccaagcagtacatgcagctgggcggccgggtgctgctggtgctgatgttcatgaccctgctgcactttgatgccagcttcttcagccagcccagccagcagtag

SEQ ID NO: 172109 - DNA, 567 bp, synthetic construct
  misc_feature 1..567: note = Description of Artificial Sequence: Synthetic coding sequence
  source 1..567: mol_type = other DNA
atgggccagaatgacctgatgggcacagcagaagattttgctgaccagttcctgcgggtgaccaagcagtacctgccccacgtggcccggctgtgcctgatcagcaccttcctggaggatggcatccgcatgtggttccagtggagcgagcagagggactacatcgacaccacctggaactgtggctacctgctggccagcagctttgtgttcctgaacctgctgggccagctgaccggctgtgtgctggtgctgagcaggaactttgtgcagtatgcctgcttcggcctgtttggcatcatcgccctgcagaccatcgcctacagcatcctgtgggacctgaagttcctgatgaggaacctggccctgggcggcggcctgctgctgctgctggccgagagccgctctgagggcaagtccatgtttgctggggtgcccaccatgagggagagcagccccaagcacacctgcctggccaagacccggggccggcagggcctggtgcggggcggcttcaacaagacagccagcttctacgtgagcagcagcctgcccctgccctggtag

SEQ ID NO: 172110 - DNA, 783 bp, synthetic construct
  misc_feature 1..783: note = Description of Artificial Sequence: Synthetic coding sequence
  source 1..783: mol_type = other DNA
atgaggagcctggccacagagttcctgcgggtgaccaagcagtacctgccccacgtggcccggctgtgcctgatcagcaccttcctggaggatggcatccgcatgtggttccagtggagcgagcagagggactacatcgacaccacctggaactgtggctacctgctggccagcagctttgtgttcctgaacctgctgggccagctgaccggctgtgtgctggtgctgagcaggaactttgtgcagtatgcctgcttcggcctgtttggcatcatcgccctgcagaccatcgcctacagcatcctgtgggacctgaagttcctgatgaggaacctggccctgggcggcggcctgctgctgctgctggccgagagccgctctgagggcaagtccatgtttgctggggtgcccaccatgagggagagcagccccaagcagtacatgcagctgggcggccgggtgctgctggtgctgatgttcatgaccctgctgcactttgatgccagcttcttcagcatcgtgcagaacatcgtgggcacagccctgatgatcctggtggccatcggcttcaagaccaagctggccgccctgaccctggtggtgtggctgtttgccatcaacgtgtacttcaatgccttctggaccatccctgtgtacaagcccatgcatgacttcctgaagtatgacttcttccagaccatgtctgtgattggaggcctgctgctggtggtggccctgggccctgggggcgtgtccatggatgagaagaagaaggagtggtag

SEQ ID NO: 172111 - DNA, 387 bp, synthetic construct
  misc_feature 1..387: note = Description of Artificial Sequence: Synthetic coding sequence
  source 1..387: mol_type = other DNA
atgggccagaatgacctgatgggcacagcagaagattttgctgaccagttcctgcgggtgaccaagcagtacctgccccacgtggcccggctgtgcctgatcagcaccttcctggaggatggcatccgcatgtggttccagtggagcgagcagagggactacatcgacaccacctggaactgtggctacctgctggccagcagctttgtgttcctgaacctgctgggccagctgaccggctgtgtgctggtgctgagcaggaactttgtgcagtatgcctgcttcggcctgtttggcatcatcgccctgcagaccatcgcctacagcatcctgtgggacctgaagttcctgatgaggctgagcaggacctcctgggcccagctgtag

SEQ ID NO: 172112 - DNA, 1086 bp, synthetic construct
  misc_feature 1..1086: note = Description of Artificial Sequence: Synthetic coding sequence
  source 1..1086: mol_type = other DNA
atggccagcctgctggccaaggatgcctacctgcagagcctggccaagaagatctgcagccacagcgcccctgagcagcaggcccggacccgggccggcaagacccagggcagcgagacagctggcccccccaagaagaagaggaagaagacccagaagaagttcaggaagcgggaggagaaggctgctgagcacaaggccaagagcctgggggagaagagccctgctgccagcggggcccggcggcctgaggccgccaaggaggaggccgcctgggccagcagcagcgctggcaacccagcagatggcctggccacagagcctgagagcgtgtttgccctggatgtgctgcggcagaggctgcacgagaagatccaggaggcccggggccagggcagcgccaaggagctgagccctgctgccctggagaagagaagaagaaggaagcaggagcgggacaggaagaagaggaagaggaaggagctgcgggccaaggagaaggccaggaaggccgaggaggccacagaggcccaggaggtggtggaggccaccccagagggcgcctgcacagagccccgggagcccccaggcctcatcttcaacaaggtggaggtgtctgaagatgagcccgccagcaaggcccagaggaggaaggagaagaggcagagggtgaagggcaacctgacccccctgaccggcaggaactaccggcagctgctggagcggctgcaggcccggcagagccggctggatgagctgcggggccaggatgagggcaaggcccaggagctggaggccaagatgaagtggaccaacctgctgtacaaggccgagggcgtgaagatcagagatgatgagcggctgctgcaggaggccctgaagaggaaggagaagagaagagcccagaggcagaggcgctgggagaagaggacagctggggtggtggagaagatgcagcagaggcaggacagaagacggcagaacctgcggaggaagaaggccgcccgggcagagcggcggctgctgcgggccaggaagaagggccgcatcctgccccaggacctggagcgggccggcctggtgtag

SEQ ID NO: 172113 - DNA, 789 bp, synthetic construct
  misc_feature 1..789: note = Description of Artificial Sequence: Synthetic coding sequence
  source 1..789: mol_type = other DNA
atggccatgagcagcggcggcagcggcggcggcgtgcctgagcaggaggacagcgtgctcttccggcggggcaccggccagagtgatgacagcgacatctgggatgacacagccctgatcaaggcctatgacaaggctgtggccagcttcaagcacgccctgaagaatggagacatctgtgagaccagcggcaagcccaagaccacccccaagaggaagccagccaagaagaacaagagccagaagaagaacacagctgccagcctgcagcagtggaaggtgggggacaagtgcagcgccatctggagcgaagatggctgcatctacccagccaccatcgccagcattgacttcaagcgggagacctgtgtggtggtgtacacaggctacggcaaccgggaggagcagaacctgagtgacctgctgagccccatctgtgaggtggccaacaacatcgagcagaatgcccaggagaatgaaaatgaaagccaggtgtccacagatgaaagtgagaacagccgcagccctggcaacaagagtgacaacatcaagcccaagagcgccccctggaacagcttcctgcccccacctccacccatgcctggcccccggctgggccctgggaagatcatccccccacctccacccatctgcccagacagcctggatgatgctgatgccctgggctccatgctgatctcctggtacatgagcggctaccacacaggctactacatgggcttccggcagaaccagaaggagggccgctgcagccacagcctgaactag

SEQ ID NO: 172114 - DNA, 885 bp, synthetic construct
  misc_feature 1..885: note = Description of Artificial Sequence: Synthetic coding sequence
  source 1..885: mol_type = other DNA
atggccatgagcagcggcggcagcggcggcggcgtgcctgagcaggaggacagcgtgctcttccggcggggcaccggccagagtgatgacagcgacatctgggatgacacagccctgatcaaggcctatgacaaggctgtggccagcttcaagcacgccctgaagaatggagacatctgtgagaccagcggcaagcccaagaccacccccaagaggaagccagccaagaagaacaagagccagaagaagaacacagctgccagcctgcagcagtggaaggtgggggacaagtgcagcgccatctggagcgaagatggctgcatctacccagccaccatcgccagcattgacttcaagcgggagacctgtgtggtggtgtacacaggctacggcaaccgggaggagcagaacctgagtgacctgctgagccccatctgtgaggtggccaacaacatcgagcagaatgcccaggagaatgaaaatgaaagccaggtgtccacagatgaaagtgagaacagccgcagccctggcaacaagagtgacaacatcaagcccaagagcgccccctggaacagcttcctgcccccacctccacccatgcctggcccccggctgggccctgggaagccaggcctgaagttcaatggacctcctcctcctcctcctcctcctccaccccacctgctgagctgctggctgccccccttccccagcggcccccccatcatccccccacctccacccatctgcccagacagcctggatgatgctgatgccctgggctccatgctgatctcctggtacatgagcggctaccacacaggctactacatgggcttccggcagaaccagaaggagggccgctgcagccacagcctgaactag

SEQ ID NO: 172115 - DNA, 789 bp, synthetic construct; identical to SEQ ID NO: 172113
  misc_feature 1..789: note = Description of Artificial Sequence: Synthetic coding sequence
  source 1..789: mol_type = other DNA

SEQ ID NO: 172116 - DNA, 849 bp, synthetic construct
  misc_feature 1..849: note = Description of Artificial Sequence: Synthetic coding sequence
  source 1..849: mol_type = other DNA
atggccatgagcagcggcggcagcggcggcggcgtgcctgagcaggaggacagcgtgctcttccggcggggcaccggccagagtgatgacagcgacatctgggatgacacagccctgatcaaggcctatgacaaggctgtggccagcttcaagcacgccctgaagaatggagacatctgtgagaccagcggcaagcccaagaccacccccaagaggaagccagccaagaagaacaagagccagaagaagaacacagctgccagcctgcagcagtggaaggtgggggacaagtgcagcgccatctggagcgaagatggctgcatctacccagccaccatcgccagcattgacttcaagcgggagacctgtgtggtggtgtacacaggctacggcaaccgggaggagcagaacctgagtgacctgctgagccccatctgtgaggtggccaacaacatcgagcagaatgcccaggagaatgaaaatgaaagccaggtgtccacagatgaaagtgagaacagccgcagccctggcaacaagagtgacaacatcaagcccaagagcgccccctggaacagcttcctgcccccacctccacccatgcctggcccccggctgggccctgggaagccaggcctgaagttcaatggacctcctcctcctcctcctcctcctccaccccacctgctgagctgctggctgccccccttccccagcggcccccccatcatccccccacctccacccatctgcccagacagcctggatgatgctgatgccctgggctccatgctgatctcctggtacatgagcggctaccacacaggctactacatggagatgctggcctag

SEQ ID NO: 172117 - DNA, 885 bp, synthetic construct
  misc_feature 1..885: note = Description of Artificial Sequence: Synthetic coding sequence
  source 1..885: mol_type = other DNA
atggccatgagcagcggcggcagcggcggcggcgtgcctgagcaggaggacagcgtgctcttccggcggggcaccggccagagtgatgacagcgacatctgggatgacacagccctgatcaaggcctatgacaaggctgtggccagcttcaagcacgccctgaagaatggagacatctgtgagaccagcggcaagcccaagaccacccccaagaggaagccagccaagaagaacaagagccagaagaagaacacagctgccagcctgcagcagtggaaggtgggggacaagtgcagcgccatctggagcgaagatggctgcatctacccagccaccatcgccagcattgacttcaagcgggagacctgtgtggtggtgtacacaggctacggcaaccgggaggagcagaacctgagtgacctgctgagccccatctgtgaggtggccaacaacatcgagcagaatgcccaggagaatgaaaatgaaagccaggtgtccacagatgaaagtgagaacagccgcagccctggcaacaagagtgacaacatcaagcccaagagcgccccctggaacagcttcctgcccccacctccacccatgcctggcccccggctgggccctgggaagccaggcctgaagttcaatggacctcctcctcctcctcctcctcctccaccccacctgctgagctgctggctgccccccttccccagcggcccccccatcatccccccacctccacccatctgcccagacagcctggatgatgctgatgccctgggctccatgctgatctcctggtacatgagcggctaccacacaggctactacatgacaggcttccactgtgtgtcccaggacggcctgaacctgctgaccccctag

SEQ ID NO: 172118 - DNA, 684 bp, synthetic construct
  misc_feature 1..684: note = Description of Artificial Sequence: Synthetic coding sequence
  source 1..684: mol_type = other DNA
atggccatgagcagcggcggcagcggcggcggcgtgcctgagcaggaggacagcgtgctcttccggcggggcaccggccagagtgatgacagcgacatctgggatgacacagccctgatcaaggcctatgacaaggctgtggccagcttcaagcacgccctgaagaatggagacatctgtgagaccagcggcaagcccaagaccacccccaagaggaagccagccaagaagaacaagagccagaagaagaacacagctgccagcctgcagcagaatgaaaatgaaagccaggtgtccacagatgaaagtgagaacagccgcagccctggcaacaagagtgacaacatcaagcccaagagcgccccctggaacagcttcctgcccccacctccacccatgcctggcccccggctgggccctgggaagccaggcctgaagttcaacggccccccacctcctcctcctcctcctccaccccacctgctgagctgctggctgccccccttccccagcggcccccccatcatccccccacctccacccatctgcccagacagcctggatgatgctgatgccctgggctccatgctgatctcctggtacatgagcggctaccacacaggctactacatgggcttccggcagaaccagaaggagggccgctgcagccacagcctgaactag

SEQ ID NO: 172119 - DNA, 849 bp, synthetic construct; identical to SEQ ID NO: 172116
  misc_feature 1..849: note = Description of Artificial Sequence: Synthetic coding sequence
  source 1..849: mol_type = other DNA

SEQ ID NO: 172120 - DNA, 789 bp, synthetic construct; identical to SEQ ID NO: 172113
  misc_feature 1..789: note = Description of Artificial Sequence: Synthetic coding sequence
  source 1..789: mol_type = other DNA

SEQ ID NO: 172121 - DNA, 885 bp, synthetic construct; identical to SEQ ID NO: 172114
  misc_feature 1..885: note = Description of Artificial Sequence: Synthetic coding sequence
  source 1..885: mol_type = other DNA

SEQ ID NO: 172122 - DNA, 885 bp, synthetic construct; identical to SEQ ID NO: 172117
  misc_feature 1..885: note = Description of Artificial Sequence: Synthetic coding sequence
  source 1..885: mol_type = other DNA

SEQ ID NO: 172123 - DNA, 684 bp, synthetic construct; identical to SEQ ID NO: 172118
  misc_feature 1..684: note = Description of Artificial Sequence: Synthetic coding sequence
  source 1..684: mol_type = other DNA

SEQ ID NO: 172124 - DNA, 4494 bp, synthetic construct
  misc_feature 1..4494: note = Description of Artificial Sequence: Synthetic coding sequence
  source 1..4494: mol_type = other DNA
atgccccgctgcatcgcccacttctgtgagaagccacccagcgtgtcctacagcatcctggagagcgtgtccaaggccaagtttgctgctggctctgtggtgtccttcaagtgcatggagggctttgtgctgaacaccagcgccaagattgagtgcatgagaggaggccagtggaaccccagccccatgagcatccagtgcatccctgtgcgctgtggggagcccccatccatcatgaatggctacgccagcggcagcaactacagctttggagccatggtggcctacagctgcaacaagggcttctacatcaagggggagaagaagagcacctgtgaggccaccggccagtggagcagccccatccccacctgccaccctgtgtcctgtggggagccccccaaggtggagaatggcttcctggagcacaccaccggccgcatctttgaaagtgaggtgcgctaccagtgcaaccctggctacaagtctgtgggcagccctgtgtttgtgtgccaggccaacagacactggcacagcgagagccccctgatgtgtgtgcccctggactgtgggaagcccccacccatccagaatggcttcatgaagggggagaactttgaggtgggcagcaaggtgcagttcttctgcaatgaaggctatgagctggtgggggacagctcctggacctgccagaagagcggcaagtggaacaagaagagcaaccccaagtgcatgcctgccaagtgcccagagccccccctgctggagaaccagctggtgctgaaggagctgaccacagaggtgggcgtggtgaccttcagctgcaaggagggccacgtgctgcagggccccagcgtgctgaagtgcctgcccagccagcagtggaatgacagcttccctgtgtgcaagatcgtgctgtgcaccccaccacccctcatcagctttggagtgcccatccccagcagcgccctgcacttcggcagcacagtgaagtacagctgtgtgggcggcttcttcctgcggggcaacagcaccaccctgtgccagccagatggcacctggagcagccccctgcctgaatgtgtgcctgtggagtgcccccagcctgaggagatccccaacggcatcattgatgtgcagggcctggcctacctgagcacagccctgtacacctgcaagccaggctttgagctggtgggcaacaccaccaccctgtgtggggagaatggccactggctgggcggcaagcccacctgcaaggccattgaatgtctgaagcccaaggagatcctgaatggcaagttctcctacacagacctgcactacggccagacagtgacctacagctgcaacagaggcttccggctggagggccccagcgccctgacctgcctggagactggagactgggatgtggatgcccccagctgcaatgccatccactgtgacagcccccagcccattgaaaatggatttgtggagggcgctgactacagctatggagccatcatcatctacagctgcttccctggcttccaggtggccggccacgccatgcagacctgtgaggagagcggctggagcagcagcatccccacctgcatgcccatcgactgtggcctgcccccccacatcgactttggagactgcaccaagctgaaggatgaccagggctactttgagcaggaggatgacatgatggaggtgccctacgtgaccccccaccccccctaccacctgggcgctgtggccaagacctgggagaacaccaaggagagccctgccacccacagcagcaacttcctgtatggcaccatggtgtcctacacctgcaaccctggctatgagctgctgggcaaccctgtgctgatctgccaggaggatggcacctggaatggcagcgcccccagctgcatcagcattgaatgtgacctgcccacagccccagaaaatggcttcctgcgcttcacagagacctccatgggcagcgctgtgcagtacagctgcaagccaggccacatcctggccggcagtgacctgcggctgtgcctggagaacaggaagtggagcggggccagcccccgctgtgaggccatcagctgcaagaagcccaaccctgtgatgaatggcagcatcaagggcagcaactacacctacctgagcaccctgtactatgaatgtgaccccggctacgtgctgaatggaacagagaggaggacctgccaggatgacaagaactgggatgaagatgagcccatctgcatccctgtggactgcagcagcccccctgtgtctgccaacggccaggtgagaggagatgagtacaccttccagaaggagattgagtacacctgcaatgaaggcttcctgctggagggcgcccggagccgggtgtgcctggccaacggctcctggagcggggccaccccagactgtgtgcctgtgcgctgtgccaccccaccccagctggccaatggagtgacagagggcctggactatggcttcatgaaggaggtgaccttccactgccacgagggctacatcctgcacggggcccccaagctgacctgccagagtgatggcaactgggatgctgagatccccctgtgcaagcctgtgaactgtggccccccagaggacctggcccacggcttccccaacggcttctccttcatccatggaggccacatccagtaccagtgcttccctggctacaagctgcacggcaacagcagccgccgctgcctgagcaatggctcctggagcggcagcagccccagctgcctgccctgccgctgcagcacccctgtgattgaatatggcaccgtgaatggaacagactttgactgtgggaaggccgcccgcatccagtgcttcaagggcttcaagctgctgggcctgtctgagatcacctgtgaggctgatggccagtggagcagcggcttcccccactgtgagcacaccagctgtggcagcctgcccatgatccccaatgccttcatcagcgagaccagctcctggaaggaaaatgtcatcacctacagctgccgcagcggctacgtgatccagggcagcagtgacctgatctgcacagagaagggcgtgtggagccagccctaccctgtgtgtgagcccctgagctgtggcagccccccatctgtggccaatgctgtggccaccggggaggcccacacctatgagagcgaggtgaagctgcgctgcctggagggctacaccatggacacagacacagacaccttcacctgccagaaggatggccgctggttccctgagcgcatcagctgcagccccaagaagtgccccctgcctgagaacatcacccacatcctggtgcatggagatgacttctctgtgaaccggcaggtgtctgtgtcctgtgccgagggctacacctttgaaggagtgaacatctctgtgtgccagctggatggcacctgggagccccccttcagtgatgagagctgcagccctgtgtcctgtgggaagccagagagccctgagcacggctttgtggtgggcagcaagtacacctttgagagcaccatcatctaccagtgtgagcccggctatgagctggagggcaaccgggagcgggtgtgccaggagaaccggcagtggagcggcggcgtggccatctgcaaggagacccgctgtgagacccccctggagttcctgaatggcaaggctgacattgaaaatagaaccaccggccccaacgtggtgtacagctgcaacagaggctacagcctggagggccccagcgaggcccactgcacagaaaatggcacctggagccaccctgtgcccctgtgcaagcccaacccctgccctgtgccctttgtgatcccagaaaatgccctgctgtctgagaaggagttctacgtggaccagaatgtgtccatcaagtgccgggagggcttcctgctgcagggccacggcatcatcacctgcaacccagatgagacctggacccagaccagcgccaagtgtgagaagatcagctgtggccccccagcccacgtggagaatgccatcgcccggggcgtgcactaccagtacggggacatgatcacctacagctgctacagcggctacatgctggagggcttcctgcggtctgtgtgcctggagaatggcacctggaccagcccccccatctgcagagctgtgtgccgcttcccctgccagaatggaggcatctgccagaggcccaatgcctgcagctgcccagagggctggatgggccgcctgtgtgaggagcccatctgcatcctgccctgcctgaatggaggccgctgtgtggccccctaccagtgtgactgccccccaggctggacaggcagccgctgccacacagctgtgtgccagagcccctgcctgaatggaggaaaatgtgtgcggcccaaccgctgccactgcctgagctcctggacaggccacaactgcagcaggaagagaagaacaggcttctag

SEQ ID NO: 172125 - DNA, 4650 bp, synthetic construct
  misc_feature 1..4650: note = Description of Artificial Sequence: Synthetic coding sequence
  source 1..4650: mol_type = other DNA
atgtggccccggctggccttctgctgctggggcctggccctggtgtctggctgggccaccttccagcagatgagccccagcaggaacttctccttccgcctcttccctgagacagcccctggggcccctggcagcatcccagcccccccagcccctggagatgaggccgccggcagccgggtggagcggctgggccaggccttcagaagaagagtgcggctgctgcgggagctgtctgagcggctggagctggtgttcctggtggatgacagcagctctgtgggggaggtgaacttccgctctgagctgatgtttgtgaggaagctgctgagtgacttccctgtggtgcccacagccaccagggtggccatcgtgaccttcagcagcaagaactacgtggtgccccgggtggactacatcagcacccggcgggcccggcagcacaagtgtgccctgctgctgcaggagatcccagccatctcctaccggggcggcggcacctacaccaagggggccttccagcaggccgcccagatcctgctgcacgcccgggagaacagcaccaaggtggtgttcctgatcacagatggctacagcaatggaggagacccccggcccatcgccgccagcctgcgggacagcggcgtggagatcttcaccttcggcatctggcagggcaacatccgggagctgaatgacatggccagcacccccaaggaggagcactgctacctgctgcacagctttgaggagtttgaggccctggcccggcgggccctgcacgaggacctgcccagcggcagcttcatccaggatgacatggtgcactgcagctacctgtgtgatgagggcaaggactgctgtgacaggatgggcagctgcaagtgtggcacccacacaggccactttgagtgcatctgtgagaagggctactacggcaagggcctgcagtatgaatgtacagcctgccccagcggcacctacaagccagagggcagccctgggggcatcagcagctgcatcccctgcccagatgagaaccacaccagccccccaggcagcaccagccctgaggactgtgtgtgccgggagggctaccgggccagcggccagacctgtgagctggtgcactgcccagccctgaagcccccagaaaatggctacttcatccagaacacctgcaacaaccacttcaatgctgcctgtggggtgcgctgccaccctggctttgacctggtgggcagcagcatcatcctgtgcctgcccaacggcctgtggagcggcagcgagagctactgccgggtgaggacctgcccccacctgcggcagcccaagcacggccacatcagctgcagcacccgggagatgctgtacaagaccacctgcctggtggcctgtgatgagggctaccgcctggagggcagtgacaagctgacctgccagggcaacagccagtgggatggccctgagccccgctgtgtggagcggcactgcagcaccttccagatgcccaaggatgtgatcatcagcccccacaactgtgggaagcagcctgccaagtttggcaccatctgctacgtgtcctgccggcagggcttcatcctgagcggcgtgaaggagatgctgcgctgcaccaccagcggcaagtggaatgtgggcgtgcaggccgctgtgtgcaaggatgtggaggccccccagatcaactgccccaaggacatcgaggccaagaccctggagcagcaggacagcgccaacgtgacctggcagatccccacagccaaggacaacagcggggagaaggtgtctgtgcacgtgcacccagccttcaccccaccctacctgttccccatcggagatgtggccatcgtgtacacagccacagacctgagcggcaaccaggccagctgcatcttccacatcaaggtgattgatgctgagccccctgtgattgactggtgccgcagccccccacctgtgcaggtgtctgagaaggtgcatgctgcctcctgggatgagccccagttcagtgacaacagcggggctgagctggtgatcaccaggagccacacccagggcgacctcttcccccagggcgagaccatcgtgcagtacacagccacagaccccagcggcaacaacagaacctgtgacatccacatcgtcatcaagggcagcccctgtgagatccccttcacccctgtgaatggagacttcatctgcaccccagacaacacaggagtgaactgcaccctgacctgcctggagggctatgacttcacagagggcagcacagacaagtactactgtgcctatgaagatggagtgtggaagcccacctacaccacagagtggccagactgtgccaagaagagatttgccaaccacggcttcaagagctttgagatgttctacaaggccgcccgctgtgatgacacagacctgatgaagaagttcagcgaggcctttgagaccaccctgggcaagatggtgcccagcttctgcagtgatgctgaggacatcgactgccgcctggaggagaacctgaccaagaagtactgcctggagtacaactatgactatgaaaatggatttgccatcggccctgggggctggggcgccgccaaccggctggactacagctatgatgacttcctggacacagtgcaggagacagccaccagcattggaaatgccaagagcagccgcatcaagaggtctgcccccctgagtgactacaagatcaagctgatcttcaacatcacagcctctgtgcccctgcctgatgaaagaaatgacaccctggagtgggagaaccagcagaggctgctgcagaccctggagaccatcaccaacaagctgaagaggaccctgaacaaggaccccatgtacagcttccagctggccagcgagatcctgattgctgacagcaacagcctggagaccaagaaggccagccccttctgccggcccggctctgtgctgcggggccgcatgtgtgtgaactgccccctgggcacctactacaacctggagcacttcacctgtgagagctgccgcatcggcagctaccaggatgaggagggccagctggagtgcaagctgtgccccagcggcatgtacacagagtacatccacagcaggaacatcagtgactgcaaggcccagtgcaagcagggcacctacagctacagcggcctggagacctgtgagagctgccccctgggcacctaccagcccaagtttggcagccgcagctgcctgagctgcccagagaacaccagcacagtgaagagaggagctgtgaacatcagcgcctgtggggtgccctgcccagagggcaagttcagccgcagcggcctgatgccctgccacccctgcccccgggactactaccagcccaatgccggcaaggccttctgcctggcctgccccttctacggcaccaccccatttgctggcagccgcagcatcacagaatgtagcagcttcagcagcaccttctctgctgctgaggagagcgtggtgcccccagccagcctgggccacatcaagaagagacatgagatcagcagcagggtcttccacgagtgcttcttcaacccctgccacaacagcggcacctgccagcagctgggccggggctacgtgtgcctgtgccccctgggctacacaggcctgaagtgtgaaacagacattgatgagtgcagccccctgccctgcctgaacaatggagtgtgcaaggacctggtgggggagttcatctgtgagtgccccagcggctacacaggccagagatgtgaggagaacatcaatgaatgtagcagcagcccctgcctgaacaagggcatctgtgtggatggagtggccggctaccgctgcacctgtgtgaagggctttgtgggcctgcactgtgaaacagaggtgaatgaatgccagagcaacccctgcctgaacaatgctgtgtgtgaggaccaggtgggcggcttcctgtgcaagtgccccccaggcttcctgggcacccgctgtgggaagaatgtggatgagtgcctgagccagccctgcaagaatggagccacctgcaaggatggagccaacagcttccgctgcctgtgtgccgccggcttcaccggcagccactgtgagctgaacatcaatgaatgccagagcaacccctgcaggaaccaggccacctgtgtggatgagctgaacagctacagctgcaagtgccagcccggcttcagcggcaagagatgtgaaacagagcagagcacaggcttcaacctggactttgaggtgtctggcatctacggctacgtgatgctggatggcatgctgcccagcctgcacgccctgacctgcaccttctggatgaagagcagtgatgacatgaactacggcacccccatctcctatgctgtggacaatggaagtgacaacaccctgctgctgacagactacaacggctgggtgctgtatgtgaatggccgggagaagatcaccaactgccccagcgtgaatgatggccgctggcaccacatcgccatcacctggaccagcgccaacggcatctggaaggtgtacattgatggcaagctgagtgatggaggagctggcctgtctgtgggcctgcccatccctggcatgttttag

SEQ ID NO: 172126 - DNA, 2538 bp, synthetic construct
  misc_feature 1..2538: note = Description of Artificial Sequence: Synthetic coding sequence
  source 1..2538: mol_type = other DNA
atgagccccagcaggaacttctccttccgcctcttccctgagacagcccctggggcccctggcagcatcccagcccccccagcccctggagatgaagctgctggcagccgggtggagcggctgggccaggccttcagaagaagagtgcggctgctgcgggagctgtctgagcggctggagctggtgttcctggtggatgacagcagctctgtgggggaggtgaacttccgctctgagctgatgtttgtgaggaagctgctgagtgacttccctgtggtgcccacagccaccagggtggccatcgtgaccttcagcagcaagaactacgtggtgccccgggtggactacatcagcacccggcgggcccggcagcacaagtgtgccctgctgctgcaggagatcccagccatctcctacagaggaggcggcacctacaccaagggggccttccagcaggccgcccagatcctgctgcacgcccgggagaacagcaccaaggtggtgttcctgatcacagatggctacagcaatggaggagacccccggcccatcgccgccagcctgcgggacagcggcgtggagatcttcaccttcggcatctggcagggcaacatccgggagctgaatgacatggccagcacccccaaggaggagcactgctacctgctgcacagctttgaggagtttgaggccctggcccggcgggccctgcacgaggacctgcccagcggcagcttcatccaggatgacatggtgcactgcagctacctgtgtgatgagggcaaggactgctgtgacaggatgggcagctgcaagtgtggcacccacacaggccactttgagtgcatctgtgagaagggctactacggcaagggcctgcagtatgagtgcacagcctgccccagcggcacctacaagccagagggcagccctgggggcatcagcagctgcatcccctgcccagatgagaaccacaccagccccccaggcagcaccagccctgaggactgtgtgtgccgggagggctaccgggccagcggccagacctgtgagctggtgcactgcccagccctgaagcccccagaaaatggctacttcatccagaacacctgcaacaaccacttcaatgctgcctgtggggtgcgctgccaccctggctttgacctggtgggcagcagcatcatcctgtgcctgcccaacggcctgtggagcggcagcgagagctactgccgggtgaggacctgcccccacctgcggcagcccaagcacggccacatcagctgcagcacccgggagatgctgtacaagaccacctgcctggtggcctgtgatgagggctaccgcctggagggcagtgacaagctgacctgccagggcaacagccagtgggatggccctgagccccgctgtgtggagcggcactgcagcaccttccagatgcccaaggatgtgatcatcagcccccacaactgtgggaagcagcctgccaagtttggcaccatctgctacgtgtcctgccggcagggcttcatcctgtctggagtgaaggagatgctgcgctgcaccaccagcggcaagtggaatgtgggcgtgcaggccgctgtgtgcaaggatgtggaggccccccagatcaactgccccaaggacatcgaggccaagaccctggagcagcaggacagcgccaacgtgacctggcagatccccacagccaaggacaacagcggggagaaggtgtctgtgcacgtgcacccagccttcaccccaccctacctgttccccatcggagatgtggccatcgtgtacacagccacagacctgagcggcaaccaggccagctgcatcttccacatcaaggtgattgatgctgagccccctgtgattgactggtgccgcagccccccacctgtgcaggtgtctgagaaggtgcacgccgcctcctgggatgagccccagttcagtgacaacagcggggctgagctggtgatcaccaggagccacacccagggcgacctcttcccccagggcgagaccatcgtgcagtacacagccacagaccccagcggcaacaacagaacctgtgacatccacatcgtcatcaagggcagcccctgtgagatccccttcacccctgtgaatggagacttcatctgcaccccagacaacacaggagtgaactgcaccctgacctgcctggagggctatgacttcacagagggcagcacagacaagtactactgtgcctatgaagatggagtgtggaagcccacctacaccacagagtggccagactgtgccaagaagagatttgccaaccacggcttcaagagctttgagatgttctacaaggccgcccgctgtgatgacacagacctgatgaagaagttcagcgaggcctttgagaccaccctgggcaagatggtgcccagcttctgcagtgatgctgaagatattgactgccgcctggaggagaacctgaccaagaagtactgcctggagtacaactatgactatgaaaatggatttgccatcggcaactag

SEQ ID NO: 172127 - DNA, 1548 bp, synthetic construct
  misc_feature 1..1548: note = Description of Artificial Sequence: Synthetic coding sequence
  source 1..1548: mol_type = other DNA
ctggagaaccagctggtgctgaaggagctgaccacagaggtgggcgtggtgaccttcagctgcaaggagggccacgtgctgcagggccccagcgtgctgaagtgcctgcccagccagcagtggaatgacagcttccctgtgtgcaagatcgtgctgtgcaccccaccacccctcatcagctttggagtgcccatccccagcagcgccctgcacttcggcagcacagtgaagtacagctgtgtgggcggcttcttcctgcggggcaacagcaccaccctgtgccagccagatggcacctggagcagccccctgcctgaatgtgtgcctgtggagtgcccccagcctgaggagatccccaacggcatcattgatgtgcagggcctggcctacctgagcacagccctgtacacctgcaagccaggctttgagctggtgggcaacaccaccaccctgtgtggggagaatggccactggctgggcggcaagcccacctgcaaggccattgaatgtctgaagcccaaggagatcctgaatggcaagttctcctacacagacctgcactacggccagacagtgacctacagctgcaacagaggcttccggctggagggccccagcgccctgacctgcctggagactggagactgggatgtggatgcccccagctgcaatgccatccactgtgacagcccccagcccattgaaaatggatttgtggagggcgctgactacagctatggagccatcatcatctacagctgcttccctggcttccaggtggccggccacgccatgcagacctgtgaggagagcggctggagcagcagcatccccacctgcatgcccatcgactgtggcctgcccccccacatcgactttggagactgcaccaagctgaaggatgaccagggctactttgagcaggaggatgacatgatggaggtgccctacgtgaccccccaccccccctaccacctgggcgctgtggccaagacctgggagaacaccaaggagagccctgccacccacagcagcaacttcctgtatggcaccatggtgtcctacacctgcaaccctggctatgagctgctgggcaaccctgtgctgatctgccaggaggatggcacctggaatggcagcgcccccagctgcatcagcattgaatgtgacctgcccacagccccagaaaatggcttcctgcgcttcacagagacctccatgggcagcgctgtgcagtacagctgcaagccaggccacatcctggccggcagtgacctgcggctgtgcctggagaacaggaagtggagcggggccagcccccgctgtgaggccatcagctgcaagaagcccaaccctgtgatgaatggcagcatcaagggcagcaactacacctacctgagcaccctgtactatgaatgtgaccccggctacgtgctgaatggaacagagaggaggacctgccaggatgacaagacaggcatgaggatgagcccctttgccttcctgtggacagctgtgcacccccagagccagcccatggccaggtag

SEQ ID NO: 172128 - DNA, 10647 bp, synthetic construct
  misc_feature 1..10647: note = Description of Artificial Sequence: Synthetic coding sequence
  source 1..10647: mol_type = other DNA
atgagccccagcaggaacttctccttccgcctcttccctgagacagcccctggggcccctggcagcatcccagcccccccagcccctggagatgaagctgctggcagccgggtggagcggctgggccaggccttcagaagaagagtgcggctgctgcgggagctgtctgagcggctggagctggtgttcctggtggatgacagcagctctgtgggggaggtgaacttccgctctgagctgatgtttgtgaggaagctgctgagtgacttccctgtggtgcccacagccaccagggtggccatcgtgaccttcagcagcaagaactacgtggtgccccgggtggactacatcagcacccggcgggcccggcagcacaagtgtgccctgctgctgcaggagatcccagccatctcctacagaggaggcggcacctacaccaagggggccttccagcaggccgcccagatcctgctgcacgcccgggagaacagcaccaaggtggtgttcctgatcacagatggctacagcaatggaggagacccccggcccatcgccgccagcctgcgggacagcggcgtggagatcttcaccttcggcatctggcagggcaacatccgggagctgaatgacatggccagcacccccaaggaggagcactgctacctgctgcacagctttgaggagtttgaggccctggcccggcgggccctgcacgaggacctgcccagcggcagcttcatccaggatgacatggtgcactgcagctacctgtgtgatgagggcaaggactgctgtgacaggatgggcagctgcaagtgtggcacccacacaggccactttgagtgcatctgtgagaagggctactacggcaagggcctgcagtatgagtgcacagcctgccccagcggcacctacaagccagagggcagccctgggggcatcagcagctgcatcccctgcccagatgagaaccacaccagccccccaggcagcaccagccctgaggactgtgtgtgccgggagggctaccgggccagcggccagacctgtgagctggtgcactgcccagccctgaagcccccagaaaatggctacttcatccagaacacctgcaacaaccacttcaatgctgcctgtggggtgcgctgccaccctggctttgacctggtgggcagcagcatcatcctgtgcctgcccaacggcctgtggagcggcagcgagagctactgccgggtgaggacctgcccccacctgcggcagcccaagcacggccacatcagctgcagcacccgggagatgctgtacaagaccacctgcctggtggcctgtgatgagggctaccgcctggagggcagtgacaagctgacctgccagggcaacagccagtgggatggccctgagccccgctgtgtggagcggcactgcagcaccttccagatgcccaaggatgtgatcatcagcccccacaactgtgggaagcagcctgccaagtttggcaccatctgctacgtgtcctgccggcagggcttcatcctgtctggagtgaaggagatgctgcgctgcaccaccagcggcaagtggaatgtgggcgtgcaggccgctgtgtgcaaggatgtggaggccccccagatcaactgccccaaggacatcgaggccaagaccctggagcagcaggacagcgccaacgtgacctggcagatccccacagccaaggacaacagcggggagaaggtgtctgtgcacgtgcacccagccttcaccccaccctacctgttccccatcggagatgtggccatcgtgtacacagccacagacctgagcggcaaccaggccagctgcatcttccacatcaaggtgattgatgctgagccccctgtgattgactggtgccgcagccccccacctgtgcaggtgtctgagaaggtgcacgccgcctcctgggatgagccccagttcagtgacaacagcggggctgagctggtgatcaccaggagccacacccagggcgacctcttcccccagggcgagaccatcgtgcagtacacagccacagaccccagcggcaacaacagaacctgtgacatccacatcgtcatcaagggcagcccctgtgagatccccttcacccctgtgaatggagacttcatctgcaccccagacaacacaggagtgaactgcaccctgacctgcctggagggctatgacttcacagagggcagcacagacaagtactactgtgcctatgaagatggagtgtggaagcccacctacaccacagagtggccagactgtgccaagaagagatttgccaaccacggcttcaagagctttgagatgttctacaaggccgcccgctgtgatgacacagacctgatgaagaagttcagcgaggcctttgagaccaccctgggcaagatggtgcccagcttctgcagtgatgctgaagatattgactgccgcctggaggagaacctgaccaagaagtactgcctggagtacaactatgactatgaaaatggatttgccatcggccctgggggctggggcgccgccaaccggctggactacagctatgatgacttcctggacacagtgcaggagacagccaccagcattggaaatgccaagagcagccgcatcaagaggtctgcccccctgagtgactacaagatcaagctgatcttcaacatcacagcctctgtgcccctgcctgatgaaagaaatgacaccctggagtgggagaaccagcagaggctgctgcagaccctggagaccatcaccaacaagctgaagaggaccctgaacaaggaccccatgtacagcttccagctggccagcgagatcctgattgctgacagcaacagcctggagaccaagaaggccagccccttctgcaggcctggctctgtgctgcggggccgcatgtgtgtgaactgccccctgggcacctactacaacctggagcacttcacctgtgagagctgcagaattggcagctaccaggatgaggagggccagctggagtgcaagctgtgccccagcggcatgtacacagagtacatccacagcaggaacatcagtgactgcaaggcccagtgcaagcagggcacctacagctacagcggcctggagacctgtgagagctgccccctgggcacctaccagcccaagtttggcagccgcagctgcctgagctgcccagagaacaccagcacagtgaagagaggagctgtgaacatcagcgcctgtggggtgccctgcccagagggcaagttcagccgcagcggcctgatgccctgccacccctgcccccgggactactaccagcccaatgctgggaaggccttctgcctggcctgccccttctacggcaccaccccatttgctggcagccgcagcatcacagagtgcagcagcttcagcagcaccttctctgctgctgaggagagcgtggtgcccccagccagcctgggccacatcaagaagagacatgagatcagcagccaggtgttccacgagtgcttcttcaacccctgccacaacagcggcacctgccagcagctgggccggggctacgtgtgcctgtgccccctgggctacacaggcctgaagtgtgaaacagacattgatgaatgtagccccctgccctgcctgaacaacggggtgtgcaaggacctggtgggggagttcatctgtgaatgtcccagcggctacacaggccagagatgtgaggagaacatcaatgaatgtagcagcagcccctgcctgaacaagggcatctgtgtggatggagtggccggctaccgctgcacctgtgtgaagggctttgtgggcctgcactgtgaaacagaggtgaatgaatgccagagcaacccctgcctgaacaatgctgtgtgtgaggaccaggtgggcggcttcctgtgcaagtgccccccaggcttcctgggcacccgctgtgggaagaatgtggatgaatgtctgagccagccctgcaagaatggagccacctgcaaggatggagccaacagcttccgctgcctgtgtgccgccggcttcaccggcagccactgtgagctgaacatcaatgaatgccagagcaacccctgcaggaaccaggccacctgtgtggatgagctgaacagctacagctgcaagtgccagcccggcttcagcggcaagagatgtgaaacagagcagagcacaggcttcaacctggactttgaggtgtctggcatctacggctacgtgatgctggatggcatgctgcccagcctgcacgccctgacctgcaccttctggatgaagagcagtgatgacatgaactacggcacccccatctcctatgctgtggacaatggaagtgacaacaccctgctgctgacagactacaacggctgggtgctgtatgtgaatggccgggagaagatcaccaactgccccagcgtgaatgatggccgctggcaccacatcgccatcacctggaccagcgccaacggcatctggaaggtgtacattgatggcaagctgagtgatggaggagctggcctgtctgtgggcctgcccatccctgggggcggggccctggtgctgggccaggagcaggacaagaagggggagggcttctccccagctgagagctttgtgggcagcatcagccagctgaacctgtgggactatgtgctgagcccccagcaggtgaagagcctggccaccagctgcccagaggagctgagcaaaggaaatgtgctggcctggccagacttcctgagcggcatcgtgggcaaggtgaagattgacagcaagagcatcttctgcagcgactgcccccggctgggcggctctgtgccccacctgaggacagccagcgaggacctgaagccaggcagcaaggtgaacctcttctgtgaccccggcttccagctggtgggcaaccctgtgcagtactgcctgaaccagggccagtggacccagcccctgccccactgtgagcgcatcagctgtggggtgcccccacccctggagaatggcttccacagcgcagatgacttctacgccggcagcacagtgacctaccagtgcaacaacggctactacctgctgggggacagcaggatgttctgcacagacaatggctcctggaatggagtgagccccagctgcctggatgtggatgaatgtgctgtgggcagtgactgcagcgagcacgccagctgcctgaatgtggatggcagctacatctgcagctgtgtgcccccctacacaggagatggcaagaactgtgccgagcccatcaagtgcaaggcccctggcaacccagaaaatggccacagcagcggggagatctacacagtgggcgctgaggtgaccttcagctgccaggagggctaccagctgatgggcgtgaccaagatcacctgcctggagagcggggagtggaaccacctgatcccctactgcaaggctgtgtcctgtgggaagccagccatcccagaaaatggctgcatcgaggagctggccttcaccttcggcagcaaggtgacctaccgctgcaacaagggctacaccctggccggggacaaggagagcagctgcctggccaacagctcctggagccacagcccccctgtgtgtgagcctgtgaagtgcagcagccctgagaacatcaacaacgggaagtacatcctgagcggcctgacctacctgagcacagccagctacagctgtgacaccggctacagcctgcagggccccagcatcattgaatgtacagccagcggcatctgggaccgggcccccccagcctgccacctggtgttctgtggggagcccccagccatcaaggatgctgtgatcaccggcaacaacttcaccttcaggaacacagtgacctacacctgcaaggagggctacaccctggccggcctggacaccattgaatgtctggctgatggcaagtggagcagaagtgaccagcagtgcctggccgtgtcctgtgatgagccccccatcgtggaccacgccagccctgagacagcccaccggctgtttggagacatcgccttctactactgcagtgatggctacagcctggccgacaacagccagctgctgtgcaatgcccagggcaagtgggtgcccccagagggccaggacatgccccgctgcatcgcccacttctgtgagaagcccccatctgtgtcctacagcatcctggagagcgtgtccaaggccaagtttgctgctggctctgtggtgtccttcaagtgcatggagggctttgtgctgaacaccagcgccaagattgagtgcatgaggggcggccagtggaaccccagccccatgagcatccagtgcatccctgtgcgctgtggggagccccccagcatcatgaatggctacgccagcggcagcaactacagctttggagccatggtggcctacagctgcaacaagggcttctacatcaagggggagaagaagagcacctgtgaggccaccggccagtggagcagccccatccccacctgccaccctgtgtcctgtggggagccccccaaggtggagaatggcttcctggagcacaccaccggccgcatctttgagagcgaggtgcgctaccagtgcaaccctggctacaagtctgtgggcagccctgtgtttgtgtgccaggccaacagacactggcacagcgagagccccctgatgtgtgtgcccctggactgtgggaagcccccacccatccagaatggcttcatgaagggagaaaattttgaggtgggcagcaaggtgcagttcttctgcaatgaaggctatgagctggtgggggacagctcctggacctgccagaagagcggcaagtggaacaagaagagcaaccccaagtgcatgcctgccaagtgcccagagccccccctgctggagaaccagctggtgctgaaggagctgaccacagaggtgggcgtggtgaccttcagctgcaaggagggccacgtgctgcagggccccagcgtgctgaagtgcctgcccagccagcagtggaatgacagcttccctgtgtgcaagatcgtgctgtgcaccccacctcctctcatcagctttggagtgcccatccccagcagcgccctgcacttcggcagcacagtgaagtacagctgtgtgggcggcttcttcctgcggggcaacagcaccaccctgtgccagccagatggcacctggagcagccccctgcctgaatgtgtgcctgtggagtgcccccagcctgaggagatccccaacggcatcattgatgtgcagggcctggcctacctgagcacagccctgtacacctgcaagccaggctttgagctggtgggcaacaccaccaccctgtgtggagaaaatggccactggctgggcggcaagcccacctgcaaggccatcgagtgcctgaagcccaaggagatcctgaatggcaagttctcctacacagacctgcactacggccagacagtgacctacagctgcaacagaggcttccggctggagggccccagcgccctgacctgcctggagaccggggactgggatgtggatgcccccagctgcaatgccatccactgtgacagcccccagcccattgaaaatggatttgtggagggcgctgactacagctatggagccatcatcatctacagctgcttccctggcttccaggtggccggccacgccatgcagacctgtgaggagagcggctggagcagcagcatccccacctgcatgcccatcgactgtggcctgcccccccacatcgactttggagactgcaccaagctgaaggatgaccagggctactttgagcaggaggatgacatgatggaggtgccctacgtgaccccccaccccccctaccacctgggcgctgtggccaagacctgggagaacaccaaggagagccctgccacccacagcagcaacttcctgtatggcaccatggtgtcctacacctgcaaccctggctatgagctgctgggcaaccctgtgctgatctgccaggaggatggcacctggaatggaagtgcccccagctgcatcagcattgaatgtgacctgcccacagccccagaaaatggcttcctgcgcttcacagagacctccatgggcagcgctgtgcagtacagctgcaagccaggccacatcctggccggcagtgacctgcggctgtgcctggagaacaggaagtggagcggggccagcccccgctgtgaggccatcagctgcaagaagcccaaccctgtgatgaatggcagcatcaagggcagcaactacacctacctgagcaccctgtactatgaatgtgaccccggctacgtgctgaatggaacagaaagaaggacctgccaggatgacaagaactgggatgaagatgagcccatctgcatccctgtggactgcagcagcccccctgtgtctgccaacggccaggtgagaggagatgagtacaccttccagaaggagattgagtacacctgcaatgaaggcttcctgctggagggcgcccggagccgggtgtgcctggccaacggctcctggagcggggccaccccagactgtgtgcctgtgcgctgtgccaccccaccccagctggccaacggggtgacagagggcctggactatggcttcatgaaggaggtgaccttccactgccacgagggctacatcctgcatggagcccccaagctgacctgccagagtgatggcaactgggatgctgagatccccctgtgcaagcctgtgaactgtggccccccagaggacctggcccacggcttccccaacggcttctccttcatccacggcggccacatccagtaccagtgcttccctggctacaagctgcacggcaacagcagccgccgctgcctgagcaatggctcctggagcggcagcagccccagctgcctgccctgccgctgcagcacccctgtgattgaatatggaacagtgaatggaacagactttgactgtgggaaggccgcccgcatccagtgcttcaagggcttcaagctgctgggcctgtctgagatcacctgtgaggctgatggccagtggagcagcggcttcccccactgtgagcacaccagctgtggcagcctgcccatgatccccaatgccttcatcagcgagaccagctcctggaaggaaaatgtcatcacctacagctgccgcagcggctacgtgatccagggcagcagtgacctgatctgcacagagaagggcgtgtggagccagccctaccctgtgtgtgagcccctgagctgtggcagcccccccagcgtggccaatgctgtggccactggagaggcccacacctatgaaagtgaggtgaagctgcgctgcctggagggctacaccatggacacagacacagacaccttcacctgccagaaggatggccgctggttccctgagcgcatcagctgcagccccaagaagtgccccctgcctgagaacatcacccacatcctggtgcatggagatgacttctctgtgaaccggcaggtgtctgtgtcctgtgccgagggctacacctttgagggcgtgaacatctctgtgtgccagctggatggcacctgggagccccccttcagtgatgagagctgcagccctgtgtcctgtgggaagccagagagccctgagcacggctttgtggtgggcagcaagtacacctttgagagcaccatcatctaccagtgtgagcccggctatgagctggagggcaaccgggagcgggtgtgccaggagaaccggcagtggagcggaggagtggccatctgcaaggagacccgctgtgagacccccctggagttcctgaatggcaaggctgacatcgagaacagaaccaccggccccaacgtggtgtacagctgcaacagaggctacagcctggagggccccagcgaggcccactgcacagaaaatggcacctggagccaccctgtgcccctgtgcaagcccaacccctgccctgtgcccttcgtcatcccagaaaatgccctgctgtctgagaaggagttctacgtggaccagaatgtgtccatcaagtgccgggagggcttcctgctgcagggccacggcatcatcacctgcaacccagatgagacctggacccagaccagcgccaagtgtgagaagatcagctgtggccccccagcccacgtggagaatgccatcgcccggggcgtgcactaccagtatggagacatgatcacctacagctgctacagcggctacatgctggagggcttcctgcggtctgtgtgcctggagaatggcacctggaccagcccccccatctgcagagctgtgtgccgcttcccctgccagaatggaggcatctgccagaggcccaatgcctgcagctgcccagagggctggatgggccgcctgtgtgaggagcccatctgcatcctgccctgcctgaatggaggccgctgtgtggccccctaccagtgtgactgccccccaggctggacaggcagccgctgccacacagctgtgtgccagagcccctgcctgaatggaggaaaatgtgtgcggcccaaccgctgccactgcctgagctcctggacaggccacaactgcagcaggaagagaagaacaggcttctag

SEQ ID NO: 172129 - DNA, 10716 bp, synthetic construct
  misc_feature 1..10716: note = Description of Artificial Sequence: Synthetic coding sequence
  source 1..10716: mol_type = other DNA
atgtggccccggctggccttctgctgctggggcctggccctggtgtctggctgggccaccttccagcagatgagccccagcaggaacttctccttccgcctcttccctgagacagcccctggggcccctggcagcatcccagcccccccagcccctggagatgaggccgccggcagccgggtggagcggctgggccaggccttcagaagaagagtgcggctgctgcgggagctgtctgagcggctggagctggtgttcctggtggatgacagcagctctgtgggggaggtgaacttccgctctgagctgatgtttgtgaggaagctgctgagtgacttccctgtggtgcccacagccaccagggtggccatcgtgaccttcagcagcaagaactacgtggtgccccgggtggactacatcagcacccggcgggcccggcagcacaagtgtgccctgctgctgcaggagatcccagccatctcctaccggggcggcggcacctacaccaagggggccttccagcaggccgcccagatcctgctgcacgcccgggagaacagcaccaaggtggtgttcctgatcacagatggctacagcaatggaggagacccccggcccatcgccgccagcctgcgggacagcggcgtggagatcttcaccttcggcatctggcagggcaacatccgggagctgaatgacatggccagcacccccaaggaggagcactgctacctgctgcacagctttgaggagtttgaggccctggcccggcgggccctgcacgaggacctgcccagcggcagcttcatccaggatgacatggtgcactgcagctacctgtgtgatgagggcaaggactgctgtgacaggatgggcagctgcaagtgtggcacccacacaggccactttgagtgcatctgtgagaagggctactacggcaagggcctgcagtatgaatgtacagcctgccccagcggcacctacaagccagagggcagccctgggggcatcagcagctgcatcccctgcccagatgagaaccacaccagccccccaggcagcaccagccctgaggactgtgtgtgccgggagggctaccgggccagcggccagacctgtgagctggtgcactgcccagccctgaagcccccagaaaatggctacttcatccagaacacctgcaacaaccacttcaatgctgcctgtggggtgcgctgccaccctggctttgacctggtgggcagcagcatcatcctgtgcctgcccaacggcctgtggagcggcagcgagagctactgccgggtgaggacctgcccccacctgcggcagcccaagcacggccacatcagctgcagcacccgggagatgctgtacaagaccacctgcctggtggcctgtgatgagggctaccgcctggagggcagtgacaagctgacctgccagggcaacagccagtgggatggccctgagccccgctgtgtggagcggcactgcagcaccttccagatgcccaaggatgtgatcatcagcccccacaactgtgggaagcagcctgccaagtttggcaccatctgctacgtgtcctgccggcagggcttcatcctgagcggcgtgaaggagatgctgcgctgcaccaccagcggcaagtggaatgtgggcgtgcaggccgctgtgtgcaaggatgtggaggccccccagatcaactgccccaaggacatcgaggccaagaccctggagcagcaggacagcgccaacgtgacctggcagatccccacagccaaggacaacagcggggagaaggtgtctgtgcacgtgcacccagccttcaccccaccctacctgttccccatcggagatgtggccatcgtgtacacagccacagacctgagcggcaaccaggccagctgcatcttccacatcaaggtgattgatgctgagccccctgtgattgactggtgccgcagccccccacctgtgcaggtgtctgagaaggtgcatgctgcctcctgggatgagccccagttcagtgacaacagcggggctgagctggtgatcaccaggagccacacccagggcgacctcttcccccagggcgagaccatcgtgcagtacacagccacagaccccagcggcaacaacagaacctgtgacatccacatcgtcatcaagggcagcccctgtgagatccccttcacccctgtgaatggagacttcatctgcaccccagacaacacaggagtgaactgcaccctgacctgcctggagggctatgacttcacagagggcagcacagacaagtactactgtgcctatgaagatggagtgtggaagcccacctacaccacagagtggccagactgtgccaagaagagatttgccaaccacggcttcaagagctttgagatgttctacaaggccgcccgctgtgatgacacagacctgatgaagaagttcagcgaggcctttgagaccaccctgggcaagatggtgcccagcttctgcagtgatgctgaggacatcgactgccgcctggaggagaacctgaccaagaagtactgcctggagtacaactatgactatgaaaatggatttgccatcggccctgggggctggggcgccgccaaccggctggactacagctatgatgacttcctggacacagtgcaggagacagccaccagcattggaaatgccaagagcagccgcatcaagaggtctgcccccctgagtgactacaagatcaagctgatcttcaacatcacagcctctgtgcccctgcctgatgaaagaaatgacaccctggagtgggagaaccagcagaggctgctgcagaccctggagaccatcaccaacaagctgaagaggaccctgaacaaggaccccatgtacagcttccagctggccagcgagatcctgattgctgacagcaacagcctggagaccaagaaggccagccccttctgccggcccggctctgtgctgcggggccgcatgtgtgtgaactgccccctgggcacctactacaacctggagcacttcacctgtgagagctgccgcatcggcagctaccaggatgaggagggccagctggagtgcaagctgtgccccagcggcatgtacacagagtacatccacagcaggaacatcagtgactgcaaggcccagtgcaagcagggcacctacagctacagcggcctggagacctgtgagagctgccccctgggcacctaccagcccaagtttggcagccgcagctgcctgagctgcccagagaacaccagcacagtgaagagaggagctgtgaacatcagcgcctgtggggtgccctgcccagagggcaagttcagccgcagcggcctgatgccctgccacccctgcccccgggactactaccagcccaatgccggcaaggccttctgcctggcctgccccttctacggcaccaccccatttgctggcagccgcagcatcacagaatgtagcagcttcagcagcaccttctctgctgctgaggagagcgtggtgcccccagccagcctgggccacatcaagaagagacatgagatcagcagccaggtgttccacgagtgcttcttcaacccctgccacaacagcggcacctgccagcagctgggccggggctacgtgtgcctgtgccccctgggctacacaggcctgaagtgtgaaacagacattgatgagtgcagccccctgccctgcctgaacaatggagtgtgcaaggacctggtgggggagttcatctgtgagtgccccagcggctacacaggccagagatgtgaggagaacatcaatgaatgtagcagcagcccctgcctgaacaagggcatctgtgtggatggagtggccggctaccgctgcacctgtgtgaagggctttgtgggcctgcactgtgaaacagaggtgaatgaatgccagagcaacccctgcctgaacaatgctgtgtgtgaggaccaggtgggcggcttcctgtgcaagtgccccccaggcttcctgggcacccgctgtgggaagaatgtggatgagtgcctgagccagccctgcaagaatggagccacctgcaaggatggagccaacagcttccgctgcctgtgtgccgccggcttcaccggcagccactgtgagctgaacatcaatgaatgccagagcaacccctgcaggaaccaggccacctgtgtggatgagctgaacagctacagctgcaagtgccagcccggcttcagcggcaagagatgtgaaacagagcagagcacaggcttcaacctggactttgaggtgtctggcatctacggctacgtgatgctggatggcatgctgcccagcctgcacgccctgacctgcaccttctggatgaagagcagtgatgacatgaactacggcacccccatctcctatgctgtggacaatggaagtgacaacaccctgctgctgacagactacaacggctgggtgctgtatgtgaatggccgggagaagatcaccaactgccccagcgtgaatgatggccgctggcaccacatcgccatcacctggaccagcgccaacggcatctggaaggtgtacattgatggcaagctgagtgatggaggagctggcctgtctgtgggcctgcccatccctgggggcggggccctggtgctgggccaggagcaggacaagaagggggagggcttcagccctgctgagagctttgtgggcagcatcagccagctgaacctgtgggactatgtgctgagcccccagcaggtgaagagcctggccaccagctgcccagaggagctgagcaaaggaaatgtgctggcctggccagacttcctgtctggaattgtgggcaaggtgaagattgacagcaagagcatcttctgcagcgactgcccccggctgggcggctctgtgccccacctgaggacagccagcgaggacctgaagccaggcagcaaggtgaacctcttctgtgaccccggcttccagctggtgggcaaccctgtgcagtactgcctgaaccagggccagtggacccagcccctgccccactgtgagcgcatcagctgtggggtgcccccacccctggagaatggcttccacagcgcagatgacttctacgccggcagcacagtgacctaccagtgcaacaacggctactacctgctgggggacagcaggatgttctgcacagacaatggctcctggaatggagtgagccccagctgcctggatgtggatgaatgtgctgtgggcagtgactgcagcgagcacgccagctgcctgaatgtggatggcagctacatctgcagctgtgtgcccccctacacaggagatggcaagaactgtgccgagcccatcaagtgcaaggcccctggcaacccagaaaatggccacagcagtggagagatctacacagtgggcgctgaggtgaccttcagctgccaggagggctaccagctgatgggcgtgaccaagatcacctgcctggagagcggggagtggaaccacctgatcccctactgcaaggctgtgtcctgtgggaagccagccatcccagaaaatggctgcatcgaggagctggccttcaccttcggcagcaaggtgacctaccgctgcaacaagggctacaccctggccggggacaaggagagcagctgcctggccaacagctcctggagccacagcccccctgtgtgtgagcctgtgaagtgcagcagccctgagaacatcaacaacgggaagtacatcctgagcggcctgacctacctgagcacagccagctacagctgtgacaccggctacagcctgcagggccccagcatcatcgagtgcacagccagcggcatctgggaccgggcccccccagcctgccacctggtgttctgtggggagcccccagccatcaaggatgctgtgatcactggaaacaacttcaccttcaggaacacagtgacctacacctgcaaggagggctacaccctggccggcctggacaccatcgagtgcctggctgatggcaagtggagcagaagtgaccagcagtgcctggccgtgtcctgtgatgagccccccatcgtggaccacgccagccctgagacagcccaccggctgtttggagacatcgccttctactactgcagtgatggctacagcctggccgacaacagccagctgctgtgcaatgcccagggcaagtgggtgcccccagagggccaggacatgccccgctgcatcgcccacttctgtgagaagccacccagcgtgtcctacagcatcctggagagcgtgtccaaggccaagtttgctgctggctctgtggtgtccttcaagtgcatggagggctttgtgctgaacaccagcgccaagattgagtgcatgagaggaggccagtggaaccccagccccatgagcatccagtgcatccctgtgcgctgtggggagcccccatccatcatgaatggctacgccagcggcagcaactacagctttggagccatggtggcctacagctgcaacaagggcttctacatcaagggggagaagaagagcacctgtgaggccaccggccagtggagcagccccatccccacctgccaccctgtgtcctgtggggagccccccaaggtggagaatggcttcctggagcacaccaccggccgcatctttgaaagtgaggtgcgctaccagtgcaaccctggctacaagtctgtgggcagccctgtgtttgtgtgccaggccaacagacactggcacagcgagagccccctgatgtgtgtgcccctggactgtgggaagcccccacccatccagaatggcttcatgaagggggagaactttgaggtgggcagcaaggtgcagttcttctgcaatgaaggctatgagctggtgggggacagctcctggacctgccagaagagcggcaagtggaacaagaagagcaaccccaagtgcatgcctgccaagtgcccagagccccccctgctggagaaccagctggtgctgaaggagctgaccacagaggtgggcgtggtgaccttcagctgcaaggagggccacgtgctgcagggccccagcgtgctgaagtgcctgcccagccagcagtggaatgacagcttccctgtgtgcaagatcgtgctgtgcaccccaccacccctcatcagctttggagtgcccatccccagcagcgccctgcacttcggcagcacagtgaagtacagctgtgtgggcggcttcttcctgcggggcaacagcaccaccctgtgccagccagatggcacctggagcagccccctgcctgaatgtgtgcctgtggagtgcccccagcctgaggagatccccaacggcatcattgatgtgcagggcctggcctacctgagcacagccctgtacacctgcaagccaggctttgagctggtgggcaacaccaccaccctgtgtggggagaatggccactggctgggcggcaagcccacctgcaaggccattgaatgtctgaagcccaaggagatcctgaatggcaagttctcctacacagacctgcactacggccagacagtgacctacagctgcaacagaggcttccggctggagggccccagcgccctgacctgcctggagactggagactgggatgtggatgcccccagctgcaatgccatccactgtgacagcccccagcccattgaaaatggatttgtggagggcgctgactacagctatggagccatcatcatctacagctgcttccctggcttccaggtggccggccacgccatgcagacctgtgaggagagcggctggagcagcagcatccccacctgcatgcccatcgactgtggcctgcccccccacatcgactttggagactgcaccaagctgaaggatgaccagggctactttgagcaggaggatgacatgatggaggtgccctacgtgaccccccaccccccctaccacctgggcgctgtggccaagacctgggagaacaccaaggagagccctgccacccacagcagcaacttcctgtatggcaccatggtgtcctacacctgcaaccctggctatgagctgctgggcaaccctgtgctgatctgccaggaggatggcacctggaatggcagcgcccccagctgcatcagcattgaatgtgacctgcccacagccccagaaaatggcttcctgcgcttcacagagacctccatgggcagcgctgtgcagtacagctgcaagccaggccacatcctggccggcagtgacctgcggctgtgcctggagaacaggaagtggagcggggccagcccccgctgtgaggccatcagctgcaagaagcccaaccctgtgatgaatggcagcatcaagggcagcaactacacctacctgagcaccctgtactatgaatgtgaccccggctacgtgctgaatggaacagagaggaggacctgccaggatgacaagaactgggatgaagatgagcccatctgcatccctgtggactgcagcagcccccctgtgtctgccaacggccaggtgagaggagatgagtacaccttccagaaggagattgagtacacctgcaatgaaggcttcctgctggagggcgcccggagccgggtgtgcctggccaacggctcctggagcggggccaccccagactgtgtgcctgtgcgctgtgccaccccaccccagctggccaatggagtgacagagggcctggactatggcttcatgaaggaggtgaccttccactgccacgagggctacatcctgcacggggcccccaagctgacctgccagagtgatggcaactgggatgctgagatccccctgtgcaagcctgtgaactgtggccccccagaggacctggcccacggcttccccaacggcttctccttcatccatggaggccacatccagtaccagtgcttccctggctacaagctgcacggcaacagcagccgccgctgcctgagcaatggctcctggagcggcagcagccccagctgcctgccctgccgctgcagcacccctgtgattgaatatggcaccgtgaatggaacagactttgactgtgggaaggccgcccgcatccagtgcttcaagggcttcaagctgctgggcctgtctgagatcacctgtgaggctgatggccagtggagcagcggcttcccccactgtgagcacaccagctgtggcagcctgcccatgatccccaatgccttcatcagcgagaccagctcctggaaggaaaatgtcatcacctacagctgccgcagcggctacgtgatccagggcagcagtgacctgatctgcacagagaagggcgtgtggagccagccctaccctgtgtgtgagcccctgagctgtggcagccccccatctgtggccaatgctgtggccaccggggaggcccacacctatgagagcgaggtgaagctgcgctgcctggagggctacaccatggacacagacacagacaccttcacctgccagaaggatggccgctggttccctgagcgcatcagctgcagccccaagaagtgccccctgcctgagaacatcacccacatcctggtgcatggagatgacttctctgtgaaccggcaggtgtctgtgtcctgtgccgagggctacacctttgaaggagtgaacatctctgtgtgccagctggatggcacctgggagccccccttcagtgatgagagctgcagccctgtgtcctgtgggaagccagagagccctgagcacggctttgtggtgggcagcaagtacacctttgagagcaccatcatctaccagtgtgagcccggctatgagctggagggcaaccgggagcgggtgtgccaggagaaccggcagtggagcggcggcgtggccatctgcaaggagacccgctgtgagacccccctggagttcctgaatggcaaggctgacattgaaaatagaaccaccggccccaacgtggtgtacagctgcaacagaggctacagcctggagggccccagcgaggcccactgcacagaaaatggcacctggagccaccctgtgcccctgtgcaagcccaacccctgccctgtgccctttgtgatcccagaaaatgccctgctgtctgagaaggagttctacgtggaccagaatgtgtccatcaagtgccgggagggcttcctgctgcagggccacggcatcatcacctgcaacccagatgagacctggacccagaccagcgccaagtgtgagaagatcagctgtggccccccagcccacgtggagaatgccatcgcccggggcgtgcactaccagtacggggacatgatcacctacagctgctacagcggctacatgctggagggcttcctgcggtctgtgtgcctggagaatggcacctggaccagcccccccatctgcagagctgtgtgccgcttcccctgccagaatggaggcatctgccagaggcccaatgcctgcagctgcccagagggctggatgggccgcctgtgtgaggagcccatctgcatcctgccctgcctgaatggaggccgctgtgtggccccctaccagtgtgactgccccccaggctggacaggcagccgctgccacacagctgtgtgccagagcccctgcctgaatggaggaaaatgtgtgcggcccaaccgctgccactgcctgagctcctggacaggccacaactgcagcaggaagagaagaacaggcttctag

SEQ ID NO: 172130 - DNA, 1356 bp, synthetic construct
  misc_feature 1..1356: note = Description of Artificial Sequence: Synthetic coding sequence
  source 1..1356: mol_type = other DNA
atggactttgatgtgggccgcaccacccacctgagcagcagcccctgcagcgccagcaatggaggagagagcggccaggtgtccaagaggcgctgcctgattggagagagcggccatgacaccccctggtgcagccccatcaaggtgaagtatggagatgtgtactgccgggccccccagggcggctactacaagacagccctgggcacccgctgtgacatccgctgccagaagggctatgagctgcacggcagcagcctgctgatctgccagagcaacaagcgctggagcgacaaggtgatctgcaagcagaagcgctgccccaccctggccatgcctgccaatggaggcttcaagtgtgtggatggagcctacttcaacagccgctgtgagtactactgcagccctggctacaccctgaagggggagaggacagtgacctgcatggacaacaaggcctggagcggccggcctgccagctgtgtggacatggagcccccacgcatcaagtgccccagcgtgaaggagagaattgctgagcccaacaagctgactgtgcgggtgtcctgggagaccccagagggccgggacacagcagatggcatcctgacagatgtgatcctgaagggcctgcccccaggcagcaacttccctgagggggaccacaagatccagtacacagtgtatgacagagcagaaaataaaggcacctgcaagttccgggtgaaggtgcgggtgaagagatgtgggaagctgaatgccccagaaaatggctacatgaagtgcagcagtgatggagacaactatggagccacctgtgagttcagctgcatcggcggctatgagctgcagggcagccctgcccgggtgtgccagagcaacctggcctggagcggcacagagcccacctgtgccgccatgaatgtgaatgtgggcgtgaggacagctgctgccctgctggaccagttctatgagaagaggcggctgctgattgtgtccacccccacagccaggaacctgctgtaccgcctgcagctgggcatgctgcagcaggcccagtgtggcctggacctgcggcacatcaccgtggtggagctggtgggcgtcttccccaccctcatcggcagaattggagccaagatcatgcccccagccctggccctgcagctgcggctgctgctgcgcatccccctgtacagcttctccatggtgctggtggacaagcacggcatggacaaggagcgctacgtgtccctggtgatgcctgtggccctcttcaacctgattgacaccttccccctgaggaaggaggagatggtgctgcaggccgagatgagccagacctgcaacacctag

SEQ ID NO: 172131 - DNA, 1395 bp, synthetic construct
  misc_feature 1..1395: note = Description of Artificial Sequence: Synthetic coding sequence
  source 1..1395: mol_type = other DNA
atgggcagccctgcccacaggcctgccctgctgctgctgctgccccccctgctgctgctgctgctgctgcgggtgccccccagccgctccttccctggcagcggggacagccccctggaggatgatgaggtgggctacagccacccccgctacaaggacaccccctggtgcagccccatcaaggtgaagtatggagatgtgtactgccgggccccccagggcggctactacaagacagccctgggcacccgctgtgacatccgctgccagaagggctatgagctgcacggcagcagcctgctgatctgccagagcaacaagcgctggagcgacaaggtgatctgcaagcagaagcgctgccccaccctggccatgcctgccaacggcggcttcaagtgtgtggatggagcctacttcaacagccgctgtgagtactactgcagccctggctacaccctgaagggggagaggacagtgacctgcatggacaacaaggcctggagcggccgcccagccagctgtgtggacatggagcccccacgcatcaagtgccccagcgtgaaggagagaattgctgagcccaacaagctgactgtgcgggtgtcctgggagaccccagagggccgggacacagcagatggcatcctgacagatgtgatcctgaagggcctgcccccaggcagcaacttccctgagggggaccacaagatccagtacacagtgtatgacagagctgagaacaagggcacctgcaagttccgggtgaaggtgcgggtgaagagatgtgggaagctgaatgccccagaaaatggctacatgaagtgcagcagtgatggagacaactacggggccacctgtgagttcagctgcattggaggctatgagctgcagggcagccctgcccgggtgtgccagagcaacctggcctggagcggcacagagcccacctgtgccgccatgaatgtgaatgtgggcgtgaggacagctgctgccctgctggaccagttctatgagaagaggcggctgctgattgtgtccacccccacagccaggaacctgctgtaccgcctgcagctgggcatgctgcagcaggcccagtgtggcctggacctgcggcacatcaccgtggtggagctggtgggcgtcttccccaccctgattggccgcatcggggccaagatcatgcccccagccctggccctgcagctgcggctgctgctgcgcatccccctgtacagcttctccatggtgctggtggacaagcacggcatggacaaggagagatatgtgtccctggtgatgcctgtggccctcttcaacctgattgacaccttccccctgaggaaggaggagatggtgctgcaggccgagatgagccagacctgcaacacctag

SEQ ID NO: 172132 - DNA, 1218 bp, synthetic construct
  misc_feature 1..1218: note = Description of Artificial Sequence: Synthetic coding sequence
  source 1..1218: mol_type = other DNA
atgggcagccctgcccacaggcctgccctgctgctgctgctgccccccctgctgctgctgctgctgctgcgggtgccccccagccgctccttccctggcagcggggacagccccctggaggatgatgaggtgggctacagccacccccgctacaaggacaccccctggtgcagccccatcaaggtgaagtatggagatgtgtactgccgggccccccagggcggctactacaagacagccctgggcacccgctgtgacatccgctgccagaagggctatgagctgcacggcagcagcctgctgatctgccagagcaacaagcgctggagcgacaaggtgatctgcaagcacatggagcccccacgcatcaagtgccccagcgtgaaggagagaattgctgagcccaacaagctgactgtgcgggtgtcctgggagaccccagagggccgggacacagcagatggcatcctgacagatgtgatcctgaagggcctgcccccaggcagcaacttccctgagggggaccacaagatccagtacacagtgtatgacagagcagaaaataaaggcacctgcaagttccgggtgaaggtgcgggtgaagagatgtgggaagctgaatgccccagaaaatggctacatgaagtgcagcagtgatggagacaactatggagccacctgtgagttcagctgcatcggcggctatgagctgcagggcagccctgcccgggtgtgccagagcaacctggcctggagcggcacagagcccacctgtgccgccatgaatgtgaatgtgggcgtgaggacagctgctgccctgctggaccagttctatgagaagaggcggctgctgattgtgtccacccccacagccaggaacctgctgtaccgcctgcagctgggcatgctgcagcaggcccagtgtggcctggacctgcggcacatcaccgtggtggagctggtgggcgtcttccccaccctcatcggcagaattggagccaagatcatgcccccagccctggccctgcagctgcggctgctgctgcgcatccccctgtacagcttctccatggtgctggtggacaagcacggcatggacaaggagcgctacgtgtccctggtgatgcctgtggccctcttcaacctgattgacaccttccccctgaggaaggaggagatggtgctgcaggccgagatgagccagacctgcaacacctag

SEQ ID NO: 172133 - DNA, 1140 bp, synthetic construct
  misc_feature 1..1140: note = Description of Artificial Sequence: Synthetic coding sequence
  source 1..1140: mol_type = other DNA
atgggcagccctgcccacaggcctgccctgctgctgctgctgccccccctgctgctgctgctgctgctgcgggtgccccccagccgctccttccctggcagcggggacagccccctggaggatgatgaggtgggctacagccacccccgctacaaggacaccccctggtgcagccccatcaaggtgaagtatggagatgtgtactgccgggccccccagggcggctactacaagacagccctgggcacccgctgtgacatccgctgccagaagggctatgagctgcacggcagcagcctgctgatctgccagagcaacaagcgctggagcgacaaggtgatctgcaagcagaagcgctgccccaccctggccatgcctgccaacggcggcttcaagtgtgtggatggagcctacttcaacagccgctgtgagtactactgcagccctggctacaccctgaagggggagaggacagtgacctgcatggacaacaaggcctggagcggccgcccagccagctgtgtggacatggagcccccacgcatcaagtgccccagcgtgaaggagagaattgctgagcccaacaagctgactgtgcgggtgtcctgggagaccccagagggccgggacacagcagatggcatcctgacagatgtgatcctgaagggcctgcccccaggcagcaacttccctgagggggaccacaagatccagtacacagtgtatgacagagctgagaacaagggcacctgcaagttccgggtgaaggtgcgggtgaagagatgtgggaagctgaatgccccagaaaatggctacatgaagtgcagcagtgatggagacaactacggggccacctgtgagttcagctgcattggaggctatgagctgcagggcagccctgcccgggtgtgccagagcaacctggcctggagcggcacagagcccacctgtgccgccatgaatgtgaatgtgggcgtgaggacagctgctgccctgctggaccagttctatgagaagaggcggctgctgattgtgtccacccccacagccaggaacctgctgtaccgcctgcagctgggcatgctgcaggccgtggccgccaaccccaccctgctgctgcagtatggagccagcggctag

SEQ ID NO: 172134 - DNA, 1335 bp, synthetic construct
  misc_feature 1..1335: note = Description of Artificial Sequence: Synthetic coding sequence
  source 1..1335: mol_type = other DNA
atgggcagccctgcccacaggcctgccctgctgctgctgctgccccccctgctgctgctgctgctgctgcgggtgccccccagccgctccttcccagacaccccctggtgcagccccatcaaggtgaagtatggagatgtgtactgccgggccccccagggcggctactacaagacagccctgggcacccgctgtgacatccgctgccagaagggctatgagctgcacggcagcagcctgctgatctgccagagcaacaagcgctggagcgacaaggtgatctgcaagcagaagcgctgccccaccctggccatgcctgccaacggcggcttcaagtgtgtggatggagcctacttcaacagccgctgtgagtactactgcagccctggctacaccctgaagggggagaggacagtgacctgcatggacaacaaggcctggagcggccgcccagccagctgtgtggacatggagcccccacgcatcaagtgccccagcgtgaaggagagaattgctgagcccaacaagctgactgtgcgggtgtcctgggagaccccagagggccgggacacagcagatggcatcctgacagatgtgatcctgaagggcctgcccccaggcagcaacttccctgagggggaccacaagatccagtacacagtgtatgacagagctgagaacaagggcacctgcaagttccgggtgaaggtgcgggtgaagagatgtgggaagctgaatgccccagaaaatggctacatgaagtgcagcagtgatggagacaactacggggccacctgtgagttcagctgcattggaggctatgagctgcagggcagccctgcccgggtgtgccagagcaacctggcctggagcggcacagagcccacctgtgccgccatgaatgtgaatgtgggcgtgaggacagctgctgccctgctggaccagttctatgagaagaggcggctgctgattgtgtccacccccacagccaggaacctgctgtaccgcctgcagctgggcatgctgcagcaggcccagtgtggcctggacctgcggcacatcaccgtggtggagctggtgggcgtcttccccaccctgattggccgcatcggggccaagatcatgcccccagccctggccctgcagctgcggctgctgctgcgcatccccctgtacagcttctccatggtgctggtggacaagcacggcatggacaaggagagatatgtgtccctggtgatgcctgtggccctcttcaacctgattgacaccttccccctgaggaaggaggagatggtgctgcaggccgagatgagccagacctgcaacacctag

SEQ ID NO: 172135 - DNA, 1398 bp, synthetic construct
  misc_feature 1..1398: note = Description of Artificial Sequence: Synthetic coding sequence
  source 1..1398: mol_type = other DNA
atggccagccagctgacccagagaggagccctcttcctgctcttcttcctgaccccagctgtgacccccacctggtacgccggcagcggctactacccagatgagagctacaatgaggtgtatgcagaggaggtgccccaggccccagccctggactacagagtgccccgctggtgctacaccctgaacatccaggatggagaggccacctgctacagccccaagggcggcaactaccacagcagcctgggcacccgctgtgagctgagctgtgaccggggcttccgcctcatcggccgccgctctgtgcagtgcctgcccagccgccgctggagcggcacagcctactgccggcagatgcgctgccacgccctgcccttcatcaccagcggcacctacacctgcaccaatggagtgctgctggacagccgctgtgactacagctgcagcagcggctaccacctggagggggacaggagccgcatctgcatggaggatggccgctggagcggcggggagcctgtgtgtgtggacattgatcctcccaagatccgctgcccccacagccgggagaagatggccgagcctgagaagctgacagcccgggtgtactgggacccccccctggtgaaggacagcgcagatggcaccatcaccagggtgaccctgcggggccctgagcccggcagccacttccctgagggggagcacgtgatccgctacacagcctatgaccgggcctacaacagagccagctgcaagttcatcgtgaaggtgcaggtgcggcgctgccccaccctgaagccaccccagcacggctacctgacctgcaccagcgctggggacaactacggggccacctgtgagtaccactgtgatggcggctatgaccggcagggcacccccagccgggtgtgccagagcagccggcagtggagcggcagcccccccatctgtgcccccatgaagatcaacgtgaatgtgaacagcgctgctggcctgctggaccagttctatgagaagcagaggctgctgatcatcagcgccccagaccccagcaaccgctactacaagatgcagatctccatgctgcagcagagcacctgtggcctggacctgcggcacgtgaccatcatcgagctggtgggccagcccccccaggaggtgggccgcatccgggagcagcagctgagcgccaacatcatcgaggagctgcggcagttccagaggctgaccaggagctacttcaacatggtgctgattgacaagcagggcatcgaccgggaccgctacatggagcctgtgaccccagaggagatcttcaccttcattgatgactacctgctgagcaaccaggagctgacccagaggcgggagcagagggacatctgtgagtag

SEQ ID NO: 172136 - DNA, 1452 bp, synthetic construct
  misc_feature 1..1452: note = Description of Artificial Sequence: Synthetic coding sequence
  source 1..1452: mol_type = other DNA
tgaaccttcatggtggaggatgctgtggaggccatcggctttgggaagttccagtggaagctgtctgtgctgaccggcctggcctggatggctgatgccatggagatgatgatcctgagcatcctggccccccagctgcactgtgagtggaggctgcccagctggcaggtggccctgctgacctctgtggtgtttgtgggcatgatgagcagcagcaccctgtggggcaacatcagtgaccagtatggcaggaagacaggcctgaagatctctgtgctgtggaccctgtactacggcatcctgagcgcctttgcccctgtgtacagctggatcctggtgctgcggggcctggtgggcttcggcatcggcggcgtgccccagagcgtgaccctgtatgcagagttcctgcccatgaaggcccgggccaagtgcatcctgctgattgaggtgttctgggccatcggcaccgtgtttgaggtggtgctggccgtgtttgtgatgcccagcctgggctggcgctggctgctgatcctgtctgctgtgcccctgctgctgtttgctgtgctgtgcttctggctgcctgagagcgcccgctatgatgtgctgagcggcaaccaggagaaggccatcgccaccctgaagagaattgccacagaaaatggagcccccatgcccctgggcaagctgatcatcagccggcaggaggaccggggcaagatgagggacctcttcaccccccacttccgctggaccaccctgctgctgtggttcatctggttcagcaatgccttctcctactacggcctggtgctgctgaccacagagctgttccaggccggagatgtgtgtggcatcagcagcaggaagaaggctgtggaggccaagtgcagcctggcctgtgagtacctgtctgaggaggactacatggacctgctgtggaccaccctgtctgagttccctggggtgctggtgaccctgtggatcatcgaccggctgggcaggaagaagaccatggccctgtgcttcgtcatcttctccttctgcagcctgctgctcttcatctgtgtgggcagaaatgtgctgaccctgctgctcttcatcgcccgggccttcatcagcggcggcttccaggccgcctacgtgtacaccccagaggtgtaccccacagccacccgggccctgggcctgggcacctgcagcggcatggcccgggtgggcgccctgatcacccccttcatcgcccaggtgatgctggagagctctgtgtacctgaccctggccgtgtacagcggctgctgcctgctggccgccctggccagctgcttcctgcccatcgagaccaagggccggggcctgcaggagagcagccaccgggagtggggccaggagatggtgggccggggcatgcacggggccggcgtgaccaggagcaacagcggcagccaggagtag

SEQ ID NO: 172137 - DNA, 39 bp, synthetic construct
  misc_feature 1..39: note = Description of Artificial Sequence: Synthetic coding sequence
  source 1..39: mol_type = other DNA
atggaggaggacctcttccagctgcggcagctgccctag

SEQ ID NO: 172138 - DNA, 1023 bp, synthetic construct
  misc_feature 1..1023: note = Description of Artificial Sequence: Synthetic coding sequence
  source 1..1023: mol_type = other DNA
atggctgctggccgcctcatcatcaagacagagttcctgcccaccaagtaccggggctacatgctgcccctgagccaggtgttctggctggccggcagcctgctgatcatcggcctggccagcgtcatcatccccaccatcggctggcgctggctgatccgggtggccagcatccctggcatcatcctgattgtggccttcaagttcatccctgagagcgcccgcttcaacgtgtccacaggcaacaccagggctgccctggccaccctggagcgggtggccaagatgaacagatctgtgatgcctgagggcaagctggtggagcctgtgctggagaagaggggccgctttgctgacctgctggatgccaagtacctgcggaccaccctgcagatctgggtgatctggctgggcatcagctttgcctactacggcgtcatcctggccagcgctgagctgctggagcgggacctggtgtgtggcagcaagagtgacagcgctgtggtggtgactggaggagacagcggggagagccagagcccctgctactgccacatgtttgcccccagcgactaccgcaccatgatcatcagcaccatcggggagatcgccctgaaccccctgaacatcctgggcatcaacttcctgggccggcggctgagcctgagcatcaccatgggctgcacagccctcttcttcctgctgctgaacatctgcaccagcagcgctggcctcatcggcttcctgttcatgctgcgggccctggtggccgccaacttcaacacagtgtacatctacacagctgaggtgtaccccaccaccatgagggccctgggcatgggcaccagcggcagcctgtgcagaattggagccatggtggcccccttcatcagccaggtgctgatgtctgccagcatcctgggcgccctgtgcctcttcagctctgtgtgtgtggtgtgtgccatcagcgccttcaccctgcccatcgagaccaagggccgggccctgcagcagatcaagtag

SEQ ID NO: 172139 - DNA, 1479 bp, synthetic construct
  misc_feature 1..1479: note = Description of Artificial Sequence: Synthetic coding sequence
  source 1..1479: mol_type = other DNA
atggccaccaagcccacagagcctgtgaccatcctgagcctgaggaagctgagcctgggcacagctgagccccaggtgaaggagcccaagaccttcaccgtggaggatgctgtggagaccatcggcttcggccgcttccacatcgccctcttcctgatcatgggcagcactggagtggtggaggccatggagatcatgctgattgctgtggtgtcccctgtgatccgctgtgagtggcagctggagaactggcaggtggccctggtgaccaccatggtgttcttcggctacatggtgttcagcatcctgtttggcctgctggccgacagatatggccgctggaagatcctgctgatctccttcctgtggggcgcctacttcagcctgctgaccagctttgcccccagctacatctggtttgtgttcctgcggaccatggtgggctgcggcgtgtctggccacagccagggcctcatcatcaagacagagttcctgcccaccaagtaccggggctacatgctgcccctgagccaggtgttctggctggccggcagcctgctgatcatcggcctggccagcgtcatcatccccaccatcggctggcgctggctgatccgggtggccagcatccctggcatcatcctgattgtggccttcaagttcatccctgagagcgcccgcttcaacgtgtccacaggcaacaccagggctgccctggccaccctggagcgggtggccaagatgaacagatctgtgatgcctgagggcaagctggtggagcctgtgctggagaagaggggccgctttgctgacctgctggatgccaagtacctgcggaccaccctgcagatctgggtgatctggctgggcatcagctttgcctactacggcgtcatcctggccagcgctgagctgctggagcgggacctggtgtgtggcagcaagagtgacagcgctgtggtggtgactggaggagacagcggggagagccagagcccctgctactgccacatgtttgcccccagcgactaccgcaccatgatcatcagcaccatcggggagatcgccctgaaccccctgaacatcctgggcatcaacttcctgggccggcggctgagcctgagcatcaccatgggctgcacagccctcttcttcctgctgctgaacatctgcaccagcagcgctggcctcatcggcttcctgttcatgctgcgggccctggtggccgccaacttcaacacagtgtacatctacacagctgaggtgtaccccaccaccatgagggccctgggcatgggcaccagcggcagcctgtgcagaattggagccatggtggcccccttcatcagccaggtgctgatgtctgccagcatcctgggcgccctgtgcctcttcagctctgtgtgtgtggtgtgtgccatcagcgccttcaccctgcccatcgagaccaagggccgggccctgcagcagatcaagtag

SEQ ID NO: 172140 - DNA, 1023 bp, synthetic construct; identical to SEQ ID NO: 172138
  misc_feature 1..1023: note = Description of Artificial Sequence: Synthetic coding sequence
  source 1..1023: mol_type = other DNA

SEQ ID NO: 172141 - DNA, 1758 bp, synthetic construct
  misc_feature 1..1758: note = Description of Artificial Sequence: Synthetic coding sequence
  source 1..1758: mol_type = other DNA
atgggcagcctgaaggaggagctgctgaaggccatctggcacgccttcaccgccctggaccaggaccacagcggcaaggtgtccaagagccagctgaaggtgctgagccacaacctgtgcaccgtgctgaaggtgccccatgaccctgtggccctggaggagcacttcagagatgatgatgagggccctgtgagcaaccagggctacatgccctacctgaaccgcttcatcctggagaaggtgcaggacaactttgacaagattgagttcaacaggatgtgctggaccctgtgtgtgaagaagaacctgaccaagaaccccctgctgatcacagaagaagatgccttcaagatctgggtgatcttcaacttcctgtctgaggacaagtaccccctcatcatcgtgtctgaggagattgagtacctgctgaagaagctgacagaggccatgggcggcggctggcagcaggagcagtttgagcactacaagatcaactttgatgacagcaagaatggcctgagcgcctgggagctgattgagctgattggaaatggccagttcagcaagggcatggaccggcagacagtgtccatggccatcaatgaggtgttcaatgaactcatcctggatgtgctgaagcagggctacatgatgaagaagggccacaggaggaagaactggacagagcgctggtttgtgctgaagcccaacatcatctcctactacgtgtctgaggacctgaaggacaagaagggggacatcctgctggatgagaactgctgcgtggagagcctgcctgacaaggatggcaagaagtgcctcttcctggtgaagtgctttgacaagacctttgagatcagcgccagtgacaagaagaagaagcaggagtggatccaggccatccacagcaccatccacctgctgaagctgggcagccccccaccccacaaggaggcccggcagaggaggaaggagctgaggaagaagcagctggccgagcaggaggagctggagcggcagatgaaggagctgcaggccgccaatgaaagcaagcagcaggagctggaggccgtgaggaagaagctggaggaggccgccagcagagctgctgaggaggagaagaagaggctgcagacccaggtggagctgcaggcccgcttcagcacagagctggagcgggagaagctgatccggcagcagatggaggagcaggtggcccagaagagcagcgagctggagcagtacctgcagagggtgcgggagctggaggacatgtacctgaagctgcaggaggccctggaggatgagcggcaggcccggcaggatgaggagaccgtgaggaagctgcaggcccggctgctggaggaggagagcagcaagagagctgagctggagaagtggcacctggagcagcagcaggccatccagaccacagaggccgagaagcaggagctggagaaccagagggtgctgaaggagcaggccctgcaggaggccatggagcagctggagcagctggagctggagaggaagcaggccctggagcagtatgaggaggtgaagaagaagctggagatggccaccaacaagaccaagtcctggaaggacaaggtggcccaccacgagggcctcatccgcctcatcgagcccggcagcaagaacccccacctgatcaccaactggggccctgctgccttcacagaagctgagctggaggagcgggagaagaactggaaggagaagaagaccacagaatag

SEQ ID NO: 172142 - DNA, 3129 bp, synthetic construct
  misc_feature 1..3129: note = Description of Artificial Sequence: Synthetic coding sequence
  source 1..3129: mol_type = other DNA
atggagcaggacacagctgctgtggccgccaccgtggccgctgctgatgccacagccaccatcgtggtgattgaagatgagcagcccggccccagcaccagccaggaggagggcgctgctgctgctgccacagaggccacagctgccacagagaagggggagaagaagaaggagaagaatgtgtcctccttccagctgaagctggccgccaaggcccccaagtctgagaaggagatggaccctgaatatgaggagaagatgaaggctgaccgggccaagagatttgagttcctgctgaagcagacagagctgtttgcccacttcatccagcccagcgcccagaagagccccaccagccccctgaacatgaagctgggccggccccgcatcaagaaggatgagaagcagagcctcatctctgctggggactaccgccacagaagaacagagcaggaggaggatgaggagctgctgtctgagagcaggaagaccagcaatgtgtgcatccgctttgaggtgagccccagctatgtgaagggcggccccctgcgggactaccagatccggggcctgaactggctgatcagcctgtatgaaaatggagtgaatggcatcctggctgatgagatgggcctgggcaagaccctgcagaccatcgccctgctgggctacctgaagcactacagaaacatccctggcccccacatggtgctggtgcccaagagcaccctgcacaactggatgaatgagttcaagcgctgggtgcccagcctgcgggtcatctgctttgtgggggacaaggatgcccgggccgccttcatcagagatgagatgatgcctggagagtgggatgtgtgtgtgaccagctatgagatggtgatcaaggagaagagcgtcttcaagaagttccactggagatacctggtgattgatgaggcccaccgcatcaagaatgagaagagcaagctgtctgagatcgtgcgggagttcaagagcaccaaccggctgctgctgaccggcacccccctgcagaacaacctgcacgagctgtgggccctgctgaacttcctgctgcctgatgtgttcaacagcgcagatgactttgacagctggtttgacaccaagaactgcctgggggaccagaagctggtggagcggctgcatgctgtgctgaagcccttcctgctgcggcgcatcaagacagatgtggagaagagcctgccccccaagaaggagatcaagatctacctgggcctgagcaagatgcagcgggagtggtacaccaagatcctgatgaaggacattgatgtgctgaacagcagcggcaagatggacaagatgaggctgctgaacatcctgatgcagctgaggaagtgctgcaaccacccctacctgtttgatggagctgagcccggccccccctacaccacagatgagcacatcgtgagcaacagcggcaagatggtggtgctggacaagctgctggccaagctgaaggagcagggcagccgggtgctgatcttcagccagatgacccggctgctggacatcctggaggactactgcatgtggaggggctatgagtactgccgcctggatggccagacccctcatgaggagcgggaggaggccatcgaggccttcaatgcccccaacagcagcaagttcatcttcatgctgagcacccgggccggcggcctgggcatcaacctggccagcgcagatgtggtgatcctgtatgacagcgactggaacccccaggtggacctgcaggccatggaccgggcccacagaattggccagaagaagcctgtgcgggtcttccgcctcatcacagacaacacagtggaggagcgcatcgtggagcgggcagagatcaagctgcggctggacagcatcgtcatccagcagggccgcctgattgaccagcagagcaacaagctggccaaggaggagatgctgcagatgatcagacatggagccacccacgtgtttgccagcaaggagagcgagctgacagatgaggacatcaccaccatcctggagcggggggagaagaagacagctgagatgaatgaaaggctgcagaagatgggagagagcagcctgaggaacttcaggatggacatcgagcagagcctgtacaagtttgaaggagaggactaccgggagaagcagaagctgggcatggtggagtggattgagccccccaagcgggagaggaaggccaactatgctgtggatgcctacttccgggaggccctgcgggtgtctgagcccaagatccccaaggccccccggccccccaagcagcccaacgtgcaggacttccagttcttccccccccggctgtttgagctgctggagaaggagatcctgtactacaggaagaccatcggctacaaggtgcccagaaatccagacatccccaacccagccctggcccagcgggaggagcagaagaagattgatggagctgagcccctgaccccagaggagacagaggagaaggagaagctgctgacccagggcttcaccaactggaccaagagggacttcaaccagttcatcaaggccaatgagaagtatggaagagatgacatcgacaacatcgcccgggaggtggagggcaagagccctgaggaggtgatggagtacagcgctgtgttctgggagcgctgcaatgagctgcaggacatcgagaagatcatggcccagatcgagcggggggaggcccgcatccagaggcgcatcagcatcaagaaggccctggatgccaagatcgcccgctacaaggcccccttccaccagctgcgcatccagtatggcaccagcaagggcaagaactacacagaggaggaggaccgcttcctgatctgcatgctgcacaagatgggctttgaccgggagaatgtgtatgaggagctgcggcagtgtgtgagaaatgccccccagttccgctttgactggttcatcaagagcaggacagccatggagttccagaggcgctgcaacaccctcatcagcctgattgagaaggagaacatggagattgaggagcgggagcgggcagagaagaagaagagggccaccaagacccccatggtgaagttcagcgccttctcctag

SEQ ID NO: 172143 - DNA, 3165 bp, synthetic construct
  misc_feature 1..3165: note = Description of Artificial Sequence: Synthetic coding sequence
  source 1..3165: mol_type = other DNA
atggagcaggacacagctgctgtggccgccaccgtggccgctgctgatgccacagccaccatcgtggtgattgaagatgagcagcccggccccagcaccagccaggaggagggcgctgctgctgctgccacagaggccacagctgccacagagaagggggagaagaagaaggagaagaatgtgtcctccttccagctgaagctggccgccaaggcccccaagtctgagaaggagatggaccctgaatatgaggagaagatgaaggctgaccgggccaagagatttgagttcctgctgaagcagacagagctgtttgcccacttcatccagcccagcgcccagaagagccccaccagccccctgaacatgaagctgggccggccccgcatcaagaaggatgagaagcagagcctcatctctgctggggactaccgccacagaagaacagagcaggaggaggatgaggagctgctgtctgagagcaggaagaccagcaatgtgtgcatccgctttgaggtgagccccagctatgtgaagggcggccccctgcgggactaccagatccggggcctgaactggctgatcagcctgtatgaaaatggagtgaatggcatcctggctgatgagatgggcctgggcaagaccctgcagaccatcgccctgctgggctacctgaagcactacagaaacatccctggcccccacatggtgctggtgcccaagagcaccctgcacaactggatgaatgagttcaagcgctgggtgcccagcctgcgggtcatctgctttgtgggggacaaggatgcccgggccgccttcatcagagatgagatgatgcctggagagtgggatgtgtgtgtgaccagctatgagatggtgatcaaggagaagagcgtcttcaagaagttccactggagatacctggtgattgatgaggcccaccgcatcaagaatgagaagagcaagctgtctgagatcgtgcgggagttcaagagcaccaaccggctgctgctgaccggcacccccctgcagaacaacctgcacgagctgtgggccctgctgaacttcctgctgcctgatgtgttcaacagcgcagatgactttgacagctggtttgacaccaagaactgcctgggggaccagaagctggtggagcggctgcatgctgtgctgaagcccttcctgctgcggcgcatcaagacagatgtggagaagagcctgccccccaagaaggagatcaagatctacctgggcctgagcaagatgcagcgggagtggtacaccaagatcctgatgaaggacattgatgtgctgaacagcagcggcaagatggacaagatgaggctgctgaacatcctgatgcagctgaggaagtgctgcaaccacccctacctgtttgatggagctgagcccggccccccctacaccacagatgagcacatcgtgagcaacagcggcaagatggtggtgctggacaagctgctggccaagctgaaggagcagggcagccgggtgctgatcttcagccagatgacccggctgctggacatcctggaggactactgcatgtggaggggctatgagtactgccgcctggatggccagacccctcatgaggagcgggaggacaagttcctggaggtggagttcctgggccagcgggaggccatcgaggccttcaatgcccccaacagcagcaagttcatcttcatgctgagcacccgggccggcggcctgggcatcaacctggccagcgcagatgtggtgatcctgtatgacagcgactggaacccccaggtggacctgcaggccatggaccgggcccacagaattggccagaagaagcctgtgcgggtcttccgcctcatcacagacaacacagtggaggagcgcatcgtggagcgggcagagatcaagctgcggctggacagcatcgtcatccagcagggccgcctgattgaccagcagagcaacaagctggccaaggaggagatgctgcagatgatcagacatggagccacccacgtgtttgccagcaaggagagcgagctgacagatgaggacatcaccaccatcctggagcggggggagaagaagacagctgagatgaatgaaaggctgcagaagatgggagagagcagcctgaggaacttcaggatggacatcgagcagagcctgtacaagtttgaaggagaggactaccgggagaagcagaagctgggcatggtggagtggattgagccccccaagcgggagaggaaggccaactatgctgtggatgcctacttccgggaggccctgcgggtgtctgagcccaagatccccaaggccccccggccccccaagcagcccaacgtgcaggacttccagttcttccccccccggctgtttgagctgctggagaaggagatcctgtactacaggaagaccatcggctacaaggtgcccagaaatccagacatccccaacccagccctggcccagcgggaggagcagaagaagattgatggagctgagcccctgaccccagaggagacagaggagaaggagaagctgctgacccagggcttcaccaactggaccaagagggacttcaaccagttcatcaaggccaatgagaagtatggaagagatgacatcgacaacatcgcccgggaggtggagggcaagagccctgaggaggtgatggagtacagcgctgtgttctgggagcgctgcaatgagctgcaggacatcgagaagatcatggcccagatcgagcggggggaggcccgcatccagaggcgcatcagcatcaagaaggccctggatgccaagatcgcccgctacaaggcccccttccaccagctgcgcatccagtatggcaccagcaagggcaagaactacacagaggaggaggaccgcttcctgatctgcatgctgcacaagatgggctttgaccgggagaatgtgtatgaggagctgcggcagtgtgtgagaaatgccccccagttccgctttgactggttcatcaagagcaggacagccatggagttccagaggcgctgcaacaccctcatcagcctgattgagaaggagaacatggagattgaggagcgggagcgggcagagaagaagaagagggccaccaagacccccatggtgaagttcagcgccttctcctag

SEQ ID NO: 172144 - DNA, 3129 bp, synthetic construct; identical to SEQ ID NO: 172142
  misc_feature 1..3129: note = Description of Artificial Sequence: Synthetic coding sequence
  source 1..3129: mol_type = other DNA

SEQ ID NO: 172145 - DNA, 3018 bp, synthetic construct
  misc_feature 1..3018: note = Description of Artificial Sequence: Synthetic coding sequence
  source 1..3018: mol_type = other DNA
atggagcaggacacagctgctgtggccgccaccgtggccgctgctgatgccacagccaccatcgtggtgattgaagatgagcagcccggccccagcaccagccaggaggagaagaatgtgagcagcttccagctgaagctggccgccaaggcccccaagtctgagaaggagatggaccctgaatatgaggagaagatgaaggctgaccgggccaagagatttgagttcctgctgaagcagacagagctgtttgcccacttcatccagcccagcgcccagaagagccccaccagccccctgaacatgaagctgggccggccccgcatcaagaaggatgagaagcagagcctcatctctgctggggactaccgccacagaagaacagagcaggaggaggatgaggagctgctgtctgagagcaggaagaccagcaatgtgtgcatccgctttgaggtgagccccagctatgtgaagggcggccccctgcgggactaccagatccggggcctgaactggctgatcagcctgtatgaaaatggagtgaatggcatcctggctgatgagatgggcctgggcaagaccctgcagaccatcgccctgctgggctacctgaagcactacagaaacatccctggcccccacatggtgctggtgcccaagagcaccctgcacaactggatgaatgagttcaagcgctgggtgcccagcctgcgggtcatctgctttgtgggggacaaggatgcccgggccgccttcatcagagatgagatgatgcctggagagtgggatgtgtgtgtgaccagctatgagatggtgatcaaggagaagtctgtgttcaagaagttccactggagatacctggtgattgatgaggcccaccgcatcaagaatgagaagagcaagctgtctgaaattgtgcgggagttcaagagcaccaaccggctgctgctgaccggcacccccctgcagaacaacctgcacgagctgtgggccctgctgaacttcctgctgcctgatgtgttcaacagcgcagatgactttgacagctggtttgacaccaagaactgcctgggggaccagaagctggtggagcggctgcatgctgtgctgaagcccttcctgctgcggcgcatcaagacagatgtggagaagagcctgccccccaagaaggagatcaagatctacctgggcctgagcaagatgcagcgggagtggtacaccaagatcctgatgaaggacattgatgtgctgaacagcagcggcaagatggacaagatgaggctgctgaacatcctgatgcagctgaggaagtgctgcaaccacccctacctgtttgatggagctgagcccggccccccctacaccacagatgagcacatcgtgagcaacagcggcaagatggtggtgctggacaagctgctggccaagctgaaggagcagggcagccgggtgctgatcttcagccagatgacccggctgctggacatcctggaggactactgcatgtggaggggctatgagtactgccgcctggatggccagacccctcatgaggagcgggaggacaagttcctggaggtggagttcctgggccagcgggaggccatcgaggccttcaatgcccccaacagcagcaagttcatcttcatgctgagcaccagggctgggggcctgggcatcaacctggccagcgcagatgtggtgatcctgtatgacagcgactggaacccccaggtggacctgcaggccatggaccgggcccaccgcatcggccagaagaagcctgtgcgggtcttccgcctcatcacagacaacacagtggaggagagaattgtggagagagctgagatcaagctgcggctggacagcatcgtcatccagcagggccgcctgattgaccagcagagcaacaagctggccaaggaggagatgctgcagatgatccgccacggggccacccacgtgtttgccagcaaggagagcgagctgacagatgaggacatcaccaccatcctggagcggggggagaagaagacagctgagatgaatgaaaggctgcagaagatgggagagagcagcctgaggaacttcaggatggacatcgagcagagcctgtacaagtttgaaggagaggactaccgggagaagcagaagctgggcatggtggagtggattgagccccccaagcgggagaggaaggccaactatgctgtggatgcctacttccgggaggccctgcgggtgtctgagcccaagatccccaaggcccccaggcctcccaagcagcccaacgtgcaggacttccagttcttccccccccggctgtttgagctgctggagaaggagatcctgtactacaggaagaccatcggctacaaggtgcccaggaacccagacatccccaacccagccctggcccagcgggaggagcagaagaagattgatggagctgagcccctgaccccagaggagacagaggagaaggagaagctgctgacccagggcttcaccaactggaccaagagggacttcaaccagttcatcaaggccaatgagaagtatggaagagatgacatcgacaacatcgcccgggaggtggagggcaagagccctgaggaggtgatggagtacagcgctgtgttctgggagcgctgcaatgagctgcaggacatcgagaagatcatggcccagatcgagcggggggaggcccgcatccagaggcgcatcagcatcaagaaggccctggatgccaagatcgcccgctacaaggcccccttccaccagctgcgcatccagtatggcaccagcaagggcaagaactacacagaggaggaggaccgcttcctgatctgcatgctgcacaagatgggctttgacagagaaaatgtgtatgaggagctgcggcagtgtgtgagaaatgccccccagttccgctttgactggttcatcaagagcaggacagccatggagttccagaggcgctgcaacaccctcatcagcctcatcgagaaggagtag

SEQ ID NO: 172146 - DNA, 837 bp, synthetic construct
  misc_feature 1..837: note = Description of Artificial Sequence: Synthetic coding sequence
  source 1..837: mol_type = other DNA
atgctgatgaagaggctggccgcccgctgctttgctggcctgctgatcctgagccccctgaccgtcatcagtgacagcaggcctgctgacagcggcaaggccattgaagatggcaacctggaggagatggaggaggaggtgcggctgaagaagaggaagagaagaagaaatgtggacaaggaccctgccaaggaggatgtggagaaggccaagaagagaagaggccggcccccagctgagaagctgagccccaacccccccaagctgaccaagcagatgaatgccatcatcgacaccgtcatcaactacaaggacagcagcggccggcagctgtctgaggtgttcatccagctgcccagcaggaaggagctgcctgagtactatgagctgatcaggaagcctgtggacttcaagaagatcaaggagcgcatccggaaccacaagtaccgcagcctgggggacctggagaaggatgtgatgctgctgtgccacaatgcccagaccttcaacctggagggcagccagatctatgaggacagcatcgtgctgcagagcgtcttcaagagcgcccggcagaagatcgccaaggaggaggagagtgaagatgagagcaatgaggaggaggaggaggaggatgaggaggagagcgagagcgaggccaagtctgtgaaggtgaagatcaagctgaacaagaaggatgacaagggccgggacaagggcaagggcaagaagaggcccaacagaggcaaggccaagcctgtggtgtctgactttgacagtgatgaggagcaggatgagcgggagcagagcgagggcagcggcacagatgatgaatag

SEQ ID NO: 172147 - DNA, 711 bp, synthetic construct
  misc_feature 1..711: note = Description of Artificial Sequence: Synthetic coding sequence
  source 1..711: mol_type = other DNA
atggaggaggaggtgcggctgaagaagaggaagagaagaagaaatgtggacaaggaccctgccaaggaggatgtggagaaggccaagaagagaagaggccggcccccagctgagaagctgagccccaacccccccaagctgaccaagcagatgaatgccatcatcgacaccgtcatcaactacaaggacagcagcggccggcagctgtctgaggtgttcatccagctgcccagcaggaaggagctgcctgagtactatgagctgatcaggaagcctgtggacttcaagaagatcaaggagcgcatccggaaccacaagtaccgcagcctgggggacctggagaaggatgtgatgctgctgtgccacaatgcccagaccttcaacctggagggcagccagatctatgaggacagcatcgtgctgcagagcgtcttcaagagcgcccggcagaagatcgccaaggaggaggagagtgaagatgagagcaatgaggaggaggaggaggaggatgaggaggagagcgagagcgaggccaagtctgtgaaggtgaagatcaagctgaacaagaaggatgacaagggccgggacaagggcaagggcaagaagaggcccaacagaggcaaggccaagcctgtggtgtctgactttgacagtgatgaggagcaggatgagcgggagcagagcgagggcagcggcacagatgatgaatag

SEQ ID NO: 172148 - DNA, 4773 bp, synthetic construct
  misc_feature 1..4773: note = Description of Artificial Sequence: Synthetic coding sequence
  source 1..4773: mol_type = other DNA
atgagcacccccacagatcctggggccatgccccaccctggccccagccctggccctggccccagccctggccccatcctgggccccagccctggccctggccccagccctggctctgtgcacagcatgatgggccccagccctggcccccccagcgtgagccaccccatgcccaccatgggcagcacagacttcccccaggagggcatgcaccagatgcacaagcccattgatggcatccatgacaagggcatcgtggaggacatccactgcggctccatgaagggcaccggcatgaggcctccccaccctggcatgggccccccccagagccccatggaccagcacagccagggctacatgagcccccaccccagccccctgggcgcccctgagcacgtgagcagccccatgtctgggggcggccccaccccaccccagatgccacccagccagcccggggccctgatccctggggacccccaggccatgagccagcccaacagaggccccagccccttcagccctgtgcagctgcaccagctgcgggcccagatcctggcctacaagatgctggcccggggccagcccctgcctgagaccctgcagctggccgtgcagggcaagaggaccctgcccggcctgcagcagcagcagcagcagcagcagcagcagcagcagcagcagcagcagcagcagcagcagcagcagcagccccagcagcagcccccccagccccagacccagcagcagcagcagcctgccctggtgaactacaaccggcccagcggccctggccctgagctgagcggccccagcaccccccagaagctgcctgtgcctgcccctgggggccggcccagccctgcccctcctgctgctgcccagcccccagctgctgctgtgcccggccccagcgtgccccagcctgcccctggccagcccagccctgtgctgcagctgcagcagaagcagagccgcatcagccccatccagaagccccagggcctggaccctgtggagatcctgcaggagcgggagtaccgcctgcaggcccgcatcgcccaccgcatccaggagctggagaacctgcccggcagcctgcccccagacctgcggaccaaggccaccgtggagctgaaggccctgcggctgctgaacttccagaggcagctgcggcaggaggtggtggcctgcatgagaagagacaccaccctggagacagccctgaacagcaaggcctacaagaggagcaagaggcagaccctgcgggaggccaggatgacagagaagctggagaagcagcagaagattgagcaggagaggaagaggcggcagaagcaccaggagtacctgaacagcatcctgcagcacgccaaggacttcaaggagtaccacaggtctgtggccggcaagatccagaagctgagcaaggctgtggccacctggcacgccaacacagagcgggagcagaagaaggagacagagcgcatcgagaaggagaggatgaggcggctgatggctgaagatgaggagggctacaggaagctgattgaccagaagaaggaccggcggctggcctacctgctgcagcagacagatgaatatgtggccaacctgaccaacctggtgtgggagcacaagcaggcccaggccgccaaggagaagaagaagagaagaagaaggaagaagaaggccgaggagaatgctgagggcggggagagcgccctgggcccagatggagagcccattgatgagagcagccagatgtctgacctgcctgtgaaggtgacccacacagagaccgggaaggtgctgtttggacctgaggcccccaaggccagccagctggatgcctggctggagatgaaccctggctatgaggtggcccccaggagtgacagcgaggagagtgacagcgactatgaggaggaggatgaggaggaggagagcagccggcaggagacagaggagaagatcctgctggaccccaacagcgaggaggtgtctgagaaggatgccaagcagatcatcgagacagccaagcaggatgtggatgatgagtacagcatgcagtacagcgcccggggcagccagagctactacacagtggcccacgccatcagcgagcgggtggagaagcagagcgccctgctgatcaatggcaccctgaagcactaccagctgcagggcctggagtggatggtgtccctgtacaacaacaacctgaatggcatcctggctgatgagatgggcctgggcaagaccatccagaccatcgccctgatcacctacctgatggagcacaagaggctgaatggcccctacctgatcatcgtgcccctgagcaccctgagcaactggacctatgaatttgacaagtgggcccccagcgtggtgaagatctcctacaagggcaccccagccatgagaagaagcctggtgccccagctgcggagcggcaagttcaacgtgctgctgaccacctatgagtacatcatcaaggacaagcacatcctggccaagatccgctggaagtacatgattgtggatgagggccacaggatgaagaaccaccactgcaagctgacccaggtgctgaacacccactacgtggccccccggcgcatcctgctgaccggcacccccctgcagaacaagctgcctgagctgtgggccctgctgaacttcctgctgcccaccatcttcaagagctgcagcacctttgagcagtggttcaatgccccctttgccatgaccggggagcgggtggacctgaatgaggaggagaccatcctgatcatccggcggctgcacaaggtgctgcggcccttcctgctgcggcggctgaagaaggaggtggagagccagctgcctgagaaggtggagtatgtgatcaagtgtgacatgtctgccctgcagaagatcctgtaccgccacatgcaggccaagggcatcctgctgacagatggcagcgagaaggacaagaagggcaaaggaggagccaagaccctgatgaacaccatcatgcagctgaggaagatctgcaaccacccctacatgttccagcacatcgaggagagctttgctgagcacctgggctacagcaatggagtcatcaatggagctgagctgtaccgggccagcggcaagtttgagctgctggaccgcatcctgcccaagctgcgggccaccaaccaccgggtgctgctcttctgccagatgaccagcctgatgaccatcatggaggactactttgccttcaggaacttcctgtacctgcggctggatggcaccaccaagtcagaagatcgggccgccctgctgaagaagttcaatgaacctggcagccagtacttcatcttcctgctgagcacccgggccggcggcctgggcctgaacctgcaggccgctgacacagtggtgatctttgacagcgactggaacccccaccaggacctgcaggcccaggaccgggcccacagaattggccagcagaatgaggtgcgggtgctgcggctgtgcaccgtgaacagcgtggaggagaagatcctggccgccgccaagtacaagctgaatgtggaccagaaggtgatccaggccggcatgtttgaccagaagagcagcagccatgaaagaagagccttcctgcaggccatcctggagcacgaggaggagaatgaggaggaggatgaggtgcctgatgatgagaccctgaaccagatgattgcccggcgggaggaggagtttgacctcttcatgaggatggacatggacagaagaagagaagatgccaggaaccccaagaggaagccccggctgatggaggaggatgagctgcccagctggatcatcaaggatgatgctgaggtggagcggctgacctgtgaggaggaggaggagaagatcttcggccggggcagccggcagaggagagatgtggactacagtgatgccctgacagagaagcagtggctgcgggccattgaagatggcaacctggaggagatggaggaggaggtgcggctgaagaagaggaagagaagaagaaatgtggacaaggaccctgccaaggaggatgtggagaaggccaagaagagaagaggccggcccccagctgagaagctgagccccaacccccccaagctgaccaagcagatgaatgccatcatcgacaccgtcatcaactacaaggaccgctgcaatgtggagaaggtgcccagcaacagccagctggagattgagggcaacagcagcggccggcagctgtctgaggtgttcatccagctgcccagcaggaaggagctgcctgagtactatgagctgatcaggaagcctgtggacttcaagaagatcaaggagcgcatccggaaccacaagtaccgcagcctgggggacctggagaaggatgtgatgctgctgtgccacaatgcccagaccttcaacctggagggcagccagatctatgaggacagcatcgtgctgcagagcgtcttcaagagcgcccggcagaagatcgccaaggaggaggagagtgaagatgagagcaatgaggaggaggaggaggaggatgaggaggagagcgagagcgaggccaagtctgtgaaggtgaagatcaagctgaacaagaaggatgacaagggccgggacaagggcaagggcaagaagaggcccaacagaggcaaggccaagcctgtggtgtctgactttgacagtgatgaggagcaggatgagcgggagcagagcgagggcagcggcacagatgatgaatag

SEQ ID NO: 172149 - DNA, 4719 bp, synthetic construct
  misc_feature 1..4719: note = Description of Artificial Sequence: Synthetic coding sequence
  source 1..4719: mol_type = other DNA
atgagcacccccacagatcctggggccatgccccaccctggccccagccctggccctggccccagccctggccccatcctgggccccagccctggccctggccccagccctggctctgtgcacagcatgatgggccccagccctggcccccccagcgtgagccaccccatgcccaccatgggcagcacagacttcccccaggagggcatgcaccagatgcacaagcccattgatggcatccatgacaagggcatcgtggaggacatccactgcggctccatgaagggcaccggcatgaggcctccccaccctggcatgggccccccccagagccccatggaccagcacagccagggctacatgagcccccaccccagccccctgggcgcccctgagcacgtgagcagccccatgtctgggggcggccccaccccaccccagatgccacccagccagcccggggccctgatccctggggacccccaggccatgagccagcccaacagaggccccagccccttcagccctgtgcagctgcaccagctgcgggcccagatcctggcctacaagatgctggcccggggccagcccctgcctgagaccctgcagctggccgtgcagggcaagaggaccctgcccggcctgcagcagcagcagcagcagcagcagcagcagcagcagcagcagcagcagcagcagcagcagcagcagcagccccagcagcagcccccccagccccagacccagcagcagcagcagcctgccctggtgaactacaaccggcccagcggccctggccctgagctgagcggccccagcaccccccagaagctgcctgtgcctgcccctgggggccggcccagccctgcccctcctgctgctgcccagcccccagctgctgctgtgcccggccccagcgtgccccagcctgcccctggccagcccagccctgtgctgcagctgcagcagaagcagagccgcatcagccccatccagaagccccagggcctggaccctgtggagatcctgcaggagcgggagtaccgcctgcaggcccgcatcgcccaccgcatccaggagctggagaacctgcccggcagcctgcccccagacctgcggaccaaggccaccgtggagctgaaggccctgcggctgctgaacttccagaggcagctgcggcaggaggtggtggcctgcatgagaagagacaccaccctggagacagccctgaacagcaaggcctacaagaggagcaagaggcagaccctgcgggaggccaggatgacagagaagctggagaagcagcagaagattgagcaggagaggaagaggcggcagaagcaccaggagtacctgaacagcatcctgcagcacgccaaggacttcaaggagtaccacaggtctgtggccggcaagatccagaagctgagcaaggctgtggccacctggcacgccaacacagagcgggagcagaagaaggagacagagcgcatcgagaaggagaggatgaggcggctgatggctgaagatgaggagggctacaggaagctgattgaccagaagaaggaccggcggctggcctacctgctgcagcagacagatgaatatgtggccaacctgaccaacctggtgtgggagcacaagcaggcccaggccgccaaggagaagaagaagagaagaagaaggaagaagaaggccgaggagaatgctgagggcggggagagcgccctgggcccagatggagagcccattgatgagagcagccagatgtctgacctgcctgtgaaggtgacccacacagagaccgggaaggtgctgtttggacctgaggcccccaaggccagccagctggatgcctggctggagatgaaccctggctatgaggtggcccccaggagtgacagcgaggagagtgacagcgactatgaggaggaggatgaggaggaggagagcagccggcaggagacagaggagaagatcctgctggaccccaacagcgaggaggtgtctgagaaggatgccaagcagatcatcgagacagccaagcaggatgtggatgatgagtacagcatgcagtacagcgcccggggcagccagagctactacacagtggcccacgccatcagcgagcgggtggagaagcagagcgccctgctgatcaatggcaccctgaagcactaccagctgcagggcctggagtggatggtgtccctgtacaacaacaacctgaatggcatcctggctgatgagatgggcctgggcaagaccatccagaccatcgccctgatcacctacctgatggagcacaagaggctgaatggcccctacctgatcatcgtgcccctgagcaccctgagcaactggacctatgaatttgacaagtgggcccccagcgtggtgaagatctcctacaagggcaccccagccatgagaagaagcctggtgccccagctgcggagcggcaagttcaacgtgctgctgaccacctatgagtacatcatcaaggacaagcacatcctggccaagatccgctggaagtacatgattgtggatgagggccacaggatgaagaaccaccactgcaagctgacccaggtgctgaacacccactacgtggccccccggcgcatcctgctgaccggcacccccctgcagaacaagctgcctgagctgtgggccctgctgaacttcctgctgcccaccatcttcaagagctgcagcacctttgagcagtggttcaatgccccctttgccatgaccggggagcgggtggacctgaatgaggaggagaccatcctgatcatccggcggctgcacaaggtgctgcggcccttcctgctgcggcggctgaagaaggaggtggagagccagctgcctgagaaggtggagtatgtgatcaagtgtgacatgtctgccctgcagaagatcctgtaccgccacatgcaggccaagggcatcctgctgacagatggcagcgagaaggacaagaagggcaaaggaggagccaagaccctgatgaacaccatcatgcagctgaggaagatctgcaaccacccctacatgttccagcacatcgaggagagctttgctgagcacctgggctacagcaatggagtcatcaatggagctgagctgtaccgggccagcggcaagtttgagctgctggaccgcatcctgcccaagctgcgggccaccaaccaccgggtgctgctcttctgccagatgaccagcctgatgaccatcatggaggactactttgccttcaggaacttcctgtacctgcggctggatggcaccaccaagtcagaagatcgggccgccctgctgaagaagttcaatgaacctggcagccagtacttcatcttcctgctgagcacccgggccggcggcctgggcctgaacctgcaggccgctgacacagtggtgatctttgacagcgactggaacccccaccaggacctgcaggcccaggaccgggcccacagaattggccagcagaatgaggtgcgggtgctgcggctgtgcaccgtgaacagcgtggaggagaagatcctggccgccgccaagtacaagctgaatgtggaccagaaggtgatccaggccggcatgtttgaccagaagagcagcagccatgaaagaagagccttcctgcaggccatcctggagcacgaggaggagaatgaggaggaggatgaggtgcctgatgatgagaccctgaaccagatgattgcccggcgggaggaggagtttgacctcttcatgaggatggacatggacagaagaagagaagatgccaggaaccccaagaggaagccccggctgatggaggaggatgagctgcccagctggatcatcaaggatgatgctgaggtggagcggctgacctgtgaggaggaggaggagaagatcttcggccggggcagccggcagaggagagatgtggactacagtgatgccctgacagagaagcagtggctgcgggccattgaagatggcaacctggaggagatggaggaggaggtgcggctgaagaagaggaagagaagaagaaatgtggacaaggaccctgccaaggaggatgtggagaaggccaagaagagaagaggccggcccccagctgagaagctgagccccaacccccccaagctgaccaagcagatgaatgccatcatcgacaccgtcatcaactacaaggacagcagcggccggcagctgtctgaggtgttcatccagctgcccagcaggaaggagctgcctgagtactatgagctgatcaggaagcctgtggacttcaagaagatcaaggagcgcatccggaaccacaagtaccgcagcctgggggacctggagaaggatgtgatgctgctgtgccacaatgcccagaccttcaacctggagggcagccagatctatgaggacagcatcgtgctgcagagcgtcttcaagagcgcccggcagaagatcgccaaggaggaggagagtgaagatgagagcaatgaggaggaggaggaggaggatgaggaggagagcgagagcgaggccaagtctgtgaaggtgaagatcaagctgaacaagaaggatgacaagggccgggacaagggcaagggcaagaagaggcccaacagaggcaaggccaagcctgtggtgtctgactttgacagtgatgaggagcaggatgagcgggagcagagcgagggcagcggcacagatgatgaatag

SEQ ID NO: 172150 - DNA, 360 bp, synthetic construct
  misc_feature 1..360: note = Description of Artificial Sequence: Synthetic coding sequence
  source 1..360: mol_type = other DNA
atgctgctgtgccacaatgcccagaccttcaacctggagggcagccagatctatgaagattccatcgtgctgcagagcgtcttcaagagcgcccggcagaagatcgccaaggaggaggagagtgaagatgagagcaatgaggaggaggaggaggaggatgaggaggagagcgagagcgaggccaagtctgtgaaggtgaagatcaagctgaacaagaaggatgacaagggccgggacaagggcaagggcaagaagaggcccaacagaggcaaggccaagcctgtggtgtctgactttgacagtgatgaggagcaggatgagcgggagcagagcgagggcagcggcacagatgatgaatag

SEQ ID NO: 172151 - DNA, 711 bp, synthetic construct; identical to SEQ ID NO: 172147
  misc_feature 1..711: note = Description of Artificial Sequence: Synthetic coding sequence
  source 1..711: mol_type = other DNA

SEQ ID NO: 172152 - DNA, 711 bp, synthetic construct; identical to SEQ ID NO: 172147
  misc_feature 1..711: note = Description of Artificial Sequence: Synthetic coding sequence
  source 1..711: mol_type = other DNA

SEQ ID NO: 172153 - DNA, 765 bp, synthetic construct
  misc_feature 1..765: note = Description of Artificial Sequence: Synthetic coding sequence
  source 1..765: mol_type = other DNA
atggaggaggaggtgcggctgaagaagaggaagagaagaagaaatgtggacaaggaccctgccaaggaggatgtggagaaggccaagaagagaagaggccggcccccagctgagaagctgagccccaacccccccaagctgaccaagcagatgaatgccatcatcgacaccgtcatcaactacaaggaccgctgcaatgtggagaaggtgcccagcaacagccagctggagattgagggcaacagcagcggccggcagctgtctgaggtgttcatccagctgcccagcaggaaggagctgcctgagtactatgagctgatcaggaagcctgtggacttcaagaagatcaaggagcgcatccggaaccacaagtaccgcagcctgggggacctggagaaggatgtgatgctgctgtgccacaatgcccagaccttcaacctggagggcagccagatctatgaggacagcatcgtgctgcagagcgtcttcaagagcgcccggcagaagatcgccaaggaggaggagagtgaagatgagagcaatgaggaggaggaggaggaggatgaggaggagagcgagagcgaggccaagtctgtgaaggtgaagatcaagctgaacaagaaggatgacaagggccgggacaagggcaagggcaagaagaggcccaacagaggcaaggccaagcctgtggtgtctgactttgacagtgatgaggagcaggatgagcgggagcagagcgagggcagcggcacagatgatgaatag

SEQ ID NO: 172154 - DNA, 4719 bp, synthetic construct; identical to SEQ ID NO: 172149
  misc_feature 1..4719: note = Description of Artificial Sequence: Synthetic coding sequence
  source 1..4719: mol_type = other DNA

SEQ ID NO: 172155 - DNA, 4773 bp, synthetic construct; identical to SEQ ID NO: 172148
  misc_feature 1..4773: note = Description of Artificial Sequence: Synthetic coding sequence
  source 1..4773: mol_type = other DNA

SEQ ID NO: 172156 - DNA, 534 bp, synthetic construct
  misc_feature 1..534: note = Description of Artificial Sequence: Synthetic coding sequence
  source 1..534: mol_type = other DNA
atggaggaggaggtgcggctgaagaagaggaagagaagaagaaatgtggacaaggaccctgccaaggaggatgtggagaaggccaagaagagaagaggccggcccccagctgagaagctgagccccaacccccccaagctgaccaagcagatgaatgccatcatcgacaccgtcatcaactacaaggacagcagcggccggcagctgtctgaggtgttcatccagctgcccagcaggaaggagctgcctgagtactatgagctgatcaggaagcctgtggacttcaagaagatcaaggagcgcatccggaaccacaagtaccgcagcctgggggacctggagaaggatgtgatgctgctgtgccacaatgcccagaccttcaacctggagggcagccagatctatgaggacagcatcgtgctgcagagcgtcttcaagagcgcccggcagaagatcgccaaggaggaggagagtgaagatgagagcaatgaggaggaggaggaggaggatgaggaggagagcgagagcgagtag

SEQ ID NO: 172157 - DNA, 816 bp, synthetic construct
  misc_feature 1..816: note = Description of Artificial Sequence: Synthetic coding sequence
  source 1..816: mol_type = other DNA
atgaagaggctggccgcccgctgctttgctggcctgctgatcctgagccccctgaccgtcatcagtgacagcaggcctgctgacagcggcaaggccattgaagatggcaacctggaggagatggaggaggaggtgcggctgaagaagaggaagagaagaagaaatgtggacaaggaccctgccaaggaggatgtggagaaggccaagaagagaagaggccggcccccagctgagaagctgagccccaacccccccaagctgaccaagcagatgaatgccatcatcgacaccgtcatcaactacaaggacagcagcggccggcagctgtctgaggtgttcatccagctgcccagcaggaaggagctgcctgagtactatgagctgatcaggaagcctgtggacttcaagaagatcaaggagcgcatccggaaccacaagtaccgcagcctgggggacctggagaaggatgtgatgctgctgtgccacaatgcccagaccttcaacctggagggcagccagatctatgaggacagcatcgtgctgcagagcgtcttcaagagcgcccggcagaagatcgccaaggaggaggagagtgaagatgagagcaatgaggaggaggaggaggaggatgaggaggagagcgagagcgaggccaagtctgtgaaggtgaagatcaagctgaacaagaaggatgacaagggccgggacaagggcaagggcaagaagaggcccaacagaggcaaggccaagcctgtggtgtctgactttgacagtgatgaggagcaggatgagcgggtgtctgtggccgactggtag

SEQ ID NO: 172158 - DNA, 462 bp, synthetic construct
  misc_feature 1..462: note = Description of Artificial Sequence: Synthetic coding sequence
  source 1..462: mol_type = other DNA
atgaagaggctggccgcccgctgctttgctggcctgctgatcctgagccccctgaccgtcatcagtgacagcaggcctgctgacagcggcaaggccattgaagatggcaacctggaggagatggaggaggaggtgcggctgaagaagaggaagagaagaagaaatgtggacaaggaccctgccaaggaggatgtggagaaggccaagaagagaagaggccggcccccagctgagaagctgagccccaacccccccaagctgaccaagcagatgaatgccatcatcgacaccgtcatcaactacaaggacagcagcggccggcagctgtctgaggtgttcatccagctgcccagcaggaaggagctgcctgagtactatgagctgatcaggaagcctgtggacttcaagaagatcaaggagcgcatccggaaccacaagtaccgcagcctgggggacctgtag

SEQ ID NO: 172159 - DNA, 468 bp, synthetic construct
  misc_feature 1..468: note = Description of Artificial Sequence: Synthetic coding sequence
  source 1..468: mol_type = other DNA
atgagcacccccacagatcctggggccatgccccaccctggccccagccctggccctggccccagccctggccccatcctgggccccagccctggccctggccccagccctggctctgtgcacagcatgatgggccccagccctggcccccccagcgtgagccaccccatgcccaccatgggcagcacagacttcccccaggagggcatgcaccagatgcacaagcccattgatggcatccatgacaagggcatcgtggaggacatccactgcggctccatgaagggcaccggcatgaggcctccccaccctggcatgggccccccccagagccccatggaccagcacagccagggctacatgagcccccaccccagccccctgggcgcccctgagcacgtgagcagccccatgtctgggggcggccccaccccaccccagatgccacccagccagcccggggcctag

SEQ ID NO: 172160 - DNA, 1680 bp, synthetic construct
  misc_feature 1..1680: note = Description of Artificial Sequence: Synthetic coding sequence
  source 1..1680: mol_type = other DNA
atgagcacccccacagatcctggggccatgccccaccctggccccagccctggccctggccccagccctggccccatcctgggccccagccctggccctggccccagccctggctctgtgcacagcatgatgggccccagccctggcccccccagcgtgagccaccccatgcccaccatgggcagcacagacttcccccaggagggcatgcaccagatgcacaagcccattgatggcatccatgacaagggcatcgtggaggacatccactgcggctccatgaagggcaccggcatgaggcctccccaccctggcatgggccccccccagagccccatggaccagcacagccagggctacatgagcccccaccccagccccctgggcgcccctgagcacgtgagcagccccatgtctgggggcggccccaccccaccccagatgccacccagccagcccggggccctgatccctggggacccccaggccatgagccagcccaacagaggccccagccccttcagccctgtgcagctgcaccagctgcgggcccagatcctggcctacaagatgctggcccggggccagcccctgcctgagaccctgcagctggccgtgcagggcaagaggaccctgcccggcctgcagcagcagcagcagcagcagcagcagcagcagcagcagcagcagcagcagcagcagcagcagcagcagccccagcagcagcccccccagccccagacccagcagcagcagcagcctgccctggtgaactacaaccggcccagcggccctggccctgagctgagcggccccagcaccccccagaagctgcctgtgcctgcccctgggggccggcccagccctgcccctcctgctgctgcccagcccccagctgctgctgtgcccggccccagcgtgccccagcctgcccctggccagcccagccctgtgctgcagctgcagcagaagcagagccgcatcagccccatccagaagccccagggcctggaccctgtggagatcctgcaggagcgggagtaccgcctgcaggcccgcatcgcccaccgcatccaggagctggagaacctgcccggcagcctgcccccagacctgcggaccaaggccaccgtggagctgaaggccctgcggctgctgaacttccagaggcagctgcggcaggaggtggtggcctgcatgagaagagacaccaccctggagacagccctgaacagcaaggcctacaagaggagcaagaggcagaccctgcgggaggccaggatgacagagaagctggagaagcagcagaagattgagcaggagaggaagaggcggcagaagcaccaggagtacctgaacagcatcctgcagcacgccaaggacttcaaggagtaccacaggtctgtggccggcaagatccagaagctgagcaaggctgtggccacctggcacgccaacacagagcgggagcagaagaaggagacagagcgcatcgagaaggagaggatgaggcggctgatggctgaagatgaggagggctacaggaagctgattgaccagaagaaggaccggcggctggcctacctgctgcagcagacagatgaatatgtggccaacctgaccaacctggtgtgggagcacaagcaggcccaggccgccaaggagaagaagaagaggtag

SEQ ID NO: 172161 - DNA, 516 bp, synthetic construct
  misc_feature 1..516: note = Description of Artificial Sequence: Synthetic coding sequence
  source 1..516: mol_type = other DNA
atggaggaggaggtgcggctgaagaagaggaagagaagaagaaatgtggacaaggaccctgccaaggaggatgtggagaaggccaagaagagaagaggccggcccccagctgagaagctgagccccaacccccccaagctgaccaagcagatgaatgccatcatcgacaccgtcatcaactacaaggaccgctgcaatgtggagaaggtgcccagcaacagccagctggagattgagggcaacagcagcggccggcagctgtctgaggtgttcatccagctgcccagcaggaaggagctgcctgagtactatgagctgatcaggaagcctgtggacttcaagaagatcaaggagcgcatccggaaccacaagtaccgcagcctgggggacctggagaaggatgtgatgctgctgtgccacaatgcccagaccttcaacctggagggcagccagatctatgaggacagcatcgtgctgcagagcgtcttcaagagcgcccggcagaagatcgcctag

SEQ ID NO: 172162 - DNA, 201 bp, synthetic construct
  misc_feature 1..201: note = Description of Artificial Sequence: Synthetic coding sequence
  source 1..201: mol_type = other DNA
atgagcacccccacagatcctggggccatgccccaccctggccccagccctggccctggccccagccctggccccatcctgggccccagccctggccctggccccagccctggctctgtgcacagcatgatgggccccagccctggcccccccagcgtgagccaccccatgcccaccatgggcagcacagacttcccctag

SEQ ID NO: 172163 - DNA, 4944 bp, synthetic construct
  misc_feature 1..4944: note = Description of Artificial Sequence: Synthetic coding sequence
  source 1..4944: mol_type = other DNA
atgagcaccccagacccccccctgggcggcaccccccggcccggccccagccctggccctggccccagccctggggccatgctgggccccagccctggccccagccctggcagcgcccacagcatgatgggccccagccctggccccccatctgctggccaccccatccccacccagggccctgggggctacccccaggacaacatgcaccagatgcacaagcccatggagagcatgcatgagaagggcatgtctgatgacccccgctacaaccagatgaagggcatgggcatgaggtctgggggccacgccggcatgggccccccacccagccccatggaccagcacagccagggctaccccagccccctgggcggcagcgagcacgccagcagccctgtgcctgccagcggccccagcagcggcccccagatgagcagcggccctggaggagcccccctggatggagctgacccccaggccctgggccagcagaacagaggccccacccccttcaaccagaaccagctgcaccagctgcgggcccagatcatggcctacaagatgctggcccggggccagcccctgcctgaccacctgcagatggctgtgcagggcaagaggcccatgcctggcatgcagcagcagatgcccaccctgcccccacccagcgtgtctgccaccggccctggccctggccctggccctggccctggccctggccctggccctgccccacccaactacagccggccccacggcatgggcggccccaacatgcctcctcctggccccagcggcgtgcccccaggcatgcctggccagcccccaggcggcccccccaagccctggccagagggccccatggccaatgctgctgcccccaccagcaccccccagaagctgatccccccccagcccaccggccggcccagccctgcccctcctgctgtgcccccagctgccagccctgtgatgccaccccagacccagagccctggccagcctgcccagcctgcccccatggtgcccctgcaccagaagcagagccgcatcacccccatccagaagccccggggcctggaccctgtggagatcctgcaggagcgggagtaccgcctgcaggcccgcatcgcccaccgcatccaggagctggagaacctgcccggcagcctggccggggacctgcggaccaaggccaccatcgagctgaaggccctgcggctgctgaacttccagaggcagctgcggcaggaggtggtggtgtgcatgagaagagacacagccctggagacagccctgaatgccaaggcctacaagaggagcaagaggcagagcctgcgggaggcccgcatcacagagaagctggagaagcagcagaagattgagcaggagaggaagaggcggcagaagcaccaggagtacctgaacagcatcctgcagcacgccaaggacttcaaggagtaccacaggtctgtgacaggcaagatccagaagctgaccaaggctgtggccacctaccacgccaacacagagcgggagcagaagaaggaaaatgaaagaattgagaaggagaggatgaggcggctgatggctgaagatgaggagggctacaggaagctgattgaccagaagaaggacaagaggctggcctacctgctgcagcagacagatgaatatgtggccaacctgacagagctggtgcggcagcacaaggccgcccaggtggccaaggagaagaagaagaagaagaagaagaagaaggccgagaatgctgagggccagaccccagccatcggcccagatggagagcccctggatgagaccagccagatgtctgacctgcctgtgaaggtgattcatgtggagagcggcaagatcctgactggaacagatgcccccaaggccggccagctggaggcctggctggagatgaaccctggctatgaggtggcccccaggagtgacagcgaggagagcggcagcgaggaggaggaggaggaggaggaggaggagcagccccaggccgcccagccccccaccctgcctgtggaggagaagaagaagatcccagaccctgacagtgatgatgtgtctgaggtggatgcccggcacatcattgaaaatgccaagcaggatgtggatgatgaatatggagtgtcccaggccctggcccggggcctgcagagctactatgctgtggcccatgctgtgacagagcgggtggacaagcagagcgccctgatggtgaatggagtgctgaagcagtaccagatcaagggcctggagtggctggtgtccctgtacaacaacaacctgaatggcatcctggctgatgagatgggcctgggcaagaccatccagaccatcgccctgatcacctacctgatggagcacaagaggatcaatggccccttcctgatcatcgtgcccctgagcaccctgagcaactgggcctatgaatttgacaagtgggcccccagcgtggtgaaggtgtcctacaagggcagccctgctgcccggcgggcctttgtgccccagctgcggagcggcaagttcaacgtgctgctgaccacctatgagtacatcatcaaggacaagcacatcctggccaagatccgctggaagtacatgattgtggatgagggccacaggatgaagaaccaccactgcaagctgacccaggtgctgaacacccactacgtggccccccggcggctgctgctgaccggcacccccctgcagaacaagctgcctgagctgtgggccctgctgaacttcctgctgcccaccatcttcaagagctgcagcacctttgagcagtggttcaatgccccctttgccatgaccggggagaaggtggacctgaatgaggaggagaccatcctgatcatccggcggctgcacaaggtgctgcggcccttcctgctgcggcggctgaagaaggaggtggaggcccagctgcctgagaaggtggagtatgtgatcaagtgtgacatgtctgccctgcagagggtgctgtaccgccacatgcaggccaagggcgtgctgctgacagatggcagcgagaaggacaagaagggcaaaggaggcaccaagaccctgatgaacaccatcatgcagctgaggaagatctgcaaccacccctacatgttccagcacatcgaggagagcttcagcgagcacctgggcttcaccggcggcatcgtgcagggcctggacctgtaccgggccagcggcaagtttgagctgctggaccgcatcctgcccaagctgcgggccaccaaccacaaggtgctgctcttctgccagatgaccagcctgatgaccatcatggaggactactttgcctaccggggcttcaagtacctgcggctggatggcaccaccaaggcagaagatcggggcatgctgctgaagaccttcaatgaacctggcagcgagtacttcatcttcctgctgagcacccgggccggcggcctgggcctgaacctgcagagcgctgacaccgtcatcatctttgacagcgactggaacccccaccaggacctgcaggcccaggaccgggcccacagaattggccagcagaatgaggtgcgggtgctgcggctgtgcaccgtgaacagcgtggaggagaagatcctggccgccgccaagtacaagctgaatgtggaccagaaggtgatccaggccggcatgtttgaccagaagagcagcagccatgaaagaagagccttcctgcaggccatcctggagcacgaggagcaggatgagagccgccactgcagcacaggcagcggcagcgccagctttgcccacacagcccctcctcctgctggggtgaacccagacctggaggagccccccctgaaggaggaggatgaggtgcctgatgatgaaacagtgaaccagatgattgcccggcatgaggaggagtttgacctcttcatgaggatggacctggacagaagaagagaggaggccaggaaccccaagaggaagccccggctgatggaggaggatgagctgcccagctggatcatcaaggatgatgctgaggtggagcggctgacctgtgaggaggaggaggagaagatgtttggccggggcagccgccacaggaaggaggtggactacagcgacagcctgacagagaagcagtggctgaaggccatcgaggagggcaccctggaggagattgaggaggaggtgcggcagaagaagagcagcaggaagaggaagagggacagtgatgctggcagcagcacccccaccaccagcaccaggagccgggacaaggatgatgagagcaagaagcagaagaagaggggccggcccccagctgagaagctgagccccaacccccccaacctgaccaagaagatgaagaagatcgtggatgctgtgatcaagtacaaggacagcagcagcggccggcagctgtctgaggtgttcatccagctgcccagcaggaaggagctgcctgagtactatgagctgatcaggaagcctgtggacttcaagaagatcaaggagcgcatccggaaccacaagtaccgcagcctgaatgacctggagaaggatgtgatgctgctgtgccagaatgcccagaccttcaacctggagggcagcctcatctatgaggacagcatcgtgctgcagagcgtcttcacctctgtgcggcagaagattgagaaggaggatgacagcgagggggaggagagcgaggaggaggaggagggggaggaggagggcagcgagagcgagagccgctctgtgaaggtgaagatcaagctgggcaggaaggagaaggcccaggaccggctgaagggcggcagaagaagacccagccggggcagccgggccaagcctgtggtgtctgatgatgattctgaggaggagcaggaggaggacaggagcggcagcggcagcgaggaggactag

SEQ ID NO: 172164 - DNA, 5040 bp, synthetic construct
  misc_feature 1..5040: note = Description of Artificial Sequence: Synthetic coding sequence
  source 1..5040: mol_type = other DNA
atgagcaccccagacccccccctgggcggcaccccccggcccggccccagccctggccctggccccagccctggggccatgctgggccccagccctggccccagccctggcagcgcccacagcatgatgggccccagccctggccccccatctgctggccaccccatccccacccagggccctgggggctacccccaggacaacatgcaccagatgcacaagcccatggagagcatgcatgagaagggcatgtctgatgacccccgctacaaccagatgaagggcatgggcatgaggtctgggggccacgccggcatgggccccccacccagccccatggaccagcacagccagggctaccccagccccctgggcggcagcgagcacgccagcagccctgtgcctgccagcggccccagcagcggcccccagatgagcagcggccctggaggagcccccctggatggagctgacccccaggccctgggccagcagaacagaggccccacccccttcaaccagaaccagctgcaccagctgcgggcccagatcatggcctacaagatgctggcccggggccagcccctgcctgaccacctgcagatggctgtgcagggcaagaggcccatgcctggcatgcagcagcagatgcccaccctgcccccacccagcgtgtctgccaccggccctggccctggccctggccctggccctggccctggccctggccctgccccacccaactacagccggccccacggcatgggcggccccaacatgcctcctcctggccccagcggcgtgcccccaggcatgcctggccagcccccaggcggcccccccaagccctggccagagggccccatggccaatgctgctgcccccaccagcaccccccagaagctgatccccccccagcccaccggccggcccagccctgcccctcctgctgtgcccccagctgccagccctgtgatgccaccccagacccagagccctggccagcctgcccagcctgcccccatggtgcccctgcaccagaagcagagccgcatcacccccatccagaagccccggggcctggaccctgtggagatcctgcaggagcgggagtaccgcctgcaggcccgcatcgcccaccgcatccaggagctggagaacctgcccggcagcctggccggggacctgcggaccaaggccaccatcgagctgaaggccctgcggctgctgaacttccagaggcagctgcggcaggaggtggtggtgtgcatgagaagagacacagccctggagacagccctgaatgccaaggcctacaagaggagcaagaggcagagcctgcgggaggcccgcatcacagagaagctggagaagcagcagaagattgagcaggagaggaagaggcggcagaagcaccaggagtacctgaacagcatcctgcagcacgccaaggacttcaaggagtaccacaggtctgtgacaggcaagatccagaagctgaccaaggctgtggccacctaccacgccaacacagagcgggagcagaagaaggaaaatgaaagaattgagaaggagaggatgaggcggctgatggctgaagatgaggagggctacaggaagctgattgaccagaagaaggacaagaggctggcctacctgctgcagcagacagatgaatatgtggccaacctgacagagctggtgcggcagcacaaggccgcccaggtggccaaggagaagaagaagaagaagaagaagaagaaggccgagaatgctgagggccagaccccagccatcggcccagatggagagcccctggatgagaccagccagatgtctgacctgcctgtgaaggtgattcatgtggagagcggcaagatcctgactggaacagatgcccccaaggccggccagctggaggcctggctggagatgaaccctggctatgaggtggcccccaggagtgacagcgaggagagcggcagcgaggaggaggaggaggaggaggaggaggagcagccccaggccgcccagccccccaccctgcctgtggaggagaagaagaagatcccagaccctgacagtgatgatgtgtctgaggtggatgcccggcacatcattgaaaatgccaagcaggatgtggatgatgaatatggagtgtcccaggccctggcccggggcctgcagagctactatgctgtggcccatgctgtgacagagcgggtggacaagcagagcgccctgatggtgaatggagtgctgaagcagtaccagatcaagggcctggagtggctggtgtccctgtacaacaacaacctgaatggcatcctggctgatgagatgggcctgggcaagaccatccagaccatcgccctgatcacctacctgatggagcacaagaggatcaatggccccttcctgatcatcgtgcccctgagcaccctgagcaactgggcctatgaatttgacaagtgggcccccagcgtggtgaaggtgtcctacaagggcagccctgctgcccggcgggcctttgtgccccagctgcggagcggcaagttcaacgtgctgctgaccacctatgagtacatcatcaaggacaagcacatcctggccaagatccgctggaagtacatgattgtggatgagggccacaggatgaagaaccaccactgcaagctgacccaggtgctgaacacccactacgtggccccccggcggctgctgctgaccggcacccccctgcagaacaagctgcctgagctgtgggccctgctgaacttcctgctgcccaccatcttcaagagctgcagcacctttgagcagtggttcaatgccccctttgccatgaccggggagaaggtggacctgaatgaggaggagaccatcctgatcatccggcggctgcacaaggtgctgcggcccttcctgctgcggcggctgaagaaggaggtggaggcccagctgcctgagaaggtggagtatgtgatcaagtgtgacatgtctgccctgcagagggtgctgtaccgccacatgcaggccaagggcgtgctgctgacagatggcagcgagaaggacaagaagggcaaaggaggcaccaagaccctgatgaacaccatcatgcagctgaggaagatctgcaaccacccctacatgttccagcacatcgaggagagcttcagcgagcacctgggcttcaccggcggcatcgtgcagggcctggacctgtaccgggccagcggcaagtttgagctgctggaccgcatcctgcccaagctgcgggccaccaaccacaaggtgctgctcttctgccagatgaccagcctgatgaccatcatggaggactactttgcctaccggggcttcaagtacctgcggctggatggcaccaccaaggcagaagatcggggcatgctgctgaagaccttcaatgaacctggcagcgagtacttcatcttcctgctgagcacccgggccggcggcctgggcctgaacctgcagagcgctgacaccgtcatcatctttgacagcgactggaacccccaccaggacctgcaggcccaggaccgggcccacagaattggccagcagaatgaggtgcgggtgctgcggctgtgcaccgtgaacagcgtggaggagaagatcctggccgccgccaagtacaagctgaatgtggaccagaaggtgatccaggccggcatgtttgaccagaagagcagcagccatgaaagaagagccttcctgcaggccatcctggagcacgaggagcaggatgagagccgccactgcagcacaggcagcggcagcgccagctttgcccacacagcccctcctcctgctggggtgaacccagacctggaggagccccccctgaaggaggaggatgaggtgcctgatgatgaaacagtgaaccagatgattgcccggcatgaggaggagtttgacctcttcatgaggatggacctggacagaagaagagaggaggccaggaaccccaagaggaagccccggctgatggaggaggatgagctgcccagctggatcatcaaggatgatgctgaggtggagcggctgacctgtgaggaggaggaggagaagatgtttggccggggcagccgccacaggaaggaggtggactacagcgacagcctgacagagaagcagtggctgaagaagatcaccgggaaggacatccatgacacagccagctctgtggcccggggcctgcagttccagaggggcctgcagttctgcacccgggccagcaaggccatcgaggagggcaccctggaggagattgaggaggaggtgcggcagaagaagagcagcaggaagaggaagagggacagtgatgctggcagcagcacccccaccaccagcaccaggagccgggacaaggatgatgagagcaagaagcagaagaagaggggccggcccccagctgagaagctgagccccaacccccccaacctgaccaagaagatgaagaagatcgtggatgctgtgatcaagtacaaggacagcagcagcggccggcagctgtctgaggtgttcatccagctgcccagcaggaaggagctgcctgagtactatgagctgatcaggaagcctgtggacttcaagaagatcaaggagcgcatccggaaccacaagtaccgcagcctgaatgacctggagaaggatgtgatgctgctgtgccagaatgcccagaccttcaacctggagggcagcctcatctatgaggacagcatcgtgctgcagagcgtcttcacctctgtgcggcagaagattgagaaggaggatgacagcgagggggaggagagcgaggaggaggaggagggggaggaggagggcagcgagagcgagagccgctctgtgaaggtgaagatcaagctgggcaggaaggagaaggcccaggaccggctgaagggcggcagaagaagacccagccggggcagccgggccaagcctgtggtgtctgatgatgattctgaggaggagcaggaggaggacaggagcggcagcggcagcgaggaggactag

SEQ ID NO: 172165 - DNA, 4854 bp, synthetic construct
  misc_feature 1..4854: note = Description of Artificial Sequence: Synthetic coding sequence
  source 1..4854: mol_type = other DNA
atgagcaccccagacccccccctgggcggcaccccccggcccggccccagccctggccctggccccagccctggggccatgctgggccccagccctggccccagccctggcagcgcccacagcatgatgggccccagccctggccccccatctgctggccaccccatccccacccagggccctgggggctacccccaggacaacatgcaccagatgcacaagcccatggagagcatgcatgagaagggcatgtctgatgacccccgctacaaccagatgaagggcatgggcatgaggtctgggggccacgccggcatgggccccccacccagccccatggaccagcacagccagggctaccccagccccctgggcggcagcgagcacgccagcagccctgtgcctgccagcggccccagcagcggcccccagatgagcagcggccctggaggagcccccctggatggagctgacccccaggccctgggccagcagaacagaggccccacccccttcaaccagaaccagctgcaccagctgcgggcccagatcatggcctacaagatgctggcccggggccagcccctgcctgaccacctgcagatggctgtgcagggcaagaggcccatgcctggcatgcagcagcagatgcccaccctgcccccacccagcgtgtctgccaccggccctggccctggccctggccctggccctggccctggccctggccctgccccacccaactacagccggccccacggcatgggcggccccaacatgcctcctcctggccccagcggcgtgcccccaggcatgcctggccagcccccaggcggcccccccaagccctggccagagggccccatggccaatgctgctgcccccaccagcaccccccagaagctgatccccccccagcccaccggccggcccagccctgcccctcctgctgtgcccccagctgccagccctgtgatgccaccccagacccagagccctggccagcctgcccagcctgcccccatggtgcccctgcaccagaagcagagccgcatcacccccatccagaagccccggggcctggaccctgtggagatcctgcaggagcgggagtaccgcctgcaggcccgcatcgcccaccgcatccaggagctggagaacctgcccggcagcctggccggggacctgcggaccaaggccaccatcgagctgaaggccctgcggctgctgaacttccagaggcagctgcggcaggaggtggtggtgtgcatgagaagagacacagccctggagacagccctgaatgccaaggcctacaagaggagcaagaggcagagcctgcgggaggcccgcatcacagagaagctggagaagcagcagaagattgagcaggagaggaagaggcggcagaagcaccaggagtacctgaacagcatcctgcagcacgccaaggacttcaaggagtaccacaggtctgtgacaggcaagatccagaagctgaccaaggctgtggccacctaccacgccaacacagagcgggagcagaagaaggaaaatgaaagaattgagaaggagaggatgaggcggctgatggctgaagatgaggagggctacaggaagctgattgaccagaagaaggacaagaggctggcctacctgctgcagcagacagatgaatatgtggccaacctgacagagctggtgcggcagcacaaggccgcccaggtggccaaggagaagaagaagaagaagaagaagaagaaggccgagaatgctgagggccagaccccagccatcggcccagatggagagcccctggatgagaccagccagatgtctgacctgcctgtgaaggtgattcatgtggagagcggcaagatcctgactggaacagatgcccccaaggccggccagctggaggcctggctggagatgaaccctggctatgaggtggcccccaggagtgacagcgaggagagcggcagcgaggaggaggaggaggaggaggaggaggagcagccccaggccgcccagccccccaccctgcctgtggaggagaagaagaagatcccagaccctgacagtgatgatgtgtctgaggtggatgcccggcacatcattgaaaatgccaagcaggatgtggatgatgaatatggagtgtcccaggccctggcccggggcctgcagagctactatgctgtggcccatgctgtgacagagcgggtggacaagcagagcgccctgatggtgaatggagtgctgaagcagtaccagatcaagggcctggagtggctggtgtccctgtacaacaacaacctgaatggcatcctggctgatgagatgggcctgggcaagaccatccagaccatcgccctgatcacctacctgatggagcacaagaggatcaatggccccttcctgatcatcgtgcccctgagcaccctgagcaactgggcctatgaatttgacaagtgggcccccagcgtggtgaaggtgtcctacaagggcagccctgctgcccggcgggcctttgtgccccagctgcggagcggcaagttcaacgtgctgctgaccacctatgagtacatcatcaaggacaagcacatcctggccaagatccgctggaagtacatgattgtggatgagggccacaggatgaagaaccaccactgcaagctgacccaggtgctgaacacccactacgtggccccccggcggctgctgctgaccggcacccccctgcagaacaagctgcctgagctgtgggccctgctgaacttcctgctgcccaccatcttcaagagctgcagcacctttgagcagtggttcaatgccccctttgccatgaccggggagaaggtggacctgaatgaggaggagaccatcctgatcatccggcggctgcacaaggtgctgcggcccttcctgctgcggcggctgaagaaggaggtggaggcccagctgcctgagaaggtggagtatgtgatcaagtgtgacatgtctgccctgcagagggtgctgtaccgccacatgcaggccaagggcgtgctgctgacagatggcagcgagaaggacaagaagggcaaaggaggcaccaagaccctgatgaacaccatcatgcagctgaggaagatctgcaaccacccctacatgttccagcacatcgaggagagcttcagcgagcacctgggcttcaccggcggcatcgtgcagggcctggacctgtaccgggccagcggcaagtttgagctgctggaccgcatcctgcccaagctgcgggccaccaaccacaaggtgctgctcttctgccagatgaccagcctgatgaccatcatggaggactactttgcctaccggggcttcaagtacctgcggctggatggcaccaccaaggcagaagatcggggcatgctgctgaagaccttcaatgaacctggcagcgagtacttcatcttcctgctgagcacccgggccggcggcctgggcctgaacctgcagagcgctgacaccgtcatcatctttgacagcgactggaacccccaccaggacctgcaggcccaggaccgggcccacagaattggccagcagaatgaggtgcgggtgctgcggctgtgcaccgtgaacagcgtggaggagaagatcctggccgccgccaagtacaagctgaatgtggaccagaaggtgatccaggccggcatgtttgaccagaagagcagcagccatgaaagaagagccttcctgcaggccatcctggagcacgaggagcaggatgaggaggaggatgaggtgcctgatgatgagaccgtgaaccagatgattgcccggcatgaggaggagtttgacctcttcatgaggatggacctggacagaagaagagaggaggccaggaaccccaagaggaagccccggctgatggaggaggatgagctgcccagctggatcatcaaggatgatgctgaggtggagcggctgacctgtgaggaggaggaggagaagatgtttggccggggcagccgccacaggaaggaggtggactacagcgacagcctgacagagaagcagtggctgaagaccctgaaggccatcgaggagggcaccctggaggagattgaggaggaggtgcggcagaagaagagcagcaggaagaggaagagggacagtgatgctggcagcagcacccccaccaccagcaccaggagccgggacaaggatgatgagagcaagaagcagaagaagaggggccggcccccagctgagaagctgagccccaacccccccaacctgaccaagaagatgaagaagatcgtggatgctgtgatcaagtacaaggacagcagcagcggccggcagctgtctgaggtgttcatccagctgcccagcaggaaggagctgcctgagtactatgagctgatcaggaagcctgtggacttcaagaagatcaaggagcgcatccggaaccacaagtaccgcagcctgaatgacctggagaaggatgtgatgctgctgtgccagaatgcccagaccttcaacctggagggcagcctcatctatgaggacagcatcgtgctgcagagcgtcttcacctctgtgcggcagaagattgagaaggaggatgacagcgagggggaggagagcgaggaggaggaggagggggaggaggagggcagcgagagcgagagccgctctgtgaaggtgaagatcaagctgggcaggaaggagaaggcccaggaccggctgaagggcggcagaagaagacccagccggggcagccgggccaagcctgtggtgtctgatgatgattctgaggaggagcaggaggaggacaggagcggcagcggcagcgaggaggactag

SEQ ID NO: 172166 - DNA, 5046 bp, synthetic construct
  misc_feature 1..5046: note = Description of Artificial Sequence: Synthetic coding sequence
  source 1..5046: mol_type = other DNA
atgagcaccccagacccccccctgggcggcaccccccggcccggccccagccctggccctggccccagccctggggccatgctgggccccagccctggccccagccctggcagcgcccacagcatgatgggccccagccctggccccccatctgctggccaccccatccccacccagggccctgggggctacccccaggacaacatgcaccagatgcacaagcccatggagagcatgcatgagaagggcatgtctgatgacccccgctacaaccagatgaagggcatgggcatgaggtctgggggccacgccggcatgggccccccacccagccccatggaccagcacagccagggctaccccagccccctgggcggcagcgagcacgccagcagccctgtgcctgccagcggccccagcagcggcccccagatgagcagcggccctggaggagcccccctggatggagctgacccccaggccctgggccagcagaacagaggccccacccccttcaaccagaaccagctgcaccagctgcgggcccagatcatggcctacaagatgctggcccggggccagcccctgcctgaccacctgcagatggctgtgcagggcaagaggcccatgcctggcatgcagcagcagatgcccaccctgcccccacccagcgtgtctgccaccggccctggccctggccctggccctggccctggccctggccctggccctgccccacccaactacagccggccccacggcatgggcggccccaacatgcctcctcctggccccagcggcgtgcccccaggcatgcctggccagcccccaggcggcccccccaagccctggccagagggccccatggccaatgctgctgcccccaccagcaccccccagaagctgatccccccccagcccaccggccggcccagccctgcccctcctgctgtgcccccagctgccagccctgtgatgccaccccagacccagagccctggccagcctgcccagcctgcccccatggtgcccctgcaccagaagcagagccgcatcacccccatccagaagccccggggcctggaccctgtggagatcctgcaggagcgggagtaccgcctgcaggcccgcatcgcccaccgcatccaggagctggagaacctgcccggcagcctggccggggacctgcggaccaaggccaccatcgagctgaaggccctgcggctgctgaacttccagaggcagctgcggcaggaggtggtggtgtgcatgagaagagacacagccctggagacagccctgaatgccaaggcctacaagaggagcaagaggcagagcctgcgggaggcccgcatcacagagaagctggagaagcagcagaagattgagcaggagaggaagaggcggcagaagcaccaggagtacctgaacagcatcctgcagcacgccaaggacttcaaggagtaccacaggtctgtgacaggcaagatccagaagctgaccaaggctgtggccacctaccacgccaacacagagcgggagcagaagaaggaaaatgaaagaattgagaaggagaggatgaggcggctgatgggccagcgggagaagagccggcggggcctgggcagccagagctgggcccgcatctttgctgacctgagtgaccaccagaatgactgtgtgacctctgtgacagagagcctggtgggccagatcctggccgcctgcagcggggaggagggggaggtggagtggaagggccgggacagagtgcggcggctgcgggcagaagatgaggagggctacaggaagctgattgaccagaagaaggacaagaggctggcctacctgctgcagcagacagatgaatatgtggccaacctgacagagctggtgcggcagcacaaggccgcccaggtggccaaggagaagaagaagaagaagaagaagaagaaggccgagaatgctgagggccagaccccagccatcggcccagatggagagcccctggatgagaccagccagatgtctgacctgcctgtgaaggtgattcatgtggagagcggcaagatcctgactggaacagatgcccccaaggccggccagctggaggcctggctggagatgaaccctggctatgaggtggcccccaggagtgacagcgaggagagcggcagcgaggaggaggaggaggaggaggaggaggagcagccccaggccgcccagccccccaccctgcctgtggaggagaagaagaagatcccagaccctgacagtgatgatgtgtctgaggtggatgcccggcacatcattgaaaatgccaagcaggatgtggatgatgaatatggagtgtcccaggccctggcccggggcctgcagagctactatgctgtggcccatgctgtgacagagcgggtggacaagcagagcgccctgatggtgaatggagtgctgaagcagtaccagatcaagggcctggagtggctggtgtccctgtacaacaacaacctgaatggcatcctggctgatgagatgggcctgggcaagaccatccagaccatcgccctgatcacctacctgatggagcacaagaggatcaatggccccttcctgatcatcgtgcccctgagcaccctgagcaactgggcctatgaatttgacaagtgggcccccagcgtggtgaaggtgtcctacaagggcagccctgctgcccggcgggcctttgtgccccagctgcggagcggcaagttcaacgtgctgctgaccacctatgagtacatcatcaaggacaagcacatcctggccaagatccgctggaagtacatgattgtggatgagggccacaggatgaagaaccaccactgcaagctgacccaggtgctgaacacccactacgtggccccccggcggctgctgctgaccggcacccccctgcagaacaagctgcctgagctgtgggccctgctgaacttcctgctgcccaccatcttcaagagctgcagcacctttgagcagtggttcaatgccccctttgccatgaccggggagaaggtggacctgaatgaggaggagaccatcctgatcatccggcggctgcacaaggtgctgcggcccttcctgctgcggcggctgaagaaggaggtggaggcccagctgcctgagaaggtggagtatgtgatcaagtgtgacatgtctgccctgcagagggtgctgtaccgccacatgcaggccaagggcgtgctgctgacagatggcagcgagaaggacaagaagggcaaaggaggcaccaagaccctgatgaacaccatcatgcagctgaggaagatctgcaaccacccctacatgttccagcacatcgaggagagcttcagcgagcacctgggcttcaccggcggcatcgtgcagggcctggacctgtaccgggccagcggcaagtttgagctgctggaccgcatcctgcccaagctgcgggccaccaaccacaaggtgctgctcttctgccagatgaccagcctgatgaccatcatggaggactactttgcctaccggggcttcaagtacctgcggctggatggcaccaccaaggcagaagatcggggcatgctgctgaagaccttcaatgaacctggcagcgagtacttcatcttcctgctgagcacccgggccggcggcctgggcctgaacctgcagagcgctgacaccgtcatcatctttgacagcgactggaacccccaccaggacctgcaggcccaggaccgggcccacagaattggccagcagaatgaggtgcgggtgctgcggctgtgcaccgtgaacagcgtggaggagaagatcctggccgccgccaagtacaagctgaatgtggaccagaaggtgatccaggccggcatgtttgaccagaagagcagcagccatgaaagaagagccttcctgcaggccatcctggagcacgaggagcaggatgaggaggaggatgaggtgcctgatgatgagaccgtgaaccagatgattgcccggcatgaggaggagtttgacctcttcatgaggatggacctggacagaagaagagaggaggccaggaaccccaagaggaagccccggctgatggaggaggatgagctgcccagctggatcatcaaggatgatgctgaggtggagcggctgacctgtgaggaggaggaggagaagatgtttggccggggcagccgccacaggaaggaggtggactacagcgacagcctgacagagaagcagtggctgaagaccctgaaggccatcgaggagggcaccctggaggagattgaggaggaggtgcggcagaagaagagcagcaggaagaggaagagggacagtgatgctggcagcagcacccccaccaccagcaccaggagccgggacaaggatgatgagagcaagaagcagaagaagaggggccggcccccagctgagaagctgagccccaacccccccaacctgaccaagaagatgaagaagatcgtggatgctgtgatcaagtacaaggacagcagcagcggccggcagctgtctgaggtgttcatccagctgcccagcaggaaggagctgcctgagtactatgagctgatcaggaagcctgtggacttcaagaagatcaaggagcgcatccggaaccacaagtaccgcagcctgaatgacctggagaaggatgtgatgctgctgtgccagaatgcccagaccttcaacctggagggcagcctcatctatgaggacagcatcgtgctgcagagcgtcttcacctctgtgcggcagaagattgagaaggaggatgacagcgagggggaggagagcgaggaggaggaggagggggaggaggagggcagcgagagcgagagccgctctgtgaaggtgaagatcaagctgggcaggaaggagaaggcccaggaccggctgaagggcggcagaagaagacccagccggggcagccgggccaagcctgtggtgtctgatgatgattctgaggaggagcaggaggaggacaggagcggcagcggcagcgaggaggactag

SEQ ID NO: 172167 - DNA, 4944 bp, synthetic construct; identical to SEQ ID NO: 172163
  misc_feature 1..4944: note = Description of Artificial Sequence: Synthetic coding sequence
  source 1..4944: mol_type = other DNA

SEQ ID NO: 172168 - DNA, 4842 bp, synthetic construct
  misc_feature 1..4842: note = Description of Artificial Sequence: Synthetic coding sequence
  source 1..4842: mol_type = other DNA
atgagcaccccagacccccccctgggcggcaccccccggcccggccccagccctggccctggccccagccctggggccatgctgggccccagccctggccccagccctggcagcgcccacagcatgatgggccccagccctggccccccatctgctggccaccccatccccacccagggccctgggggctacccccaggacaacatgcaccagatgcacaagcccatggagagcatgcatgagaagggcatgtctgatgacccccgctacaaccagatgaagggcatgggcatgaggtctgggggccacgccggcatgggccccccacccagccccatggaccagcacagccagggctaccccagccccctgggcggcagcgagcacgccagcagccctgtgcctgccagcggccccagcagcggcccccagatgagcagcggccctggaggagcccccctggatggagctgacccccaggccctgggccagcagaacagaggccccacccccttcaaccagaaccagctgcaccagctgcgggcccagatcatggcctacaagatgctggcccggggccagcccctgcctgaccacctgcagatggctgtgcagggcaagaggcccatgcctggcatgcagcagcagatgcccaccctgcccccacccagcgtgtctgccaccggccctggccctggccctggccctggccctggccctggccctggccctgccccacccaactacagccggccccacggcatgggcggccccaacatgcctcctcctggccccagcggcgtgcccccaggcatgcctggccagcccccaggcggcccccccaagccctggccagagggccccatggccaatgctgctgcccccaccagcaccccccagaagctgatccccccccagcccaccggccggcccagccctgcccctcctgctgtgcccccagctgccagccctgtgatgccaccccagacccagagccctggccagcctgcccagcctgcccccatggtgcccctgcaccagaagcagagccgcatcacccccatccagaagccccggggcctggaccctgtggagatcctgcaggagcgggagtaccgcctgcaggcccgcatcgcccaccgcatccaggagctggagaacctgcccggcagcctggccggggacctgcggaccaaggccaccatcgagctgaaggccctgcggctgctgaacttccagaggcagctgcggcaggaggtggtggtgtgcatgagaagagacacagccctggagacagccctgaatgccaaggcctacaagaggagcaagaggcagagcctgcgggaggcccgcatcacagagaagctggagaagcagcagaagattgagcaggagaggaagaggcggcagaagcaccaggagtacctgaacagcatcctgcagcacgccaaggacttcaaggagtaccacaggtctgtgacaggcaagatccagaagctgaccaaggctgtggccacctaccacgccaacacagagcgggagcagaagaaggaaaatgaaagaattgagaaggagaggatgaggcggctgatggctgaagatgaggagggctacaggaagctgattgaccagaagaaggacaagaggctggcctacctgctgcagcagacagatgaatatgtggccaacctgacagagctggtgcggcagcacaaggccgcccaggtggccaaggagaagaagaagaagaagaagaagaagaaggccgagaatgctgagggccagaccccagccatcggcccagatggagagcccctggatgagaccagccagatgtctgacctgcctgtgaaggtgattcatgtggagagcggcaagatcctgactggaacagatgcccccaaggccggccagctggaggcctggctggagatgaaccctggctatgaggtggcccccaggagtgacagcgaggagagcggcagcgaggaggaggaggaggaggaggaggaggagcagccccaggccgcccagccccccaccctgcctgtggaggagaagaagaagatcccagaccctgacagtgatgatgtgtctgaggtggatgcccggcacatcattgaaaatgccaagcaggatgtggatgatgaatatggagtgtcccaggccctggcccggggcctgcagagctactatgctgtggcccatgctgtgacagagcgggtggacaagcagagcgccctgatggtgaatggagtgctgaagcagtaccagatcaagggcctggagtggctggtgtccctgtacaacaacaacctgaatggcatcctggctgatgagatgggcctgggcaagaccatccagaccatcgccctgatcacctacctgatggagcacaagaggatcaatggccccttcctgatcatcgtgcccctgagcaccctgagcaactgggcctatgaatttgacaagtgggcccccagcgtggtgaaggtgtcctacaagggcagccctgctgcccggcgggcctttgtgccccagctgcggagcggcaagttcaacgtgctgctgaccacctatgagtacatcatcaaggacaagcacatcctggccaagatccgctggaagtacatgattgtggatgagggccacaggatgaagaaccaccactgcaagctgacccaggtgctgaacacccactacgtggccccccggcggctgctgctgaccggcacccccctgcagaacaagctgcctgagctgtgggccctgctgaacttcctgctgcccaccatcttcaagagctgcagcacctttgagcagtggttcaatgccccctttgccatgaccggggagaaggtggacctgaatgaggaggagaccatcctgatcatccggcggctgcacaaggtgctgcggcccttcctgctgcggcggctgaagaaggaggtggaggcccagctgcctgagaaggtggagtatgtgatcaagtgtgacatgtctgccctgcagagggtgctgtaccgccacatgcaggccaagggcgtgctgctgacagatggcagcgagaaggacaagaagggcaaaggaggcaccaagaccctgatgaacaccatcatgcagctgaggaagatctgcaaccacccctacatgttccagcacatcgaggagagcttcagcgagcacctgggcttcaccggcggcatcgtgcagggcctggacctgtaccgggccagcggcaagtttgagctgctggaccgcatcctgcccaagctgcgggccaccaaccacaaggtgctgctcttctgccagatgaccagcctgatgaccatcatggaggactactttgcctaccggggcttcaagtacctgcggctggatggcaccaccaaggcagaagatcggggcatgctgctgaagaccttcaatgaacctggcagcgagtacttcatcttcctgctgagcacccgggccggcggcctgggcctgaacctgcagagcgctgacaccgtcatcatctttgacagcgactggaacccccaccaggacctgcaggcccaggaccgggcccacagaattggccagcagaatgaggtgcgggtgctgcggctgtgcaccgtgaacagcgtggaggagaagatcctggccgccgccaagtacaagctgaatgtggaccagaaggtgatccaggccggcatgtttgaccagaagagcagcagccatgaaagaagagccttcctgcaggccatcctggagcacgaggagcaggatgaggaggaggatgaggtgcctgatgatgagaccgtgaaccagatgattgcccggcatgaggaggagtttgacctcttcatgaggatggacctggacagaagaagagaggaggccaggaaccccaagaggaagccccggctgatggaggaggatgagctgcccagctggatcatcaaggatgatgctgaggtggagcggctgacctgtgaggaggaggaggagaagatgtttggccggggcagccgccacaggaaggaggtggactacagcgacagcctgacagagaagcagtggctgaaggccatcgaggagggcaccctggaggagattgaggaggaggtgcggcagaagaagagcagcaggaagaggaagagggacagtgatgctggcagcagcacccccaccaccagcaccaggagccgggacaaggatgatgagagcaagaagcagaagaagaggggccggcccccagctgagaagctgagccccaacccccccaacctgaccaagaagatgaagaagatcgtggatgctgtgatcaagtacaaggacagcagcggccggcagctgtctgaggtgttcatccagctgcccagcaggaaggagctgcctgagtactatgagctgatcaggaagcctgtggacttcaagaagatcaaggagcgcatccggaaccacaagtaccgcagcctgaatgacctggagaaggatgtgatgctgctgtgccagaatgcccagaccttcaacctggagggcagcctcatctatgaggacagcatcgtgctgcagagcgtcttcacctctgtgcggcagaagattgagaaggaggatgacagcgagggggaggagagcgaggaggaggaggagggggaggaggagggcagcgagagcgagagccgctctgtgaaggtgaagatcaagctgggcaggaaggagaaggcccaggaccggctgaagggcggcagaagaagacccagccggggcagccgggccaagcctgtggtgtctgatgatgattctgaggaggagcaggaggaggacaggagcggcagcggcagcgaggaggactag

SEQ ID NO: 172169 - DNA, 4851 bp, synthetic construct
  misc_feature 1..4851: note = Description of Artificial Sequence: Synthetic coding sequence
  source 1..4851: mol_type = other DNA
atgagcaccccagacccccccctgggcggcaccccccggcccggccccagccctggccctggccccagccctggggccatgctgggccccagccctggccccagccctggcagcgcccacagcatgatgggccccagccctggccccccatctgctggccaccccatccccacccagggccctgggggctacccccaggacaacatgcaccagatgcacaagcccatggagagcatgcatgagaagggcatgtctgatgacccccgctacaaccagatgaagggcatgggcatgaggtctgggggccacgccggcatgggccccccacccagccccatggaccagcacagccagggctaccccagccccctgggcggcagcgagcacgccagcagccctgtgcctgccagcggccccagcagcggcccccagatgagcagcggccctggaggagcccccctggatggagctgacccccaggccctgggccagcagaacagaggccccacccccttcaaccagaaccagctgcaccagctgcgggcccagatcatggcctacaagatgctggcccggggccagcccctgcctgaccacctgcagatggctgtgcagggcaagaggcccatgcctggcatgcagcagcagatgcccaccctgcccccacccagcgtgtctgccaccggccctggccctggccctggccctggccctggccctggccctggccctgccccacccaactacagccggccccacggcatgggcggccccaacatgcctcctcctggccccagcggcgtgcccccaggcatgcctggccagcccccaggcggcccccccaagccctggccagagggccccatggccaatgctgctgcccccaccagcaccccccagaagctgatccccccccagcccaccggccggcccagccctgcccctcctgctgtgcccccagctgccagccctgtgatgccaccccagacccagagccctggccagcctgcccagcctgcccccatggtgcccctgcaccagaagcagagccgcatcacccccatccagaagccccggggcctggaccctgtggagatcctgcaggagcgggagtaccgcctgcaggcccgcatcgcccaccgcatccaggagctggagaacctgcccggcagcctggccggggacctgcggaccaaggccaccatcgagctgaaggccctgcggctgctgaacttccagaggcagctgcggcaggaggtggtggtgtgcatgagaagagacacagccctggagacagccctgaatgccaaggcctacaagaggagcaagaggcagagcctgcgggaggcccgcatcacagagaagctggagaagcagcagaagattgagcaggagaggaagaggcggcagaagcaccaggagtacctgaacagcatcctgcagcacgccaaggacttcaaggagtaccacaggtctgtgacaggcaagatccagaagctgaccaaggctgtggccacctaccacgccaacacagagcgggagcagaagaaggaaaatgaaagaattgagaaggagaggatgaggcggctgatggctgaagatgaggagggctacaggaagctgattgaccagaagaaggacaagaggctggcctacctgctgcagcagacagatgaatatgtggccaacctgacagagctggtgcggcagcacaaggccgcccaggtggccaaggagaagaagaagaagaagaagaagaagaaggccgagaatgctgagggccagaccccagccatcggcccagatggagagcccctggatgagaccagccagatgtctgacctgcctgtgaaggtgattcatgtggagagcggcaagatcctgactggaacagatgcccccaaggccggccagctggaggcctggctggagatgaaccctggctatgaggtggcccccaggagtgacagcgaggagagcggcagcgaggaggaggaggaggaggaggaggaggagcagccccaggccgcccagccccccaccctgcctgtggaggagaagaagaagatcccagaccctgacagtgatgatgtgtctgaggtggatgcccggcacatcattgaaaatgccaagcaggatgtggatgatgaatatggagtgtcccaggccctggcccggggcctgcagagctactatgctgtggcccatgctgtgacagagcgggtggacaagcagagcgccctgatggtgaatggagtgctgaagcagtaccagatcaagggcctggagtggctggtgtccctgtacaacaacaacctgaatggcatcctggctgatgagatgggcctgggcaagaccatccagaccatcgccctgatcacctacctgatggagcacaagaggatcaatggccccttcctgatcatcgtgcccctgagcaccctgagcaactgggcctatgaatttgacaagtgggcccccagcgtggtgaaggtgtcctacaagggcagccctgctgcccggcgggcctttgtgccccagctgcggagcggcaagttcaacgtgctgctgaccacctatgagtacatcatcaaggacaagcacatcctggccaagatccgctggaagtacatgattgtggatgagggccacaggatgaagaaccaccactgcaagctgacccaggtgctgaacacccactacgtggccccccggcggctgctgctgaccggcacccccctgcagaacaagctgcctgagctgtgggccctgctgaacttcctgctgcccaccatcttcaagagctgcagcacctttgagcagtggttcaatgccccctttgccatgaccggggagaaggtggacctgaatgaggaggagaccatcctgatcatccggcggctgcacaaggtgctgcggcccttcctgctgcggcggctgaagaaggaggtggaggcccagctgcctgagaaggtggagtatgtgatcaagtgtgacatgtctgccctgcagagggtgctgtaccgccacatgcaggccaagggcgtgctgctgacagatggcagcgagaaggacaagaagggcaaaggaggcaccaagaccctgatgaacaccatcatgcagctgaggaagatctgcaaccacccctacatgttccagcacatcgaggagagcttcagcgagcacctgggcttcaccggcggcatcgtgcagggcctggacctgtaccgggccagcggcaagtttgagctgctggaccgcatcctgcccaagctgcgggccaccaaccacaaggtgctgctcttctgccagatgaccagcctgatgaccatcatggaggactactttgcctaccggggcttcaagtacctgcggctggatggcaccaccaaggcagaagatcggggcatgctgctgaagaccttcaatgaacctggcagcgagtacttcatcttcctgctgagcacccgggccggcggcctgggcctgaacctgcagagcgctgacaccgtcatcatctttgacagcgactggaacccccaccaggacctgcaggcccaggaccgggcccacagaattggccagcagaatgaggtgcgggtgctgcggctgtgcaccgtgaacagcgtggaggagaagatcctggccgccgccaagtacaagctgaatgtggaccagaaggtgatccaggccggcatgtttgaccagaagagcagcagccatgaaagaagagccttcctgcaggccatcctggagcacgaggagcaggatgaggaggaggatgaggtgcctgatgatgagaccgtgaaccagatgattgcccggcatgaggaggagtttgacctcttcatgaggatggacctggacagaagaagagaggaggccaggaaccccaagaggaagccccggctgatggaggaggatgagctgcccagctggatcatcaaggatgatgctgaggtggagcggctgacctgtgaggaggaggaggagaagatgtttggccggggcagccgccacaggaaggaggtggactacagcgacagcctgacagagaagcagtggctgaagaccctgaaggccatcgaggagggcaccctggaggagattgaggaggaggtgcggcagaagaagagcagcaggaagaggaagagggacagtgatgctggcagcagcacccccaccaccagcaccaggagccgggacaaggatgatgagagcaagaagcagaagaagaggggccggcccccagctgagaagctgagccccaacccccccaacctgaccaagaagatgaagaagatcgtggatgctgtgatcaagtacaaggacagcagcggccggcagctgtctgaggtgttcatccagctgcccagcaggaaggagctgcctgagtactatgagctgatcaggaagcctgtggacttcaagaagatcaaggagcgcatccggaaccacaagtaccgcagcctgaatgacctggagaaggatgtgatgctgctgtgccagaatgcccagaccttcaacctggagggcagcctcatctatgaagattccatcgtgctgcagagcgtcttcacctctgtgcggcagaagattgagaaggaggatgattctgagggggaggagagcgaggaggaggaggagggggaggaggagggcagcgagagcgagagccgctctgtgaaggtgaagatcaagctgggcaggaaggagaaggcccaggaccggctgaagggcggcagaagaagacccagccggggcagccgggccaagcctgtggtgtctgatgatgacagcgaggaggagcaggaggaggacagaagtggcagcggctctgaagaagattag

SEQ ID NO: 172170 - DNA, 4845 bp, synthetic construct
  misc_feature 1..4845: note = Description of Artificial Sequence: Synthetic coding sequence
  source 1..4845: mol_type = other DNA
atgagcaccccagacccccccctgggcggcaccccccggcccggccccagccctggccctggccccagccctggggccatgctgggccccagccctggccccagccctggcagcgcccacagcatgatgggccccagccctggccccccatctgctggccaccccatccccacccagggccctgggggctacccccaggacaacatgcaccagatgcacaagcccatggagagcatgcatgagaagggcatgtctgatgacccccgctacaaccagatgaagggcatgggcatgaggtctgggggccacgccggcatgggccccccacccagccccatggaccagcacagccagggctaccccagccccctgggcggcagcgagcacgccagcagccctgtgcctgccagcggccccagcagcggcccccagatgagcagcggccctggaggagcccccctggatggagctgacccccaggccctgggccagcagaacagaggccccacccccttcaaccagaaccagctgcaccagctgcgggcccagatcatggcctacaagatgctggcccggggccagcccctgcctgaccacctgcagatggctgtgcagggcaagaggcccatgcctggcatgcagcagcagatgcccaccctgcccccacccagcgtgtctgccaccggccctggccctggccctggccctggccctggccctggccctggccctgccccacccaactacagccggccccacggcatgggcggccccaacatgcctcctcctggccccagcggcgtgcccccaggcatgcctggccagcccccaggcggcccccccaagccctggccagagggccccatggccaatgctgctgcccccaccagcaccccccagaagctgatccccccccagcccaccggccggcccagccctgcccctcctgctgtgcccccagctgccagccctgtgatgccaccccagacccagagccctggccagcctgcccagcctgcccccatggtgcccctgcaccagaagcagagccgcatcacccccatccagaagccccggggcctggaccctgtggagatcctgcaggagcgggagtaccgcctgcaggcccgcatcgcccaccgcatccaggagctggagaacctgcccggcagcctggccggggacctgcggaccaaggccaccatcgagctgaaggccctgcggctgctgaacttccagaggcagctgcggcaggaggtggtggtgtgcatgagaagagacacagccctggagacagccctgaatgccaaggcctacaagaggagcaagaggcagagcctgcgggaggcccgcatcacagagaagctggagaagcagcagaagattgagcaggagaggaagaggcggcagaagcaccaggagtacctgaacagcatcctgcagcacgccaaggacttcaaggagtaccacaggtctgtgacaggcaagatccagaagctgaccaaggctgtggccacctaccacgccaacacagagcgggagcagaagaaggaaaatgaaagaattgagaaggagaggatgaggcggctgatggctgaagatgaggagggctacaggaagctgattgaccagaagaaggacaagaggctggcctacctgctgcagcagacagatgaatatgtggccaacctgacagagctggtgcggcagcacaaggccgcccaggtggccaaggagaagaagaagaagaagaagaagaagaaggccgagaatgctgagggccagaccccagccatcggcccagatggagagcccctggatgagaccagccagatgtctgacctgcctgtgaaggtgattcatgtggagagcggcaagatcctgactggaacagatgcccccaaggccggccagctggaggcctggctggagatgaaccctggctatgaggtggcccccaggagtgacagcgaggagagcggcagcgaggaggaggaggaggaggaggaggaggagcagccccaggccgcccagccccccaccctgcctgtggaggagaagaagaagatcccagaccctgacagtgatgatgtgtctgaggtggatgcccggcacatcattgaaaatgccaagcaggatgtggatgatgaatatggagtgtcccaggccctggcccggggcctgcagagctactatgctgtggcccatgctgtgacagagcgggtggacaagcagagcgccctgatggtgaatggagtgctgaagcagtaccagatcaagggcctggagtggctggtgtccctgtacaacaacaacctgaatggcatcctggctgatgagatgggcctgggcaagaccatccagaccatcgccctgatcacctacctgatggagcacaagaggatcaatggccccttcctgatcatcgtgcccctgagcaccctgagcaactgggcctatgaatttgacaagtgggcccccagcgtggtgaaggtgtcctacaagggcagccctgctgcccggcgggcctttgtgccccagctgcggagcggcaagttcaacgtgctgctgaccacctatgagtacatcatcaaggacaagcacatcctggccaagatccgctggaagtacatgattgtggatgagggccacaggatgaagaaccaccactgcaagctgacccaggtgctgaacacccactacgtggccccccggcggctgctgctgaccggcacccccctgcagaacaagctgcctgagctgtgggccctgctgaacttcctgctgcccaccatcttcaagagctgcagcacctttgagcagtggttcaatgccccctttgccatgaccggggagaaggtggacctgaatgaggaggagaccatcctgatcatccggcggctgcacaaggtgctgcggcccttcctgctgcggcggctgaagaaggaggtggaggcccagctgcctgagaaggtggagtatgtgatcaagtgtgacatgtctgccctgcagagggtgctgtaccgccacatgcaggccaagggcgtgctgctgacagatggcagcgagaaggacaagaagggcaaaggaggcaccaagaccctgatgaacaccatcatgcagctgaggaagatctgcaaccacccctacatgttccagcacatcgaggagagcttcagcgagcacctgggcttcaccggcggcatcgtgcagggcctggacctgtaccgggccagcggcaagtttgagctgctggaccgcatcctgcccaagctgcgggccaccaaccacaaggtgctgctcttctgccagatgaccagcctgatgaccatcatggaggactactttgcctaccggggcttcaagtacctgcggctggatggcaccaccaaggcagaagatcggggcatgctgctgaagaccttcaatgaacctggcagcgagtacttcatcttcctgctgagcacccgggccggcggcctgggcctgaacctgcagagcgctgacaccgtcatcatctttgacagcgactggaacccccaccaggacctgcaggcccaggaccgggcccacagaattggccagcagaatgaggtgcgggtgctgcggctgtgcaccgtgaacagcgtggaggagaagatcctggccgccgccaagtacaagctgaatgtggaccagaaggtgatccaggccggcatgtttgaccagaagagcagcagccatgaaagaagagccttcctgcaggccatcctggagcacgaggagcaggatgaggaggaggatgaggtgcctgatgatgagaccgtgaaccagatgattgcccggcatgaggaggagtttgacctcttcatgaggatggacctggacagaagaagagaggaggccaggaaccccaagaggaagccccggctgatggaggaggatgagctgcccagctggatcatcaaggatgatgctgaggtggagcggctgacctgtgaggaggaggaggagaagatgtttggccggggcagccgccacaggaaggaggtggactacagcgacagcctgacagagaagcagtggctgaaggccatcgaggagggcaccctggaggagattgaggaggaggtgcggcagaagaagagcagcaggaagaggaagagggacagtgatgctggcagcagcacccccaccaccagcaccaggagccgggacaaggatgatgagagcaagaagcagaagaagaggggccggcccccagctgagaagctgagccccaacccccccaacctgaccaagaagatgaagaagatcgtggatgctgtgatcaagtacaaggacagcagcagcggccggcagctgtctgaggtgttcatccagctgcccagcaggaaggagctgcctgagtactatgagctgatcaggaagcctgtggacttcaagaagatcaaggagcgcatccggaaccacaagtaccgcagcctgaatgacctggagaaggatgtgatgctgctgtgccagaatgcccagaccttcaacctggagggcagcctcatctatgaagattccatcgtgctgcagagcgtcttcacctctgtgcggcagaagattgagaaggaggatgattctgagggggaggagagcgaggaggaggaggagggggaggaggagggcagcgagagcgagagccgctctgtgaaggtgaagatcaagctgggcaggaaggagaaggcccaggaccggctgaagggcggcagaagaagacccagccggggcagccgggccaagcctgtggtgtctgatgatgacagcgaggaggagcaggaggaggacagaagtggcagcggctctgaagaagattag

SEQ ID NO: 172171 - DNA, 3159 bp, synthetic construct
  misc_feature 1..3159: note = Description of Artificial Sequence: Synthetic coding sequence
  source 1..3159: mol_type = other DNA
atgagcagcgctgctgagcccccacctcctcctcctcctgagagcgcccccagcaagccagctgccagcatcgccagcggcggcagcaacagcagcaacaagggcggccctgagggcgtggccgcccaggccgtggccagcgctgccagcgctggccctgcagatgctgagatggaggagatctttgatgatgccagccctgggaagcagaaggagatccaggagccagaccccacctatgaggagaagatgcagacagaccgggccaacagatttgagtacctgctgaagcagacagagctgtttgcccacttcatccagcctgctgcccagaagacccccaccagccccctgaagatgaagccaggccggccccgcatcaagaaggatgagaagcagaacctgctgtctgtgggggactaccgccacagaagaacagagcaggaggaggatgaggagctgctgacagagagcagcaaggccaccaacgtgtgcaccaggtttgaggacagccccagctatgtgaagtggggcaagctgcgggactaccaggtgcggggcctgaactggctgatcagcctgtatgaaaatggcatcaatggcatcctggctgatgagatgggcctgggcaagaccctgcagaccatcagcctgctgggctacatgaagcactacagaaacatccctggcccccacatggtgctggtgcccaagagcaccctgcacaactggatgtctgagttcaagcgctgggtgcccaccctgcggtctgtgtgcctgattggagacaaggagcagagagctgcctttgtgagagatgtgctgctgcctggagagtgggatgtgtgtgtgaccagctatgagatgctgatcaaggagaagtctgtgttcaagaagttcaactggagatacctggtgattgatgaggcccaccgcatcaagaatgagaagagcaagctgtctgaaattgtgcgggagttcaagaccaccaaccggctgctgctgaccggcacccccctgcagaacaacctgcacgagctgtggagcctgctgaacttcctgctgcctgatgtgttcaacagcgcagatgactttgacagctggtttgacaccaacaactgcctgggggaccagaagctggtggagcggctgcacatggtgctgcggcccttcctgctgcggcgcatcaaggcagatgtggagaagagcctgccccccaagaaggaggtgaagatctacgtgggcctgagcaagatgcagcgggagtggtacacccgcatcctgatgaaggacatcgacatcctgaacagcgctgggaagatggacaagatgaggctgctgaacatcctgatgcagctgaggaagtgctgcaaccacccctacctgtttgatggagctgagcccggccccccctacaccacagacatgcacctggtgaccaacagcggcaagatggtggtgctggacaagctgctgcccaagctgaaggagcagggcagccgggtgctgatcttcagccagatgaccagggtgctggacatcctggaggactactgcatgtggaggaactatgagtactgccgcctggatggccagacccctcatgatgagcggcaggacagcatcaatgcctacaatgagcccaacagcaccaagtttgtgttcatgctgagcaccagggctgggggcctgggcatcaacctggccacagcagatgtggtgatcctgtatgacagcgactggaacccccaggtggacctgcaggccatggaccgggcccaccgcatcggccagaccaagacagtgcgggtcttccgcttcatcacagacaacacagtggaggagagaattgtggagagagctgagatgaagctgcggctggacagcatcgtcatccagcagggccgcctggtggaccagaacctgaacaagattggcaaggatgagatgctgcagatgatccgccacggggccacccacgtgtttgccagcaaggagagcgagatcacagatgaggacattgatggcatcctggagcggggggccaagaagacagctgagatgaatgagaagctgagcaagatgggagagagcagcctgaggaacttcaccatggacacagagagctctgtgtacaactttgaaggagaggactaccgggagaagcagaagatcgccttcacagagtggattgagccccccaagcgggagaggaaggccaactatgctgtggatgcctacttccgggaggccctgcgggtgtctgagcccaaggcccccaaggcccccaggcctcccaagcagcccaacgtgcaggacttccagttcttccccccccggctgtttgagctgctggagaaggagatcctcttctacaggaagaccatcggctacaaggtgcccaggaaccctgagctgcccaatgctgcccaggcccagaaggaggagcagctgaagattgatgaagctgagagcctgaatgatgaggagctggaggagaaggagaagctgctgacccagggcttcaccaactggaacaagagggacttcaaccagttcatcaaggccaatgagaagtggggcagagatgacatcgagaacatcgcccgggaggtggagggcaagaccccagaggaggtgattgagtacagcgctgtgttctgggagcgctgcaatgagctgcaggacatcgagaagatcatggcccagatcgagcggggggaggcccgcatccagaggcgcatcagcatcaagaaggccctggacaccaagattggccgctacaaggcccccttccaccagctgcgcatctcctatggcaccaacaagggcaagaactacacagaggaggaggaccgcttcctgatctgcatgctgcacaagctgggctttgacaaggaaaatgtgtatgatgagctgcggcagtgcatccggaacagcccccagttccgctttgactggttcctgaagagcaggacagccatggagctgcagaggcgctgcaacaccctcatcaccctcatcgagcgggagaacatggagctggaggagaaggagaaggccgagaagaagaagaggggccccaagcccagcacccagaagaggaagatggatggagccccagatggccggggcaggaagaagaagctgaagctgtag

SEQ ID NO: 172172 - DNA, 2988 bp, synthetic construct
  misc_feature 1..2988: note = Description of Artificial Sequence: Synthetic coding sequence
  source 1..2988: mol_type = other DNA
atggaggagatctttgatgatgccagccctgggaagcagaaggagatccaggagccagaccccacctatgaggagaagatgcagacagaccgggccaacagatttgagtacctgctgaagcagacagagctgtttgcccacttcatccagcctgctgcccagaagacccccaccagccccctgaagatgaagccaggccggccccgcatcaagaaggatgagaagcagaacctgctgtctgtgggggactaccgccacagaagaacagagcaggaggaggatgaggagctgctgacagagagcagcaaggccaccaacgtgtgcaccaggtttgaggacagccccagctatgtgaagtggggcaagctgcgggactaccaggtgcggggcctgaactggctgatcagcctgtatgaaaatggcatcaatggcatcctggctgatgagatgggcctgggcaagaccctgcagaccatcagcctgctgggctacatgaagcactacagaaacatccctggcccccacatggtgctggtgcccaagagcaccctgcacaactggatgtctgagttcaagcgctgggtgcccaccctgcggtctgtgtgcctgattggagacaaggagcagagagctgcctttgtgagagatgtgctgctgcccggggagtgggatgtgtgtgtgaccagctatgagatgctgatcaaggagaagagcgtcttcaagaagttcaactggagatacctggtgattgatgaggcccaccgcatcaagaatgagaagagcaagctgtctgagatcgtgcgggagttcaagaccaccaaccggctgctgctgaccggcacccccctgcagaacaacctgcacgagctgtggagcctgctgaacttcctgctgcctgatgtgttcaacagcgcagatgactttgacagctggtttgacaccaacaactgcctgggggaccagaagctggtggagcggctgcacatggtgctgcggcccttcctgctgcggcgcatcaaggcagatgtggagaagagcctgccccccaagaaggaggtgaagatctacgtgggcctgagcaagatgcagcgggagtggtacacccgcatcctgatgaaggacatcgacatcctgaacagcgctgggaagatggacaagatgaggctgctgaacatcctgatgcagctgaggaagtgctgcaaccacccctacctgtttgatggagctgagcccggccccccctacaccacagacatgcacctggtgaccaacagcggcaagatggtggtgctggacaagctgctgcccaagctgaaggagcagggcagccgggtgctgatcttcagccagatgaccagggtgctggacatcctggaggactactgcatgtggagaaattatgagtactgccgcctggatggccagacccctcatgatgagcggcaggacagcatcaatgcctacaatgagcccaacagcaccaagtttgtgttcatgctgagcacccgggccggcggcctgggcatcaacctggccacagcagatgtggtgatcctgtatgacagcgactggaacccccaggtggacctgcaggccatggaccgggcccacagaattggccagaccaagacagtgcgggtcttccgcttcatcacagacaacacagtggaggagcgcatcgtggagcgggcagagatgaagctgcggctggacagcatcgtcatccagcagggccgcctggtggaccagaacctgaacaagattggcaaggatgagatgctgcagatgatcagacatggagccacccacgtgtttgccagcaaggagagcgagatcacagatgaagatattgatggcatcctggagcggggggccaagaagacagctgagatgaatgagaagctgagcaagatgggagagagcagcctgaggaacttcaccatggacacagagagctctgtgtacaactttgaaggagaggactaccgggagaagcagaagatcgccttcacagagtggattgagccccccaagcgggagaggaaggccaactatgctgtggatgcctacttccgggaggccctgcgggtgtctgagcccaaggcccccaaggccccccggccccccaagcagcccaacgtgcaggacttccagttcttccccccccggctgtttgagctgctggagaaggagatcctcttctacaggaagaccatcggctacaaggtgcccagaaatcctgagctgcccaatgctgcccaggcccagaaggaggagcagctgaagattgatgaggccgagagcctgaatgatgaggagctggaggagaaggagaagctgctgacccagggcttcaccaactggaacaagagggacttcaaccagttcatcaaggccaatgagaagtggggcagagatgacattgaaaatattgcccgggaggtggagggcaagaccccagaggaggtgattgagtacagcgctgtgttctgggagcgctgcaatgagctgcaggacatcgagaagatcatggcccagatcgagcggggggaggcccgcatccagaggcgcatcagcatcaagaaggccctggacaccaagattggccgctacaaggcccccttccaccagctgcgcatctcctatggcaccaacaagggcaagaactacacagaggaggaggaccgcttcctgatctgcatgctgcacaagctgggctttgacaaggaaaatgtgtatgatgagctgcggcagtgcatccggaacagcccccagttccgctttgactggttcctgaagagcaggacagccatggagctgcagaggcgctgcaacaccctcatcaccctgattgagcgggagaacatggagctggaggagaaggagaaggccgagaagaagaagaggggccccaagcccagcacccagaagaggaagatggatggagccccagatggccggggcaggaagaagaagctgaagctgtag

SEQ ID NO: 172173 - DNA, 2988 bp, synthetic construct; identical to SEQ ID NO: 172172
  misc_feature 1..2988: note = Description of Artificial Sequence: Synthetic coding sequence
  source 1..2988: mol_type = other DNA

SEQ ID NO: 172174 - DNA, 2865 bp, synthetic construct
  misc_feature 1..2865: note = Description of Artificial Sequence: Synthetic coding sequence
  source 1..2865: mol_type = other DNA
atgagcctgcccctgacagaggagcagaggaagaagattgaagaaaatcggcagaaggccctggccaggagagctgagaagctgctggccgagcagcaccagaggaccagcagcggcaccagcattgctggcaaccccttccaggccaagcagggccccagccagaacttcccccgggagagctgcaagcctgtgtcccatggagtcatcttcaagcagcagaacctgagcagcagcagcaatgctgaccagaggcctcatgacagccacagcttccaggccaagggcatctggaagaagccagaggagatgcccacagcctgccccggccacagccccaggagccagatggccctgaccggcatcagcccccccctggcccagagccccccagaggtgcccaagcagcagctgctgtcctatgagctgggccagggccacgcccaggccagccctgagatccgcttcaccccatttgccaaccccacccacaagcccctggccaagcccaagagcagccaggagaccccagcccacagcagcggccagcccccaagagatgccaagctggaggccaagacagccaaggccagccccagcggccagaacatctcctacatccacagcagcagcgagagcgtgacccccaggacagagggccgcctgcagcagaagagcggcagctctgtgcagaagggcgtgaacagccagaagggcaaatgtgtgagaaatggagaccgcttccaggtgctgattggctacaatgctgagctgattgctgtgttcaagaccctgcccagcaagaactatgaccctgacaccaagacctggaacttctccatgaatgactacagcgccctgatgaaggccgcccagagcctgcccaccgtgaacctgcagcccctggagtgggcctacggcagcagcgagagccccagcaccagcagcgagggccaggccggcctgcccagcgcccccagcctgagctttgtgaagggccgctgcatgctgatcagccgggcctactttgaagctgacatctcctacagccaggacctgattgccctcttcaagcagatggacagcagaagatatgatgtgaagaccaggaagtggagcttcctgctggaggagcacagcaagctgattgccaaggtgcgctgcctgccccaggtgcagctggaccccctgcccaccaccctgaccctggcctttgccagccagctgaagaagaccagcctgagcctgaccccagatgtgcctgaggccgacctgtctgaggtggaccccaagctggtgagcaacctgatgcccttccagagagctggggtgaactttgccatcgccaagggcggccgcctgctgctggctgatgacatgggcctgggcaagaccatccaggccatctgcatcgccgccttctacaggaaggagtggcccctgctggtggtggtgcccagctctgtgcgcttcacctgggagcaggccttcctgcgctggctgcccagcctgagcccagactgcatcaacgtggtggtgacaggcaaggaccggctgacagctggcctcatcaacatcgtgtcctttgacctgctgagcaagctggagaagcagctgaagacccccttcaaggtggtgatcattgatgagagccacttcctgaagaacagcaggacagcccgctgccgggccgccatgcctgtgctgaaggtggccaagagggtcatcctgctgagcggcaccccagccatgagcaggcctgctgagctgtacacccagatcatcgctgtgaagcccaccttcttcccccagttccacgccttcggcctgcgctactgtgatgccaagaggatgccctggggctgggactacagcggcagcagcaacctgggggagctgaagctgctgctggaggaggccgtgatgctgcggcggctgaagagtgatgtgctgagccagctgcctgccaagcagaggaagatcgtggtgattgcccctggccgcatcaatgcccggaccagggctgccctggatgctgctgccaaggagatgaccaccaaggacaagaccaagcagcagcagaaggatgccctgatcctcttcttcaacagaacagctgaggccaagatccccagcgtcatcgagtacatcctggacctgctggagagcggccgggagaagttcctggtgtttgcccaccacaaggtggtgctggatgccatcacccaggagctggagaggaagcacgtgcagcacatcagaattgatggcagcaccagcagcgctgagcgggaggacctgtgccagcagttccagctgtctgaaagacatgctgtggccgtgctgagcatcacagctgccaacatgggcctgaccttcagcagcgctgacctggtggtgtttgctgagctgttctggaaccctggggtgctgatccaggctgaagatagagtgcacagaattggccagaccagctctgtgggcatccactacctggtggccaagggcacagcagatgactacctgtggcccctcatccaggagaagatcaaggtgctggccgaggccggcctgtctgagaccaacttcagcgagatgacagagagcacagactacctgtacaaggaccccaagcagcagaagatctatgacctcttccagaagagctttgagaaggagggcagtgacatggagctgctggaggccgctgagagctttgaccccggcagcgccagcggcaccagcggcagcagcagccagaacatgggagacaccctggatgagagcagcctgacagccagcccccagaagaagagaagatttgagttctttgacaactgggacagcttcaccagccccctgtag

SEQ ID NO: 172175 - DNA, 2865 bp, synthetic construct; identical to SEQ ID NO: 172174
  misc_feature 1..2865: note = Description of Artificial Sequence: Synthetic coding sequence
  source 1..2865: mol_type = other DNA

SEQ ID NO: 172176 - DNA, 60 bp, synthetic construct
  misc_feature 1..60: note = Description of Artificial Sequence: Synthetic coding sequence
  source 1..60: mol_type = other DNA
atgagcctgcccctgacagaggagcagaggaagaagattgaagaaaatcggcagaagtag

SEQ ID NO: 172177 - DNA, 441 bp, synthetic construct
  misc_feature 1..441: note = Description of Artificial Sequence: Synthetic coding sequence
  source 1..441: mol_type = other DNA
atgagcctgcccctgacagaggagcagaggaagaagattgaagaaaatcggcagaaggccctggccaggagagctgagaagctgctggccgagcagcaccagaggaccagcagcggcaccagcattgctggcaaccccttccaggccaagcagggccccagccagaacttcccccgggagagctgcaagcctgtgtcccatggagtcatcttcaagcagcagaacctgagcagcagcagcaatgctgaccagaggcctcatgacagccacagcttccaggccaagggcatctggaagaagccagaggagatgcccacagcctgccccggccacagccccaggagccagatggccctgaccggcatcagcccccccctggcccagagccccccagaggtgcccaagcagcagctgctgtcctatgagctgggccagggctag

SEQ ID NO: 172178 - DNA, 279 bp, synthetic construct
  misc_feature 1..279: note = Description of Artificial Sequence: Synthetic coding sequence
  source 1..279: mol_type = other DNA
atgagcctgcccctgacagaggagcagaggaagaagattgaagaaaatcggcagaaggccctggccaggagagctgagaagctgctggccgagcagcaccagaggaccagcagcggcaccagcattgctggcaaccccttccaggccaagcagggccccagccagaacttcccccgggagagctgcaagcctgtgtcccatggagtcatcttcaagcagcagaacctgagcagcagcagcaatgctgaccagaggcctcatgacagccacagcttctag

SEQ ID NO: 172179 - DNA, 393 bp, synthetic construct
  misc_feature 1..393: note = Description of Artificial Sequence: Synthetic coding sequence
  source 1..393: mol_type = other DNA
atgagcctgcccctgacagaggagcagaggaagaagattgaagaaaatcggcagaaggccctggccaggagagctgagaagctgctggccgagcagcaccagaggaccagcagcggcaccagcattgctggcaaccccttccaggccaagcagggccccagccagaacttcccccgggagagctgcaagcctgtgtcccatggagtcatcttcaagcagcagaacctgagcagcagcagcaatgctgaccagaggcctcatgacagccacagcttccaggccaagggcatctggaagaagccagaggagatgcccacagcctgccccggccacagccccaggagccagatggccctgaccggcatcagcccccccctggcccagagcccctag

SEQ ID NO: 172180 - DNA, 3318 bp, synthetic construct
  misc_feature 1..3318: note = Description of Artificial Sequence: Synthetic coding sequence
  source 1..3318: mol_type = other DNA
atggctgctgctgctgggggcggcggccctggaacagctgtgggcgccactggaagtggcattgctgctgctgctgctggcctggccgtgtacagaaggaaggatggcggccctgccaccaagttctgggagagccctgagaccgtgtcccagctggacagcgtgcgggtgtggctgggcaagcactacaagaagtatgtgcatgctgatgcccccaccaacaagaccctggccggcctggtggtgcagctgctgcagttccaggaggatgccttcggcaagcacgtgaccaacccagccttcaccaagctgcctgccaagtgcttcatggacttcaaggccggcggggccctgtgccacatcctgggcgccgcctacaagtacaagaatgagcagggctggaggagatttgacctgcagaaccccagcaggatggacagaaatgtggagatgttcatgaacatcgagaagaccctggtgcagaacaactgcctgacccggcccaacatctacctgatcccagacatcgacctgaagctggccaacaagctgaaggacatcatcaagaggcaccagggcaccttcacagatgagaagagcaaggccagccaccacatctacccctacagcagcagccaggatgatgaggagtggctgcggcctgtgatgaggaaggagaagcaggtgctggtgcactggggcttctacccagacagctatgacacctgggtgcacagcaatgatgtggatgctgagattgaggacccccccatccctgagaagccctggaaggtgcacgtgaagtggatcctggacacagacatcttcaatgagtggatgaatgaagaagattatgaggtggatgaaaataggaagcctgtgtccttccggcagaggatcagcaccaagaatgaggagcctgtgcgcagccctgagcggcgggacaggaaggccagcgccaatgccaggaagaggaagcacagccccagccccccaccacccacccccacagagagcaggaagaagagcggcaagaagggccaggccagcctgtatggcaagagaagaagccagaaggaggaggatgagcaggaggacctgaccaaggacatggaggaccccacccctgtgcccaacatcgaggaggtggtgctgcccaagaatgtgaacctgaagaaggacagcgagaacacccctgtgaagggcggcaccgtggccgacctggatgagcaggatgaggagaccgtgacagctgggggcaaggaggatgaggaccctgccaagggggaccagagccgctctgtggacctgggagaagataatgtgacagagcagaccaaccacatcatcatccccagctatgcctcctggtttgactacaactgcatccacgtgattgaaagaagagccctgcctgagttcttcaacgggaagaacaagagcaagaccccagagatctacctggcctacagaaacttcatgattgacacctaccgcctgaacccccaggagtacctgaccagcacagcctgcagaagaaacctgactggagatgtgtgtgctgtgatgagggtgcacgccttcctggagcagtggggcctggtgaactaccaggtggaccctgagagccggcccatggccatgggccccccacccaccccccacttcaacgtgctggccgacacccccagcggcctggtgcccctgcacctgcggagcccccaggtgcctgctgcccagcagatgctgaacttccctgagaagaacaaggagaagcctgtggacctgcagaactttggcctgaggacagacatctacagcaagaagaccctggccaagagcaaaggagccagcgctggccgggagtggacagagcaggagaccctgctgctgctggaggccctggagatgtacaaggatgactggaacaaggtgtctgagcacgtgggcagcaggacccaggatgagtgcatcctgcacttcctgcggctgcccatcgaggacccctacctggagaacagtgatgccagcctgggccccctggcctaccagcctgtgcccttcagccagagcggcaaccctgtgatgagcacagtggccttcctggcctctgtggtggacccccgggtggccagcgctgctgccaaggccgccctggaggagttcagccgggtgcgggaggaggtgcccctggagctggtggaggcccacgtgaagaaggtgcaggaggccgcccgggccagcggcaaggtggaccccacctacggcctggagagcagctgcatcgccggcactggaccagatgagcctgagaagctggagggcgctgaggaggagaagatggaggccgaccctgatggccagcagcctgagaaggccgagaacaaggtggagaatgaaacagatgaaggagacaaggcccaggatggagaaaatgagaagaacagcgagaaggagcaggacagcgaggtgtctgaggacaccaagtctgaggagaaggagacagaggagaacaaggagctgacagacacctgcaaggagcgggagagtgacaccgggaagaagaaggtggagcacgagatcagcgagggcaatgtggccacagctgctgctgctgccctggccagcgctgccaccaaggccaagcacctggccgctgtggaggagaggaagatcaagagcctggtggccctgctggtggagacccagatgaagaagctggagatcaagctgcggcactttgaggagctggagaccatcatggaccgggagaaggaggccctggagcagcagaggcagcagctgctgacagagcggcagaacttccacatggagcagctgaagtatgcagagctgcgggcccggcagcagatggagcagcagcagcacggccagaacccccagcaggcccaccagcacagcggcggccctggcctggcccccctgggcgctgctggccaccctggcatgatgccccaccagcagcccccaccctaccccctgatgcaccaccagatgcccccaccccaccccccccagcccggccagatccctggccctggctccatgatgcctggccagcacatgcctggccgcatgatccccaccgtggccgccaacatccaccccagcggcagcggccccaccccacctggcatgccacccatgcctggcaacatcctgggcccccgggtgcccctgacagccccaaatggcatgtacccacctccaccccagcagcagcccccacctcctcctccagcagatggagtgcccccacctccagcccctggccccccagccagcgctgccccctag

SEQ ID NO: 172181 - DNA, 3645 bp, synthetic construct
  misc_feature 1..3645: note = Description of Artificial Sequence: Synthetic coding sequence
  source 1..3645: mol_type = other DNA
atggctgtgaggaagaaggatggcggccccaacgtgaagtactatgaagctgctgacacagtgacccagtttgacaacgtgcggctgtggctgggcaagaactacaagaagtacatccaggccgagccccccaccaacaagagcctgagcagcctggtggtgcagctgctgcagttccaggaggaggtgtttgggaagcacgtgtccaatgcccccctgaccaagctgcccatcaagtgcttcctggacttcaaggccggcggcagcctgtgccacatcctggccgccgcctacaagttcaagagtgaccagggctggaggagatatgacttccagaaccccagcaggatggacagaaatgtggagatgttcatgaccatcgagaagagcctggtgcagaacaactgcctgagccggcccaacatcttcctgtgcccagaaattgagcccaagctgctgggcaagctgaaggacatcatcaagaggcaccagggcaccgtgacagaggacaagaacaatgccagccacgtggtgtaccctgtgcccggcaacctggaggaggaggagtgggtgcggcctgtgatgaagagggacaagcaggtgctgctgcactggggctactacccagacagctatgacacctggatcccagccagcgagattgaggcctctgtggaggatgcccccaccccagagaagcccaggaaggtgcacgccaagtggatcctggacacagacaccttcaatgagtggatgaatgaagaagattatgaggtgaatgatgacaagaaccctgtgtccaggaggaagaagatcagcgccaagaccctgacagatgaggtgaacagcccagacagcgaccggcgggacaagaagggcggcaactacaagaagaggaagaggagccccagccccagccccaccccagaggccaagaagaagaatgccaagaagggccccagcaccccctacaccaagagcaagaggggccaccgggaggaggagcaggaggacctgaccaaggacatggatgagcccagccctgtgcccaacgtggaggaggtgaccctgcccaagacagtgaacaccaagaaggacagcgagagcgcccctgtgaagggcggcaccatgacagacctggatgagcaggaggatgagagcatggagaccaccgggaaggatgaagatgagaacagcacaggcaacaagggggagcagaccaagaacccagacctgcacgaggacaacgtgacagagcagacccaccacatcatcatccccagctatgctgcctggtttgactacaacagcgtgcacgccattgaaagaagagccctgcctgagttcttcaacgggaagaacaagagcaagaccccagagatctacctggcctacagaaacttcatgattgacacctaccgcctgaacccccaggagtacctgaccagcacagcctgcagaagaaacctggccggagatgtgtgtgccatcatgagggtgcacgccttcctggagcagtggggcctcatcaactaccaggtggatgctgagagccggcccacccccatgggccccccacccaccagccacttccacgtgctggccgacaccccatctggcctggtgcccctgcagcccaagaccccccagcagaccagcgccagccagcagatgctgaacttcccagacaagggcaaggagaagcccacagacatgcagaactttggcctgaggacagacatgtacaccaagaagaatgtgcccagcaagagcaaggccgccgccagcgccacccgggagtggacagagcaggagaccctgctgctgctggaggccctggagatgtacaaggatgactggaacaaggtgtctgagcacgtgggcagcaggacccaggatgagtgcatcctgcacttcctgcggctgcccatcgaggacccctacctggaggacagcgaggccagcctgggccccctggcctaccagcccatccccttcagccagagcggcaaccctgtgatgagcacagtggccttcctggcctctgtggtggacccccgggtggccagcgctgctgccaagagcgccctggaggagttcagcaagatgaaggaggaggtgcccacagccctggtggaggcccacgtgaggaaggtggaggaggccgccaaggtgacaggcaaggctgaccctgccttcggcctggagagcagcggcattgctggcaccaccagtgatgagcctgagagaattgaggagagcggaaatgatgaggcccgggtggagggccaggccacagatgagaagaaggagcccaaggagccccgggagggcggcggggccatcgaggaggaggccaaggagaagaccagcgaggcccccaagaaggatgaggagaagggcaaggagggggacagcgagaaggagagcgagaagagtgatggagaccccatcgtggaccctgagaaggagaaggagcccaaggagggccaggaggaggtgctgaaggaggtggtggagagcgagggggagaggaagaccaaggtggagcgggacattggagagggcaacctgagcacagctgctgctgctgccctggccgctgctgctgtgaaggccaagcacctggccgctgtggaggagaggaagatcaagagcctggtggccctgctggtggagacccagatgaagaagctggagatcaagctgcggcactttgaggagctggagaccatcatggaccgggagcgggaggccctggagtaccagaggcagcagctgctggccgaccggcaggccttccacatggagcagctgaagtatgcagagatgagggcccggcagcagcacttccagcagatgcaccagcagcagcagcagcccccaccagccctgcccccaggcagccagcccatccccccaactggagctgctggccccccagctgtgcacggcctggccgtggccccagcctctgtggtgcctgccccagctggcagcggggcccctcctggcagcctgggccccagcgagcagatcggccaggccggcagcacagctggcccccagcagcagcagcctgctggggccccccagcctggagctgtgcccccaggagtgcccccacctggcccccacggccccagccccttccccaaccagcagaccccacccagcatgatgcctggagctgtgcccggcagcggccaccctggggtggccggaaatgcccccctgggcctgcccttcggcatgcctcctcctcctcctcctccagcccccagcatcatccccttcggcagcctggccgacagcatcagcatcaacctgcctgccccacccaacctgcacggccaccaccaccacctgccctttgcccctggcaccctgcccccacccaacctgcctgtgtccatggccaaccccctgcaccccaacctgcctgccaccaccaccatgcccagcagcctgcccctgggccctggcctgggcagcgctgctgcccagagccctgccatcgtggccgctgtgcagggcaacctgctgcccagcgccagccccctgcctgaccccggcacccccctgcccccagaccccacagcccccagccctggcaccgtgacccctgtgcccccaccccagtag

SEQ ID NO: 172182 - DNA, 3393 bp, synthetic construct
  misc_feature 1..3393: note = Description of Artificial Sequence: Synthetic coding sequence
  source 1..3393: mol_type = other DNA
atggctgtgaggaagaaggatggcggccccaacgtgaagtactatgaagctgctgacacagtgacccagtttgacaacgtgcggctgtggctgggcaagaactacaagaagtacatccaggccgagccccccaccaacaagagcctgagcagcctggtggtgcagctgctgcagttccaggaggaggtgtttgggaagcacgtgtccaatgcccccctgaccaagctgcccatcaagtgcttcctggacttcaaggccggcggcagcctgtgccacatcctggccgccgcctacaagttcaagagtgaccagggctggaggagatatgacttccagaaccccagcaggatggacagaaatgtggagatgttcatgaccatcgagaagagcctggtgcagaacaactgcctgagccggcccaacatcttcctgtgcccagaaattgagcccaagctgctgggcaagctgaaggacatcatcaagaggcaccagggcaccgtgacagaggacaagaacaatgccagccacgtggtgtaccctgtgcccggcaacctggaggaggaggagtgggtgcggcctgtgatgaagagggacaagcaggtgctgctgcactggggctactacccagacagctatgacacctggatcccagccagcgagattgaggcctctgtggaggatgcccccaccccagagaagcccaggaaggtgcacgccaagtggatcctggacacagacaccttcaatgagtggatgaatgaagaagattatgaggtgaatgatgacaagaaccctgtgtccaggaggaagaagatcagcgccaagaccctgacagatgaggtgaacagcccagacagcgaccggcgggacaagaagggcggcaactacaagaagaggaagaggagccccagccccagccccaccccagaggccaagaagaagaatgccaagaagggccccagcaccccctacaccaagagcaagaggggccaccgggaggaggagcaggaggacctgaccaaggacatggatgagcccagccctgtgcccaacgtggaggaggtgaccctgcccaagacagtgaacaccaagaaggacagcgagagcgcccctgtgaagggcggcaccatgacagacctggatgagcaggaggatgagagcatggagaccaccgggaaggatgaagatgagaacagcacaggcaacaagggggagcagaccaagaacccagacctgcacgaggacaacgtgacagagcagacccaccacatcatcatccccagctatgctgcctggtttgactacaacagcgtgcacgccattgaaagaagagccctgcctgagttcttcaacgggaagaacaagagcaagaccccagagatctacctggcctacagaaacttcatgattgacacctaccgcctgaacccccaggagtacctgaccagcacagcctgcagaagaaacctggccggagatgtgtgtgccatcatgagggtgcacgccttcctggagcagtggggcctcatcaactaccaggtggatgctgagagccggcccacccccatgggccccccacccaccagccacttccacgtgctggccgacaccccatctggcctggtgcccctgcagcccaagaccccccagggccggcaggtggatgctgacaccaaggccggcaggaagggcaaggagctggatgacctggtgcctgagacagccaagggcaagccagagctgcagaccagcgccagccagcagatgctgaacttcccagacaagggcaaggagaagcccacagacatgcagaactttggcctgaggacagacatgtacaccaagaagaatgtgcccagcaagagcaaggctgctgccagcgccacccgggagtggacagagcaggagaccctgctgctgctggaggccctggagatgtacaaggatgactggaacaaggtgtctgaacatgtgggcagcaggacccaggatgagtgcatcctgcacttcctgcggctgcccatcgaggacccctacctggaggacagcgaggccagcctgggccccctggcctaccagcccatccccttcagccagagcggcaaccctgtgatgagcacagtggccttcctggcctctgtggtggacccccgggtggccagcgctgctgccaagagcgccctggaggagttcagcaagatgaaggaggaggtgcccacagccctggtggaggcccacgtgaggaaggtggaggaggccgccaaggtgacaggcaaggctgaccctgccttcggcctggagagcagcggcattgctggcaccaccagtgatgagcctgagcgcatcgaggagagcggaaatgatgaggcccgggtggagggccaggccacagatgagaagaaggagcccaaggagccccgggagggcggcggggccatcgaggaggaggccaaggagaagaccagcgaggcccccaagaaggatgaggagaagggcaaggagggggacagcgagaaggagagcgagaagagtgatggagaccccatcgtggaccctgagaaggagaaggagcccaaggagggccaggaggaggtgctgaaggaggtggtggagagcgagggggagaggaagaccaaggtggagcgggacatcggggagggcaacctgagcacagctgctgctgctgccctggccgctgctgctgtgaaggccaagcacctggccgctgtggaggagaggaagatcaagagcctggtggccctgctggtggagacccagatgaagaagctggagatcaagctgcggcactttgaggagctggagaccatcatggaccgggagcgggaggccctggagtaccagaggcagcagctgctggccgaccggcaggccttccacatggagcagctgaagtatgcagagatgagggcccggcagcagcacttccagcagatgcaccagcagcagcagcagcccccaccagccctgcccccaggcagccagcccatcccccccaccggggctgctggccccccagctgtgcacggcctggccgtggccccagcctctgtggtgcctgccccagctggcagcggggcccctcctggcagcctgggccccagcgagcagatcggccaggccggcagcacagctggcccccagcagcagcagcctgctggggccccccagcccggggctgtgcccccaggagtgcccccacctggcccccacggccccagccccttccccaaccagcagaccccacccagcatgatgcctggagctgtgcccggcagcggccaccctggggtggccgaccccggcacccccctgcccccagaccccacagcccccagccctggcaccgtgacccctgtgcccccaccccagtag

SEQ ID NO: 172183 - DNA, 3459 bp, synthetic construct
  misc_feature 1..3459: note = Description of Artificial Sequence: Synthetic coding sequence
  source 1..3459: mol_type = other DNA
atggctgtgaggaagaaggatggcggccccaacgtgaagtactatgaagctgctgacacagtgacccagtttgacaacgtgcggctgtggctgggcaagaactacaagaagtacatccaggccgagccccccaccaacaagagcctgagcagcctggtggtgcagctgctgcagttccaggaggaggtgtttgggaagcacgtgtccaatgcccccctgaccaagctgcccatcaagtgcttcctggacttcaaggccggcggcagcctgtgccacatcctggccgccgcctacaagttcaagagtgaccagggctggaggagatatgacttccagaaccccagcaggatggacagaaatgtggagatgttcatgaccatcgagaagagcctggtgcagaacaactgcctgagccggcccaacatcttcctgtgcccagaaattgagcccaagctgctgggcaagctgaaggacatcatcaagaggcaccagggcaccgtgacagaggacaagaacaatgccagccacgtggtgtaccctgtgcccggcaacctggaggaggaggagtgggtgcggcctgtgatgaagagggacaagcaggtgctgctgcactggggctactacccagacagctatgacacctggatcccagccagcgagattgaggcctctgtggaggatgcccccaccccagagaagcccaggaaggtgcacgccaagtggatcctggacacagacaccttcaatgagtggatgaatgaagaagattatgaggtgaatgatgacaagaaccctgtgtccaggaggaagaagatcagcgccaagaccctgacagatgaggtgaacagcccagacagcgaccggcgggacaagaagggcggcaactacaagaagaggaagaggagccccagccccagccccaccccagaggccaagaagaagaatgccaagaagggccccagcaccccctacaccaagagcaagaggggccaccgggaggaggagcaggaggacctgaccaaggacatggatgagcccagccctgtgcccaacgtggaggaggtgaccctgcccaagacagtgaacaccaagaaggacagcgagagcgcccctgtgaagggcggcaccatgacagacctggatgagcaggaggatgagagcatggagaccaccgggaaggatgaagatgagaacagcacaggcaacaagggggagcagaccaagaacccagacctgcacgaggacaacgtgacagagcagacccaccacatcatcatccccagctatgctgcctggtttgactacaacagcgtgcacgccattgaaagaagagccctgcctgagttcttcaacgggaagaacaagagcaagaccccagagatctacctggcctacagaaacttcatgattgacacctaccgcctgaacccccaggagtacctgaccagcacagcctgcagaagaaacctggccggagatgtgtgtgccatcatgagggtgcacgccttcctggagcagtggggcctcatcaactaccaggtggatgctgagagccggcccacccccatgggccccccacccaccagccacttccacgtgctggccgacaccccatctggcctggtgcccctgcagcccaagaccccccagggccggcaggtggatgctgacaccaaggccggcaggaagggcaaggagctggatgacctggtgcctgagacagccaagggcaagccagagctgcagaccagcgccagccagcagatgctgaacttcccagacaagggcaaggagaagcccacagacatgcagaactttggcctgaggacagacatgtacaccaagaagaatgtgcccagcaagagcaaggctgctgccagcgccacccgggagtggacagagcaggagaccctgctgctgctggaggccctggagatgtacaaggatgactggaacaaggtgtctgaacatgtgggcagcaggacccaggatgagtgcatcctgcacttcctgcggctgcccatcgaggacccctacctggaggacagcgaggccagcctgggccccctggcctaccagcccatccccttcagccagagcggcaaccctgtgatgagcacagtggccttcctggcctctgtggtggacccccgggtggccagcgctgctgccaagagcgccctggaggagttcagcaagatgaaggaggaggtgcccacagccctggtggaggcccacgtgaggaaggtggaggaggccgccaaggtgacaggcaaggctgaccctgccttcggcctggagagcagcggcattgctggcaccaccagtgatgagcctgagcgcatcgaggagagcggaaatgatgaggcccgggtggagggccaggccacagatgagaagaaggagcccaaggagccccgggagggcggcggggccatcgaggaggaggccaaggagaagaccagcgaggcccccaagaaggatgaggagaagggcaaggagggggacagcgagaaggagagcgagaagagtgatggagaccccatcgtggaccctgagaaggagaaggagcccaaggagggccaggaggaggtgctgaaggaggtggtggagagcgagggggagaggaagaccaaggtggagcgggacatcggggagggcaacctgagcacagctgctgctgctgccctggccgctgctgctgtgaaggccaagcacctggccgctgtggaggagaggaagatcaagagcctggtggccctgctggtggagacccagatgaagaagctggagatcaagctgcggcactttgaggagctggagaccatcatggaccgggagcgggaggccctggagtaccagaggcagcagctgctggccgaccggcaggccttccacatggagcagctgaagtatgcagagatgagggcccggcagcagcacttccagcagatgcaccagcagcagcagcagcccccaccagccctgcccccaggcagccagcccatcccccccaccggggctgctggccccccagctgtgcacggcctggccgtggccccagcctctgtggtgcctgccccagctggcagcggggcccctcctggcagcctgggccccagcgagcagatcggccaggccggcagcacagctggcccccagcagcagcagcctgctggggccccccagcccggggctgtgcccccaggagtgcccccacctggcccccacggccccagccccttccccaaccagcagaccccacccagcatgatgcctggagctgtgcccggcagcggccaccctggggtggccgcccagagccctgccatcgtggccgctgtgcagggcaacctgctgcccagcgccagccccctgcctgaccccggcacccccctgcccccagaccccacagcccccagccctggcaccgtgacccctgtgcccccaccccagtag

SEQ ID NO: 172184 - DNA, 1425 bp, synthetic construct
  misc_feature 1..1425: note = Description of Artificial Sequence: Synthetic coding sequence
  source 1..1425: mol_type = other DNA
atggccgcccgggccggcttccagagcgtggcccccagcggcggggccggggccagcggcggggccggggctgctgctgccctgggccctgggggcaccccaggcccccctgtgaggatgggccctgcccctggccagggcctgtaccgcagccccatgcctggggccgcctaccccaggcctggcatgctgcccggcagcaggatgaccccccagggccccagcatgggccccccaggctatggaggcaaccccagcgtgcggcccggcctggcccagagcggcatggaccagagcaggaagaggcctgccccccagcagatccagcaggtgcagcagcaggccgtgcagaacagaaaccacaatgccaagaagaagaagatggctgacaagatcctgccccagaggatccgggagctggtgcctgagagccaggcctacatggacctgctggcctttgagaggaagctggaccagaccatcatgaggaagaggctggacatccaggaggccctgaagaggcccatcaagcagaagaggaagctgcgcatcttcatcagcaacaccttcaacccagccaagagtgatgctgaagatggagagggcaccgtggcctcctgggagctgcgggtggagggccgcctgctggaggacagcgccctgagcaaatatgatgccaccaagcagaagaggaagttcagcagcttcttcaagagcctggtgattgagctggacaaggacctgtatggccctgacaaccacctggtggagtggcacaggacagccaccacccaggagacagatggcttccaggtgaagaggcctggagatgtgaatgtgcgctgcaccgtgctgctgatgctggactaccagcccccccagttcaagctggacccccggctggcccggctgctgggcatccacacccagaccaggcctgtgatcatccaggccctgtggcagtacatcaagacccacaagctgcaggacccccatgagcgggagtttgtgatctgtgacaagtacctgcagcagatctttgagagccagaggatgaagttcagcgagatcccccagaggctgcacgccctgctgatgcctcctgagcccatcatcatcaaccacgtgatctctgtggaccccaatgaccagaagaagacagcctgctatgacattgatgtggaggtggatgacaccctgaagacccagatgaacagcttcctgctgagcacagccagccagcaggagatcgccaccctggacaacaagaccatgacagatgtggtgggcaaccctgaggaggagcggcgggcagagttctacttccagccctgggcccaggaggccgtgtgccgctacttctacagcaaggtgcagcagaggcggcaggagctggagcaggccctgggcatccggaacacctag

SEQ ID NO: 172185 - DNA, 1548 bp, synthetic construct
  misc_feature 1..1548: note = Description of Artificial Sequence: Synthetic coding sequence
  source 1..1548: mol_type = other DNA
atggccgcccgggccggcttccagagcgtggcccccagcggcggggccggggccagcggcggggccggggctgctgctgccctgggccctgggggcaccccaggcccccctgtgaggatgggccctgcccctggccagggcctgtaccgcagccccatgcctggggccgcctaccccaggcctggcatgctgcccggcagcaggatgaccccccagggccccagcatgggccccccaggctatggaggcaaccccagcgtgcggcccggcctggcccagagcggcatggaccagagcaggaagaggcctgccccccagcagatccagcaggtgcagcagcaggccgtgcagaacagaaaccacaatgccaagaagaagaagatggctgacaagatcctgccccagaggatccgggagctggtgcctgagagccaggcctacatggacctgctggcctttgagaggaagctggaccagaccatcatgaggaagaggctggacatccaggaggccctgaagaggcccatcaagcagaagaggaagctgcgcatcttcatcagcaacaccttcaacccagccaagagtgatgctgaagatggagagggcaccgtggcctcctgggagctgcgggtggagggccgcctgctggaggacagcgccctgagcaaatatgatgccaccaagcagaagaggaagttcagcagcttcttcaagagcctggtgattgagctggacaaggacctgtatggccctgacaaccacctggtggagtggcacaggacagccaccacccaggagacagatggcttccaggtgaagaggcctggagatgtgaatgtgcgctgcaccgtgctgctgatgctggactaccagcccccccagttcaagctggacccccggctggcccggctgctgggcatccacacccagaccaggcctgtgatcatccaggccctgtggcagtacatcaagacccacaagctgcaggacccccatgagcgggagtttgtgatctgtgacaagtacctgcagcagatctttgagagccagaggatgaagttcagcgagatcccccagaggctgcacgccctgctgatgcctcctgagcccatcatcatcaaccacgtgatctctgtggaccccaatgaccagaagaagacagcctgctatgacattgatgtggaggtggatgacaccctgaagacccagatgaacagcttcctgctgagcacagccagccagcaggagatcgccaccctggacaacaagatccacgagaccatcgagaccatcaaccagctgaagacccagcgggagttcatgctgagctttgcccgggacccccagggcttcatcaatgactggctgcagagccagtgccgggacctgaagaccatgacagatgtggtgggcaaccctgaggaggagaggagagctgagttctacttccagccctgggcccaggaggccgtgtgccgctacttctacagcaaggtgcagcagaggcggcaggagctggagcaggccctgggcatccggaacacctag

SEQ ID NO: 172186 - DNA, 876 bp, synthetic construct
  misc_feature 1..876: note = Description of Artificial Sequence: Synthetic coding sequence
  source 1..876: mol_type = other DNA
atgatgcccctgaacaagaggggcagcagcctgcccttcaagagcctggtgattgagctggacaaggacctgtatggccctgacaaccacctggtggagtggcacaggacagccaccacccaggagacagatggcttccaggtgaagaggcctggagatgtgaatgtgcgctgcaccgtgctgctgatgctggactaccagcccccccagttcaagctggacccccggctggcccggctgctgggcatccacacccagaccaggcctgtgatcatccaggccctgtggcagtacatcaagacccacaagctgcaggacccccatgagcgggagtttgtgatctgtgacaagtacctgcagcagatctttgagagccagaggatgaagttcagcgagatcccccagaggctgcacgccctgctgatgcctcctgagcccatcatcatcaaccacgtgatctctgtggaccccaatgaccagaagaagacagcctgctatgacattgatgtggaggtggatgacaccctgaagacccagatgaacagcttcctgctgagcacagccagccagcaggagatcgccaccctggacaacaagatccacgagaccatcgagaccatcaaccagctgaagacccagcgggagttcatgctgagctttgcccgggacccccagggcttcatcaatgactggctgcagagccagtgccgggacctgaagaccatgacagatgtggtgggcaaccctgaggaggagaggagagctgagttctacttccagccctgggcccaggaggccgtgtgccgctacttctacagcaaggtgcagcagaggcggcaggagctggagcaggccctgggcatccggaacacctag

SEQ ID NO: 172187 - DNA, 1362 bp, synthetic construct; identical to SEQ ID NO: 143216
  misc_feature 1..1362: note = Description of Artificial Sequence: Synthetic coding sequence
  source 1..1362: mol_type = other DNA

SEQ ID NO: 172188 - DNA, 1452 bp, synthetic construct
  misc_feature 1..1452: note = Description of Artificial Sequence: Synthetic coding sequence
  source 1..1452: mol_type = other DNA
atgggcagaagagtgggcgtggaggtgaccccccgctgggccccccagaagtgccagggcgcccggccccagaggcctggcatgagccctggcaacaggatgcccatggccggcctgcaggtgggccccccagctggcagcccctttggagctgctgcccccctgcggcccggcatgccacccaccatgatggaccccttcaggaagaggctgctggtgccccaggcccagccccccatgcctgcccagaggcggggcctgaagaggaggaagatggctgacaaggtgctgccccagaggatccgggagctggtgcctgagagccaggcctacatggacctgctggcctttgagaggaagctggaccagaccatcgccaggaagaggatggagatccaggaggccatcaagaagcccctgacccagaagaggaagctgcgcatctacatcagcaacaccttcagccccagcaaggccgagggggacagcgctggaacagctggcacccctgggggcaccccagctggggacaaggtggcctcctgggagctgcgggtggagggcaagctgctggatgaccccagcaagcagaagaggaagttcagcagcttcttcaagagcctggtgattgagctggacaaggagctgtatggccctgacaaccacctggtggagtggcacaggatgcccaccacccaggagacagatggcttccaggtgaagaggcctggggacctgaatgtgaagtgcaccctgctgctgatgctggaccaccagcccccccagtacaagctggacccccggctggcccggctgctgggcgtgcacacccagaccagggctgccatcatgcaggccctgtggctgtacatcaagcacaaccagctgcaggacggccacgagcgggagtacatcaactgcaaccgctacttccggcagatcttcagctgtggccgcctgcgcttcagcgagatccccatgaagctggccggcctgctgcagcacccagaccccatcgtcatcaaccacgtgatctctgtggaccccaatgaccagaagaagacagcctgctatgacattgatgtggaggtggatgaccccctgaaggcccagatgagcaacttcctggccagcaccaccaaccagcaggagatcgccagcctggatgtgaagatccacgagaccatcgagagcatcaaccagctgaagacccagagggacttcatgctgtccttcagcacagacccccaggacttcatccaggagtggctgcggagccagaggcgggacctgaagatcatcacagatgtgattggcaaccctgaggaggagaggagagctgccttctaccaccagccctgggcccaggaggccgtgggccgccacatctttgccaaggtgcagcagaggcggcaggagctggagcaggtgctgggcatccggctgacctag

SEQ ID NO: 172189 - DNA, 1596 bp, synthetic construct
  misc_feature 1..1596: note = Description of Artificial Sequence: Synthetic coding sequence
  source 1..1596: mol_type = other DNA
atgagcggccgcggggccggcggcttccccctgccccccctgagccctgggggcggcgctgtggccgccgccctgggcgcccctcctcctcctgctggccctggcatgctgcccggccctgccctgcggggccctggccctgctgggggcgtgggcggccctggagctgctgccttccggcccatgggccctgctggccctgctgcccagtaccagaggcctggcatgagccctggcaacaggatgcccatggccggcctgcaggtgggccccccagctggcagcccctttggagctgctgcccccctgcggcccggcatgccacccaccatgatggaccccttcaggaagaggctgctggtgccccaggcccagccccccatgcctgcccagaggcggggcctgaagaggaggaagatggctgacaaggtgctgccccagaggatccgggagctggtgcctgagagccaggcctacatggacctgctggcctttgagaggaagctggaccagaccatcgccaggaagaggatggagatccaggaggccatcaagaagcccctgacccagaagaggaagctgcgcatctacatcagcaacaccttcagccccagcaaggccgagggggacagcgctggaacagctggcacccctgggggcaccccagctggggacaaggtggcctcctgggagctgcgggtggagggcaagctgctggatgaccccagcaagcagaagaggaagttcagcagcttcttcaagagcctggtgattgagctggacaaggagctgtatggccctgacaaccacctggtggagtggcacaggatgcccaccacccaggagacagatggcttccaggtgaagaggcctggggacctgaatgtgaagtgcaccctgctgctgatgctggaccaccagcccccccagtacaagctggacccccggctggcccggctgctgggcgtgcacacccagaccagggctgccatcatgcaggccctgtggctgtacatcaagcacaaccagctgcaggacggccacgagcgggagtacatcaactgcaaccgctacttccggcagatcttcagctgtggccgcctgcgcttcagcgagatccccatgaagctggccggcctgctgcagcacccagaccccatcgtcatcaaccacgtgatctctgtggaccccaatgaccagaagaagacagcctgctatgacattgatgtggaggtggatgaccccctgaaggcccagatgagcaacttcctggccagcaccaccaaccagcaggagatcgccagcctggatgtgaagatccacgagaccatcgagagcatcaaccagctgaagacccagagggacttcatgctgtccttcagcacagacccccaggacttcatccaggagtggctgcggagccagaggcgggacctgaagatcatcacagatgtgattggcaaccctgaggaggagaggagagctgccttctaccaccagccctgggcccaggaggccgtgggccgccacatctttgccaaggtgcagcagaggcggcaggagctggagcaggtgctgggcatccggctgacctag

SEQ ID NO: 172190 - DNA, 1485 bp, synthetic construct
  misc_feature 1..1485: note = Description of Artificial Sequence: Synthetic coding sequence
  source 1..1485: mol_type = other DNA
atgagcggccgcggggccggcggcttccccctgccccccctgagccctgggggcggggccgccttccggcccatgggccctgctggccctgctgcccagtaccagaggcctggcatgagccctggcaacaggatgcccatggccggcctgcaggtgggccccccagctggcagcccctttggagctgctgcccccctgcggcccggcatgccacccaccatgatggaccccttcaggaagaggctgctggtgccccaggcccagccccccatgcctgcccagaggcggggcctgaagaggaggaagatggctgacaaggtgctgccccagaggatccgggagctggtgcctgagagccaggcctacatggacctgctggcctttgagaggaagctggaccagaccatcgccaggaagaggatggagatccaggaggccatcaagaagcccctgacccagaagaggaagctgcgcatctacatcagcaacaccttcagccccagcaaggccgagggggacagcgctggaacagctggcaccccaggcggcaccccagctggggacaaggtggcctcctgggagctgcgggtggagggcaagctgctggatgaccccagcaagcagaagaggaagttcagcagcttcttcaagagcctggtgattgagctggacaaggagctgtatggccctgacaaccacctggtggagtggcacaggatgcccaccacccaggagacagatggcttccaggtgaagaggcctggggacctgaatgtgaagtgcaccctgctgctgatgctggaccaccagcccccccagtacaagctggacccccggctggcccggctgctgggcgtgcacacccagacccgggccgccatcatgcaggccctgtggctgtacatcaagcacaaccagctgcaggacggccacgagcgggagtacatcaactgcaaccgctacttccggcagatcttcagctgtggccgcctgcgcttcagcgagatccccatgaagctggccggcctgctgcagcacccagaccccatcgtcatcaaccacgtgatctctgtggaccccaatgaccagaagaagacagcctgctatgacattgatgtggaggtggatgaccccctgaaggcccagatgagcaacttcctggccagcaccaccaaccagcaggagatcgccagcctggatgtgaagatccacgagaccatcgagagcatcaaccagctgaagacccagagggacttcatgctgtccttcagcacagacccccaggacttcatccaggagtggctgcggagccagaggcgggacctgaagatcatcacagatgtgattggcaaccctgaggaggagcggcgggccgccttctaccaccagccctgggcccaggaggccgtgggccgccacatctttgccaaggtgcagcagaggcggcaggagctggagcaggtgctgggcatccggctgacctag

SEQ ID NO: 172191 - DNA, 1452 bp, synthetic construct
  misc_feature 1..1452: note = Description of Artificial Sequence: Synthetic coding sequence
  source 1..1452: mol_type = other DNA
atggctgctgatgaggtggccggcggggccaggaaggccaccaagagcaagctgtttgagttcctggtgcacggcgtgcggcccggcatgcccagcggggccaggatgccccaccagggcgcccccatgggccccccaggcagcccctacatgggcagccctgctgtgcggcccggcctggccccagctggcatggagcccgccaggaagagagctgcccctcctcctggccagagccaggcccagagccagggccagcctgtgcccacagccccagcccggagccgcagcgccaagaggaggaagatggctgacaagatcctgccccagaggatccgggagctggtgcctgagagccaggcctacatggacctgctggcctttgagaggaagctggaccagaccatcatgaggaagagggtggacatccaggaggccctgaagaggcccatgaagcagaagaggaagctgcggctgtacatcagcaacaccttcaacccagccaagccagatgctgaagattctgatggcagcatcgcctcctgggagctgcgggtggagggcaagctgctggatgaccccagcaagcagaagaggaagttcagcagcttcttcaagagcctggtgattgagctggacaaggacctgtatggccctgacaaccacctggtggagtggcacaggacccccaccacccaggagacagatggcttccaggtgaagaggcctggggacctgtctgtgcgctgcaccctgctgctgatgctggactaccagcccccccagttcaagctggacccccggctggcccggctgctgggcctgcacacccagagccgcagcgccatcgtgcaggccctgtggcagtatgtgaagaccaaccggctgcaggacagccatgacaaggagtacatcaacggggacaagtacttccagcagatctttgactgcccccggctgaagttcagcgagatcccccagaggctgacagccctgctgctgcccccagaccccatcgtcatcaaccacgtgatctctgtggaccccagcgaccagaagaagacagcctgctatgacattgatgtggaggtggaggagcccctgaagggccagatgagcagcttcctgctgagcacagccaaccagcaggagatcagcgccctggacagcaagatccacgagaccatcgagagcatcaaccagctgaagatccagagggacttcatgctgtccttcagccgggaccccaagggctacgtgcaggacctgctgcggagccagagccgggacctgaaggtgatgacagatgtggccggcaaccctgaggaggagaggagagctgagttctaccaccagccctggagccaggaggccgtgagccgctacttctactgcaagatccagcagaggcggcaggagctggagcagagcctggtggtgaggaacacctag

SEQ ID NO: 172192 - DNA, 1308 bp, synthetic construct
  misc_feature 1..1308: note = Description of Artificial Sequence: Synthetic coding sequence
  source 1..1308: mol_type = other DNA
atgaccccaggcctgcagcacccccccaccgtggtgcagaggcctggcatgcccagcggggccaggatgccccaccagggcgcccccatgggccccccaggcagcccctacatgggcagccctgctgccccagcccggagccgcagcgccaagaggaggaagatggctgacaagatcctgccccagaggatccgggagctggtgcctgagagccaggcctacatggacctgctggcctttgagaggaagctggaccagaccatcatgaggaagagggtggacatccaggaggccctgaagaggcccatgaagcagaagaggaagctgcggctgtacatcagcaacaccttcaacccagccaagccagatgctgaagattctgatggcagcatcgcctcctgggagctgcgggtggagggcaagctgctggatgaccccagcaagcagaagaggaagttcagcagcttcttcaagagcctggtgattgagctggacaaggacctgtatggccctgacaaccacctggtggagtggcacaggacccccaccacccaggagacagatggcttccaggtgaagaggcctggggacctgtctgtgcgctgcaccctgctgctgatgctggactaccagcccccccagttcaagctggacccccggctggcccggctgctgggcctgcacacccagagccgcagcgccatcgtgcaggccctgtggcagtatgtgaagaccaaccggctgcaggacagccatgacaaggagtacatcaacggggacaagtacttccagcagatctttgactgcccccggctgaagttcagcgagatcccccagaggctgacagccctgctgctgcccccagaccccatcgtcatcaaccacgtgatctctgtggaccccagcgaccagaagaagacagcctgctatgacattgatgtggaggtggaggagcccctgaagggccagatgagcagcttcctgctgagcacagccaaccagcaggagatcagcgccctggacagcaagatccacgagaccatcgagagcatcaaccagctgaagatccagagggacttcatgctgtccttcagccgggaccccaagggctacgtgcaggacctgctgcggagccagagccgggacctgaaggtgatgacagatgtggccggcaaccctgaggaggagaggagagctgagttctaccaccagccctggagccaggaggccgtgagccgctacttctactgcaagatccagcagaggcggcaggagctggagcagagcctggtggtgaggaacacctag

SEQ ID NO: 172193 - DNA, 1413 bp, synthetic construct
  misc_feature 1..1413: note = Description of Artificial Sequence: Synthetic coding sequence
  source 1..1413: mol_type = other DNA
atgaccccaggcctgcagcacccccccaccgtggtgcagaggcctggcatgcccagcggggccaggatgccccaccagggcgcccccatgggccccccaggcagcccctacatgggcagccctgctgtgcggcccggcctggccccagctggcatggagcccgccaggaagagagctgcccctcctcctggccagagccaggcccagagccagggccagcctgtgcccacagccccagcccggagccgcagcgccaagaggaggaagatggctgacaagatcctgccccagaggatccgggagctggtgcctgagagccaggcctacatggacctgctggcctttgagaggaagctggaccagaccatcatgaggaagagggtggacatccaggaggccctgaagaggcccatgaagcagaagaggaagctgcggctgtacatcagcaacaccttcaacccagccaagccagatgctgaggacagtgatggcagcatcgcctcctgggagctgcgggtggagggcaagctgctggatgaccccagcaagcagaagaggaagttcagcagcttcttcaagagcctggtgattgagctggacaaggacctgtatggccctgacaaccacctggtggagtggcacaggacccccaccacccaggagacagatggcttccaggtgaagaggcctggggacctgtctgtgcgctgcaccctgctgctgatgctggactaccagcccccccagttcaagctggacccccggctggcccggctgctgggcctgcacacccagagccgcagcgccatcgtgcaggccctgtggcagtatgtgaagaccaaccggctgcaggacagccatgacaaggagtacatcaatggagacaagtacttccagcagatctttgactgcccccggctgaagttcagcgagatcccccagaggctgacagccctgctgctgcccccagaccccatcgtcatcaaccacgtgatctctgtggaccccagcgaccagaagaagacagcctgctatgacattgatgtggaggtggaggagcccctgaagggccagatgagcagcttcctgctgagcacagccaaccagcaggagatcagcgccctggacagcaagatccacgagaccatcgagagcatcaaccagctgaagatccagagggacttcatgctgtccttcagccgggaccccaagggctacgtgcaggacctgctgcggagccagagccgggacctgaaggtgatgacagatgtggccggcaaccctgaggaggagcggcgggcagagttctaccaccagccctggagccaggaggccgtgagccgctacttctactgcaagatccagcagaggcggcaggagctggagcagagcctggtggtgaggaacacctag

SEQ ID NO: 172194 - DNA, 1413 bp, synthetic construct; identical to SEQ ID NO: 172193
  misc_feature 1..1413: note = Description of Artificial Sequence: Synthetic coding sequence
  source 1..1413: mol_type = other DNA

SEQ ID NO: 172195 - DNA, 420 bp, synthetic construct
  misc_feature 1..420: note = Description of Artificial Sequence: Synthetic coding sequence
  source 1..420: mol_type = other DNA
atgaccccaggcctgcagcacccccccaccgtggtgcagaggcctggcatgcccagcggggccaggatgccccaccagggcgcccccatgggccccccaggcagcccctacatgggcagccctgctgtgcggcccggcctggccccagctggcatggagcccgccaggaagagagctgcccctcctcctggccagagccaggcccagagccagggccagcctgtgcccacagccccagcccggagccgcagcgccaagaggaggaagatggctgacaagatcctgccccagaggatccgggagctggtgcctgagagccaggcctacatggacctgctggcctttgagaggaagctggaccagaccatcatgaggaagagggtggacatccaggaggccctgaagaggcccatgaagtag

SEQ ID NO: 172196 - DNA, 3081 bp, synthetic construct
  misc_feature 1..3081: note = Description of Artificial Sequence: Synthetic coding sequence
  source 1..3081: mol_type = other DNA
atgaacctcttcaacctggaccgcttccgctttgagaagaggaacaagattgaggaggcccctgaggccaccccccagcccagccagcccggccccagcagccccatcagcctgtctgctgaggaggagaatgctgagggggaggtgtcccgggccaacaccccagacagcgacatcacagagaagacagaggacagctctgtgcctgagaccccagacaatgaaaggaaggccagcatctcctacttcaagaaccagaggggcatccagtacatcgacctgagcagtgacagtgaagatgtggtgagccccaactgcagcaacacagtgcaggagaagaccttcaacaaggacaccgtcatcatcgtgtctgagcccagtgaagatgaggagagccagggcctgcccaccatggccaggagaaatgatgacatcagcgagctggaggacctgtctgagctggaggacctgaaggatgccaagctgcagaccctgaaggagctgttcccccagaggagtgacaatgacctgctgaagctgattgagagcaccagcaccatggatggagccatcgctgctgccctgctgatgtttggagatgctgggggcggccccaggaagaggaagctgagcagcagcagcgagccctatgaagaagatgagttcaatgatgaccagagcatcaagaagacccggctggaccatggagaggagagcaatgaatctgctgagagcagcagcaactgggagaagcaggagagcatcgtgctgaagctgcagaaggagttccccaactttgacaagcaggagctgcgggaggtgctgaaggagcacgagtggatgtacacagaggccctggagagcctgaaggtgtttgctgaggaccaggacatgcagtatgtgtcccagagcgaggtgcccaacgggaaggaggtgagcagccgcagccagaactaccccaagaatgccaccaagaccaagctgaagcagaagttctccatgaaggcccagaatggcttcaacaagaagaggaagaagaatgtgttcaaccccaagagggtggtggaggacagtgaatatgacagcggcagtgatgtgggcagcagcctggatgaggactacagcagcggggaggaggtgatggaggatggctacaagggcaagatcctgcacttcctgcaggatgccagcatcggggagctgaccctcatcccccagtgcagccagaagaaggcccagaagatcacagagctgcggcccttcaacagctgggaggccctcttcaccaagatgagcaagaccaacggcctgtctgaagatctcatctggcactgcaagaccctcatccaggagagagatgtggtgatccggctgatgaacaagtgtgaggacatcagcaacaagctgaccaagcaggtgaccatgctgactggaaatggaggcggctggaacatcgagcagcccagcatcctgaaccagagcctgagcctgaagccctaccagaaggtgggcctgaactggctggccctggtgcacaagcacggcctgaatggcatcctggctgatgagatgggcctgggcaagaccatccaggccatcgccttcctggcctacctgtaccaggagggcaacaacggcccccacctgattgtggtgcctgccagcaccatcgacaactggctgcgggaggtgaacctgtggtgccccaccctgaaggtgctgtgctactacggcagccaggaggagaggaagcagatccgcttcaacatccacagccgctatgaggactacaacgtcatcgtgaccacctacaactgtgccatcagcagcagtgatgacaggagcctcttccggcggctgaagctgaactatgccatctttgatgagggccacatgctgaagaacatgggcagcatccgctaccagcacctgatgaccatcaatgccaacaaccggctgctgctgaccggcacccctgtgcagaacaacctgctggagctgatgagcctgctgaactttgtgatgccccacatgttcagcagcagcaccagcgagatccggaggatgttcagcagcaagaccaagtctgcagatgagcagagcatctatgagaaggagcgcatcgcccacgccaagcagatcatcaagcccttcatcctgcggcgggtgaaggaggaggtgctgaagcagctgccccccaagaaggaccgcatcgagctgtgtgccatgtctgagaagcaggagcagctgtacctgggcctcttcaaccggctgaagaagagcatcaacaacctggagaagaacacagagatgtgcaatgtgatgatgcagctgaggaagatggccaaccaccccctgctgcaccggcagtactacacagctgagaagctgaaggagatgagccagctgatgctgaaggagcccacccactgtgaggccaacccagacctgatctttgaggacatggaggtgatgacagactttgagctgcacgtgctgtgcaagcagtaccgccacatcaacaacttccagctggacatggacctgatcctggacagcggcaagttccgggtgctgggctgcatcctgtctgagctgaagcagaagggggacagagtggtgctcttcagccagttcaccatgatgctggacatcctggaggtgctgctgaagcaccaccagcaccgctacctgcggctggatggcaagacccagatcagcgagcgcatccacctgattgatgagttcaacacagacatggacatctttgtgttcctgctgagcaccaaggccggcggcctgggcatcaacctgaccagcgccaacgtggtgatcctgcatgacatcgactgcaacccctacaatgacaagcaggccgaggaccgctgccaccgggtgggccagaccaaggaggtgctggtgatcaagctgatcagccagggcaccatcgaggagagcatgctgaagatcaaccagcagaagctgaagctggagcaggacatgaccaccgtggatgaaggagatgagggctccatgcctgctgacatcgccaccctgctgaagacctccatgggcctgtag

SEQ ID NO: 172197 - DNA, 3087 bp, synthetic construct
  misc_feature 1..3087: note = Description of Artificial Sequence: Synthetic coding sequence
  source 1..3087: mol_type = other DNA
atgaacctcttcaacctggaccgcttccgctttgagaagaggaacaagattgaggaggcccctgaggccaccccccagcccagccagcccggccccagcagccccatcagcctgtctgctgaggaggagaatgctgagggggaggtgtcccgggccaacaccccagacagcgacatcacagagaagacagaggacagctctgtgcctgagaccccagacaatgaaaggaaggccagcatctcctacttcaagaaccagaggggcatccagtacatcgacctgagcagtgacagtgaagatgtggtgagccccaactgcagcaacacagtgcaggagaagaccttcaacaaggacaccgtcatcatcgtgtctgagcccagtgaagatgaggagagccagggcctgcccaccatggccaggagaaatgatgacatcagcgagctggaggacctgtctgagctggaggacctgaaggatgccaagctgcagaccctgaaggagctgttcccccagaggagtgacaatgacctgctgaagctgattgagagcaccagcaccatggatggagccatcgctgctgccctgctgatgtttggagatgctgggggcggccccaggaagaggaagctgagcagcagcagcgagccctatgaagaagatgagttcaatgatgaccagagcatcaagaagacccggctggaccatggagaggagagcaatgaatctgctgagagcagcagcaactgggagaagcaggagagcatcgtgctgaagctgcagaaggagttccccaactttgacaagcaggagctgcgggaggtgctgaaggagcacgagtggatgtacacagaggccctggagagcctgaaggtgtttgctgaggaccaggacatgcagtatgtgtcccagagcgaggtgcccaacgggaaggaggtgagcagccgcagccagaactaccccaagaatgccaccaagaccaagctgaagcagaagttctccatgaaggcccagaatggcttcaacaagaagaggaagaagaatgtgttcaaccccaagagggtggtggaggacagtgaatatgacagcggcagtgatgtgggcagcagcctggatgaggactacagcagcggggaggaggtgatggaggatggctacaagggcaagatcctgcacttcctgcaggatgccagcatcggggagctgaccctcatcccccagtgcagccagaagaaggcccagaagatcacagagctgcggcccttcaacagctgggaggccctcttcaccaagatgagcaagaccaacggcctgtctgaagatctcatctggcactgcaagaccctcatccaggagagagatgtggtgatccggctgatgaacaagtgtgaggacatcagcaacaagctgaccaagcaggtgaccatgctgactggaaatggaggcggctggaacatcgagcagcccagcatcctgaaccagagcctgagcctgaagccctaccagaaggtgggcctgaactggctggccctggtgcacaagcacggcctgaatggcatcctggctgatgagatgggcctgggcaagaccatccaggccatcgccttcctggcctacctgtaccaggagggcaacaacggcccccacctgattgtggtgcctgccagcaccatcgacaactggctgcgggaggtgaacctgtggtgccccaccctgaaggtgctgtgctactacggcagccaggaggagaggaagcagatccgcttcaacatccacagccgctatgaggactacaacgtcatcgtgaccacctacaactgtgccatcagcagcagtgatgacaggagcctcttccggcggctgaagctgaactatgccatctttgatgagggccacatgctgaagaacatgggcagcatccgctaccagcacctgatgaccatcaatgccaacaaccggctgctgctgaccggcacccctgtgcagaacaacctgctggagctgatgagcctgctgaactttgtgatgccccacatgttcagcagcagcaccagcgagatccggaggatgttcagcagcaagaccaagtctgcagatgagcagagcatctatgagaaggagcgcatcgcccacgccaagcagatcatcaagcccttcatcctgcggcgggtgaaggaggaggtgctgaagcagctgccccccaagaaggaccgcatcgagctgtgtgccatgtctgagaagcaggagcagctgtacctgggcctcttcaaccggctgaagaagagcatcaacaacctggtgacagagaagaacacagagatgtgcaatgtgatgatgcagctgaggaagatggccaaccaccccctgctgcaccggcagtactacacagctgagaagctgaaggagatgagccagctgatgctgaaggagcccacccactgtgaggccaacccagacctgatctttgaggacatggaggtgatgacagactttgagctgcacgtgctgtgcaagcagtaccgccacatcaacaacttccagctggacatggacctgatcctggacagcggcaagttccgggtgctgggctgcatcctgtctgagctgaagcagaagggggacagagtggtgctcttcagccagttcaccatgatgctggacatcctggaggtgctgctgaagcaccaccagcaccgctacctgcggctggatggcaagacccagatcagcgagcgcatccacctgattgatgagttcaacacagacatggacatctttgtgttcctgctgagcaccaaggccggcggcctgggcatcaacctgaccagcgccaacgtggtgatcctgcatgacatcgactgcaacccctacaatgacaagcaggccgaggaccgctgccaccgggtgggccagaccaaggaggtgctggtgatcaagctgatcagccagggcaccatcgaggagagcatgctgaagatcaaccagcagaagctgaagctggagcaggacatgaccaccgtggatgaaggagatgagggctccatgcctgctgacatcgccaccctgctgaagacctccatgggcctgtag

SEQ ID NO: 172198 - DNA, 3087 bp, synthetic construct; identical to SEQ ID NO: 172197
  misc_feature 1..3087: note = Description of Artificial Sequence: Synthetic coding sequence
  source 1..3087: mol_type = other DNA

SEQ ID NO: 172199 - DNA, 957 bp, synthetic construct
  misc_feature 1..957: note = Description of Artificial Sequence: Synthetic coding sequence
  source 1..957: mol_type = other DNA
atgaacctcttcaacctggaccgcttccgctttgagaagaggaacaagattgaggaggcccctgaggccaccccccagcccagccagcccggccccagcagccccatcagcctgtctgctgaggaggagaatgctgagggggaggtgtcccgggccaacaccccagacagcgacatcacagagaagacagaggacagctctgtgcctgagaccccagacaatgaaaggaaggccagcatctcctacttcaagaaccagaggggcatccagtacatcgacctgagcagtgacagtgaagatgtggtgagccccaactgcagcaacacagtgcaggagaagaccttcaacaaggacaccgtcatcatcgtgtctgagcccagtgaagatgaggagagccagggcctgcccaccatggccaggagaaatgatgacatcagcgagctggaggacctgtctgagctggaggacctgaaggatgccaagctgcagaccctgaaggagctgttcccccagaggagtgacaatgacctgctgaagctgattgagagcaccagcaccatggatggagccatcgctgctgccctgctgatgtttggagatgctgggggcggccccaggaagaggaagctgagcagcagcagcgagccctatgaagaagatgagttcaatgatgaccagagcatcaagaagacccggctggaccatggagaggagagcaatgaatctgctgagagcagcagcaactgggagaagcaggagagcatcgtgctgaagctgcagaaggagttccccaactttgacaagcaggagctgcgggaggtgctgaaggagcacgagtggatgtacacagaggccctggagagcctgaaggtgtttgctgaggaccaggacatgcagtatgtgtcccagagcgaggtgcccaacgggaagaagaaggcccagaagaagaagaagtag

SEQ ID NO: 172200 - DNA, 732 bp, synthetic construct
  misc_feature 1..732: note = Description of Artificial Sequence: Synthetic coding sequence
  source 1..732: mol_type = other DNA
atggccgccatcgccgccagcgaggtgctggtggacagcgctgaggagggcagcctggccgctgctgctgagctggccgcccagaagcgggagcagaggctgaggaagttccgggagctgcacctgatgagaaatgaggccaggaagctgaaccaccaggaggtggtggaggaggacaagaggctgaagctgcctgccaactgggaggccaagaaggcccggctggagtgggagctgaaggaggaggagaagaagaaggaatgtgccgcccggggagaagattatgagaaggtgaagctgctggagatctctgcagaagatgctgagcgctgggagaggaagaagaagaggaagaacccagacctgggcttcagtgactatgctgctgcccagctgcggcagtaccaccggctgaccaagcagatcaagccagacatggagacctatgagcggctgcgggagaagcacggggaggagttcttccccaccagcaacagcctgctgcacggcacccacgtgcccagcacagaggagattgacaggatggtgattgacctggagaagcagatcgagaagagggacaagtacagcagaagaagaccctacaatgatgatgctgacatcgactacatcaatgaaagaaatgccaagttcaacaagaaggccgagcgcttctacggcaagtacacagctgagatcaagcagaacctggagcggggcacagctgtgtag

SEQ ID NO: 172201 - DNA, 606 bp, synthetic construct
  misc_feature 1..606: note = Description of Artificial Sequence: Synthetic coding sequence
  source 1..606: mol_type = other DNA
atggccgccatcgccgccagcgaggtgctggtggacagcgctgaggagggcagcctggccgctgctgctgagctggccgcccagaagcgggagcagaggctgaggaagttccgggagctgcacctgatgagagaatgtgccgcccggggagaagattatgagaaggtgaagctgctggagatctctgcagaagatgctgagcgctgggagaggaagaagaagaggaagaacccagacctgggcttcagtgactatgctgctgcccagctgcggcagtaccaccggctgaccaagcagatcaagccagacatggagacctatgagcggctgcgggagaagcacggggaggagttcttccccaccagcaacagcctgctgcacggcacccacgtgcccagcacagaggagattgacaggatggtgattgacctggagaagcagatcgagaagagggacaagtacagcagaagaagaccctacaatgatgatgctgacatcgactacatcaatgaaagaaatgccaagttcaacaagaaggccgagcgcttctacggcaagtacacagctgagatcaagcagaacctggagcggggcacagctgtgtag

SEQ ID NO: 172202 - DNA, 777 bp, synthetic construct
  misc_feature 1..777: note = Description of Artificial Sequence: Synthetic coding sequence
  source 1..777: mol_type = other DNA
atggatggcatcatcgagcagaagtccatgctggtgcacagcaagatcagtgatgctgggaagagaaatggcctcatcaacaccaggaacctgatggccgagagcagagatggcctggtgtctgtgtacccagccccccagtaccagagccaccgggtgggcgccagcacagtgcctgccagcctggacagcagccgctctgagcccatgcagcagctgctggaccccaacaccctgcagcagagcgtggagagccgctaccggcccaacatcatcctgtacagcgagggcgtgctgcgctcctggggagatggagtggccgctgactgctgtgagaccaccttcattgaagatagaagccccaccaaggacagcctggagtacccagatggcaagttcatcgacctgtctgcagatgacatcaagatccacaccctgtcctatgatgtggaggaggaggaggagttccaggagctggagagtgactacagcagtgacacagaaagtgaggacaacttcctgatgatgccaccccgggaccacctgggcctgtctgtgttctccatgctgtgctgcttctggcccctgggcattgctgccttctacctgagccatgagaccaacaaggctgtggccaagggggacctgcaccaggccagcaccagcagccggcgggccctcttcctggccgtgctgagcatcaccatcggcaccggggtgtatgtgggcgtggccgtggccctgattgcctacctgagcaagaacaaccacctgtag

SEQ ID NO: 172203 - DNA, 717 bp, synthetic construct
  misc_feature 1..717: note = Description of Artificial Sequence: Synthetic coding sequence
  source 1..717: mol_type = other DNA
atggagagcctgtctgagctgcagaaccccctgctgcccaggagccctgcccacctgcacggcccctacccctacccagagaccccacccagctggagctgccaggagaagctgtacagctacctgctgggcggggccggccctgctggggcccaccagctgctggaccccggcagcctgcagctggccgtggaggcctggtaccggcccagctgcctgctgggccgggacaaggtgaaggagccccgggccggcagctgtgagaccagcttcacagaagatcgggagccccaggagggccccccagagcagcccaccggccctggccaggccgcagaaaatgtgaccatccagacagtgtcctatggagtgcaggaggagctgcgggaccaggaggatgaccaggaggaggaggagagtgatgccaccagcacagaaagtgaaagtgaggacaacttcctgaccctgcccccccgggaccacctgggcctgaccctcttctccatgctgtgctgcttctggcccctgggcattgctgccttctacttcagccagggcaccagcaaggccatcagcaaaggagacttccggctggccagcaccaccagccggcgggccctcttcctggccaccctggccatcgctgtgggcgccggcctgtatgtggccgtggtggtggccctggccgcctacatgagccagaatggacatggatag

SEQ ID NO: 172204 - DNA, 717 bp, synthetic construct; identical to SEQ ID NO: 172203
  misc_feature 1..717: note = Description of Artificial Sequence: Synthetic coding sequence
  source 1..717: mol_type = other DNA

SEQ ID NO: 172205 - DNA, 243 bp, synthetic construct
  misc_feature 1..243: note = Description of Artificial Sequence: Synthetic coding sequence
  source 1..243: mol_type = other DNA
atggagagcctgtctgagctgcagaaccccctgctgcccaggagccctgcccacctgcacggcccctacccctacccagagaccccacccagctggagctgccaggagaagctgtacagctacctgctgggcggggccggccctgctggggcccaccagctgctggaccccggcagcctgcagctggccgtggaggcctggtaccggcccagctgcctgctgggccgggacaaggtgaagtag

SEQ ID NO: 172206 - DNA, 2118 bp, synthetic construct
  misc_feature 1..2118: note = Description of Artificial Sequence: Synthetic coding sequence
  source 1..2118: mol_type = other DNA
atgaactacctgcggcggcggctgagtgacagcaacttcatggccaacctgcccaacggctacatgacagacctgcagaggccccagcccccacctcctcctcctggggcccacagccctggggccaccccaggccctggaacagccacagctgagaggagcagtggagtggccccagctgccagccctgctgcccccagccctggcagcagcggcggcggcggcttcttcagcagcctgagcaatgctgtgaagcagaccacagctgctgctgctgccaccttcagcgagcaggtgggcggcggcagcggcggggccggccggggcggggccgccagccgggtgctgctggtgattgatgagccccacacagactgggccaagtacttcaagggcaagaagatccacggggagattgacatcaaggtggagcaggccgagttcagtgacctgaacctggtggcccacgccaacggcggcttctctgtggacatggaggtgctgagaaatggagtgaaggtggtgcgcagcctgaagccagactttgtgctgatccggcagcacgccttctccatggccagaaatggagactaccgcagcctggtgattggcctgcagtatgccggcatccccagcgtgaacagcctgcacagcgtgtacaacttctgtgacaagccctgggtgtttgcccagatggtgcggctgcacaagaagctgggcacagaggagttccccctgattgaccagaccttctaccccaaccacaaggagatgctgagcagcaccacctaccctgtggtggtgaagatgggccacgcccacagcggcatgggcaaggtgaaggtggacaaccagcacgacttccaggacatcgcctctgtggtggccctgaccaagacctacgccacagctgagcccttcattgatgccaagtatgatgtgcgggtgcagaagattggccagaactacaaggcctacatgaggacctctgtgtctggcaactggaagaccaacacaggcagcgccatgctggagcagatcgccatgtctgaccgctacaagctgtgggtggacacctgcagcgagatctttggaggcctggacatctgtgctgtggaggccctgcacggcaaggatggccgggaccacatcatcgaggtggtgggcagctccatgcccctgattggagaccaccaggatgaggacaagcagctgattgtggagctggtggtgaacaagatggcccaggccctgccccggcagaggcagagagatgccagccctggccggggcagccacggccagacccccagccctggggccctgcccctgggccggcagaccagccagcagcctgctggccccccagcccagcagaggcccccaccccagggcggccccccccagcccggccctggcccccagaggcagggcccccccctgcagcagaggcccccaccccagggccagcagcacctgagcggcctgggccccccagctggcagccccctgccccagaggctgcccagccccaccagcgccccccagcagcctgccagccaggccgccccacccacccagggccagggccggcagagcaggcctgtggccggcggccctggggcccctcctgctgcccggcccccagccagccccagcccccagaggcaggccggccccccccaggccacccggcagacctctgtgtctggccctgccccacccaaggccagcggggcccctcctgggggccagcagaggcagggccccccccagaagcccccaggccctgctggccccacccggcaggccagccaggccggccctgtgcccaggactggaccacccaccacccagcagccccggcccagcggccctggccctgctggccggcccaagccccagctggcccagaagcccagccaggatgtgcccccaccagccacagctgctgctgggggccccccccacccccagctgaacaagagccagagcctgaccaatgccttcaacctgcctgagcccgccccaccccggcccagcctgagccaggatgaggtgaaggccgagaccatccgcagcctgaggaagagctttgccagcctcttcagtgactag

SEQ ID NO: 172207 - DNA, 2010 bp, synthetic construct
  misc_feature 1..2010: note = Description of Artificial Sequence: Synthetic coding sequence
  source 1..2010: mol_type = other DNA
atgaactacctgcggcggcggctgagtgacagcaacttcatggccaacctgcccaacggctacatgacagacctgcagaggccccagcccccacctcctcctcctggggcccacagccctggggccaccccaggccctggaacagccacagctgagaggagcagtggagtggccccagctgccagccctgctgcccccagccctggcagcagcggcggcggcggcttcttcagcagcctgagcaatgctgtgaagcagaccacagctgctgctgctgccaccttcagcgagcaggtgggcggcggcagcggcggggccggccggggcggggccgccagccgggtgctgctggtgattgatgagccccacacagactgggccaagtacttcaagggcaagaagatccacggggagattgacatcaaggtggagcaggccgagttcagtgacctgaacctggtggcccacgccaacggcggcttctctgtggacatggaggtgctgagaaatggagtgaaggtggtgcgcagcctgaagccagactttgtgctgatccggcagcacgccttctccatggccagaaatggagactaccgcagcctggtgattggcctgcagtatgccggcatccccagcgtgaacagcctgcacagcgtgtacaacttctgtgacaagccctgggtgtttgcccagatggtgcggctgcacaagaagctgggcacagaggagttccccctgattgaccagaccttctaccccaaccacaaggagatgctgagcagcaccacctaccctgtggtggtgaagatgggccacgcccacagcggcatgggcaaggtgaaggtggacaaccagcacgacttccaggacatcgcctctgtggtggccctgaccaagacctacgccacagctgagcccttcattgatgccaagtatgatgtgcgggtgcagaagattggccagaactacaaggcctacatgaggacctctgtgtctggcaactggaagaccaacacaggcagcgccatgctggagcagatcgccatgtctgaccgctacaagctgtgggtggacacctgcagcgagatctttggaggcctggacatctgtgctgtggaggccctgcacggcaaggatggccgggaccacatcatcgaggtggtgggcagctccatgcccctgattggagaccaccaggatgaggacaagcagctgattgtggagctggtggtgaacaagatggcccaggccctgccccggcagaggcagagagatgccagccctggccggggcagccacggccagacccccagccctggggccctgcccctgggccggcagaccagccagcagcctgctggccccccagcccagcagaggcccccaccccagggcggccccccccagcccggccctggcccccagaggcagggcccccccctgcagcagaggcccccaccccagggccagcagcacctgagcggcctgggccccccagctggcagccccctgccccagaggctgcccagccccaccagcgccccccagcagcctgccagccaggccgccccacccacccagggccagggccggcagagcaggcctgtggccggcggccctggggcccctcctgctgcccggcccccagccagccccagcccccagaggcaggccggccccccccaggccacccggcagacctctgtgtctggccctgccccacccaaggccagcggggcccctcctgggggccagcagaggcagggccccccccagaagcccccaggccctgctggccccacccggcaggccagccaggccggccctgtgcccaggactggaccacccaccacccagcagccccggcccagcggccctggccctgctggccggcccaagccccagctggcccagaagcccagccaggatgtgcccccaccagccacagctgctgctgggggccccccccacccccagctgaaggccagccctgcccaggcccagccctag

SEQ ID NO: 172208 - DNA, 1743 bp, synthetic construct
  misc_feature 1..1743: note = Description of Artificial Sequence: Synthetic coding sequence
  source 1..1743: mol_type = other DNA
atgaacttcctgcggcggcggctgagtgacagcagcttcatggccaacctgcccaacggctacatgacagacctgcagaggccagacagcagcaccagcagccctgccagccctgccatggagcggcggcacccccagcccctggccgccagcttcagcagccctggcagcagcctcttcagcagcctgagcagcgccatgaagcaggccccccaggccaccagcggcctgatggagcccccaggccccagcacccccatcgtgcagaggccccgcatcctgctggtgattgatgatgcccacacagactggagcaagtacttccacggcaagaaggtgaatggagaaattgagatccgggtggagcaggccgagttcagcgagctgaacctggccgcctacgtgactggaggctgcatggtggacatgcaggtggtgagaaatggcaccaaggtggtgagccgctccttcaagccagacttcatcctggtgcggcagcacgcctacagcatggccctgggggaggactaccgcagcctggtgattggcctgcagtatggaggcctgcctgctgtgaacagcctgtacagcgtgtacaacttctgcagcaagccctgggtgttcagccagctgatcaagatcttccacagcctgggccctgagaagttccccctggtggagcagaccttcttccccaaccacaagcccatggtgacagccccccacttccctgtggtggtgaagctgggccacgcccacgccggcatgggcaagatcaaggtggagaaccagctggacttccaggacatcacctctgtggtggccatggccaagacctacgccaccacagaggccttcatcgacagcaaatatgacatccgcatccagaagattggcagcaactacaaggcctacatgaggaccagcatcagcggcaactggaaggccaacacaggcagcgccatgctggagcaggtggccatgacagagcgctaccgcctgtgggtggacagctgcagcgagatgtttggaggcctggacatctgtgctgtgaaggctgtgcacagcaaggatggccgggactacatcatcgaggtgatggacagctccatgcccctcatcggggagcacgtggaggaggaccggcagctgatggctgacctggtggtgtccaagatgagccagctgcccatgcctgggggcacagcccccagccccctgcggccctgggccccccagatcaagagcgccaagagccctggccaggcccagctgggcccccagctgggccagccccagccccggcccccaccccagggcggcccccggcaggcccagagcccccagccccagaggagcggcagccccagccagcagaggctgagcccccagggccagcagcccctgagcccccagagcggcagcccccagcagcagaggagccctggcagcccccagctgagccgggccagcagcggcagcagccccaaccaggccagcaagccaggggccaccctggccagccagccccggccccctgtgcagggccgcagcaccagccagcagggcgaggagagcaagaagccagccccaccccacccccacctgaacaagagccagagcctgaccaacagcctgagcaccagtgacaccagccagaggggcacccccagtgaagatgaggccaaggccgagaccatccggaacctgaggaagagctttgccagcctcttcagtgactag

SEQ ID NO: 172209 - DNA, 1743 bp, synthetic construct; identical to SEQ ID NO: 172208
  misc_feature 1..1743: note = Description of Artificial Sequence: Synthetic coding sequence
  source 1..1743: mol_type = other DNA

SEQ ID NO: 172210 - DNA, 1335 bp, synthetic construct
  misc_feature 1..1335: note = Description of Artificial Sequence: Synthetic coding sequence
  source 1..1335: mol_type = other DNA
atgaacttcctgcggcggcggctgagtgacagcagcttcatggccaacctgcccaacggctacatgacagacctgcagaggccagacagcagcaccagcagccctgccagccctgccatggagcggcggcacccccagcccctggccgccagcttcagcagccctggcagcagcctcttcagcagcctgagcagcgccatgaagcaggccccccaggccaccagcggcctgatggagcccccaggccccagcacccccatcgtgcagaggccccgcatcctgctggtgattgatgatgcccacacagactggagcaagtacttccacggcaagaaggtgaatggagaaattgagatccgggtggagcaggccgagttcagcgagctgaacctggccgcctacgtgactggaggctgcatggtggacatgcaggtggtgagaaatggcaccaaggtggtgagccgctccttcaagccagacttcatcctggtgcggcagcacgcctacagcatggccctgggggaggactaccgcagcctggtgattggcctgcagtatggaggcctgcctgctgtgaacagcctgtacagcgtgtacaacttctgcagcaagccctgggtgttcagccagctgatcaagatcttccacagcctgggccctgagaagttccccctggtggagcagaccttcttccccaaccacaagcccatggtgacagccccccacttccctgtggtggtgaagctgggccacgcccacgccggcatgggcaagatcaaggtggagaaccagctggacttccaggacatcacctctgtggtggccatggccaagacctacgccaccacagaggccttcatcgacagcaaatatgacatccgcatccagaagattggcagcaactacaaggcctacatgaggaccagcatcagcggcaactggaaggccaacacaggcagcgccatgctggagcaggtggccatgacagagcgctaccgcctgtgggtggacagctgcagcgagatgtttggaggcctggacatctgtgctgtgaaggctgtgcacagcaaggatggccgggactacatcatcgaggtgatggacagctccatgcccctcatcggggagcacgtggaggaggaccggcagctgatggctgacctggtggtgtccaagatgagccagctgcccatgcctgggggcacagcccccagccccctgcggccctgggccccccagatcaagagcgccaagagccctggccaggcccagctgggcccccagctgggccagccccagccccggcccccaccccaggtgtccttcagcccctag

SEQ ID NO: 172211 - DNA, 342 bp, synthetic construct
  misc_feature 1..342: note = Description of Artificial Sequence: Synthetic coding sequence
  source 1..342: mol_type = other DNA
atgaacttcctgcggcggcggctgagtgacagcagcttcatggccaacctgcccaacggctacatgacagacctgcagaggccagacagcagcaccagcagccctgccagccctgccatggagcggcggcacccccagcccctggccgccagcttcagcagccctggcagcagcctcttcagcagcctgagcagcgccatgaagcaggccccccaggccaccagcggcctgatggagcccccaggccccagcacccccatcgtgcagaggccccgcatcctgctggtgattgatgatgcccacacagactggagcaagtacttccacggcaagaaggtgtag

SEQ ID NO: 172212 - DNA, 372 bp, synthetic construct
  misc_feature 1..372: note = Description of Artificial Sequence: Synthetic coding sequence
  source 1..372: mol_type = other DNA
atgaacttcctgcggcggcggctgagtgacagcagcttcatggccaacctgcccaacggctacatgacagacctgcagaggccagacagcagcaccagcagccctgccagccctgccatggagcggcggcacccccagcccctggccgccagcttcagcagccctggcagcagcctcttcagcagcctgagcagcgccatgaagcaggccccccaggccaccagcggcctgatggagcccccaggccccagcacccccatcgtgcagaggccccgcatcctgctggtgattgatgatgcccacacagactggagcaagtacttccacggcaagaaggtgaatggagaaattgagatccgggtggagcagtag

SEQ ID NO: 172213 - DNA, 561 bp, synthetic construct
  misc_feature 1..561: note = Description of Artificial Sequence: Synthetic coding sequence
  source 1..561: mol_type = other DNA
atggacagctccatgcccctcatcggggagcacgtggaggaggaccggcagctgatggctgacctggtggtgtccaagatgagccagctgcccatgcctgggggcacagcccccagccccctgcggccctgggccccccagatcaagagcgccaagagccctggccaggcccagctgggcccccagctgggccagccccagccccggcccccaccccagggcggcccccggcaggcccagagcccccagcagcagaggagccctggcagcccccagctgagccgggccagcagcggcagcagccccaaccaggccagcaagccaggggccaccctggccagccagccccggccccctgtgcagggccgcagcaccagccagcagggcgaggagagcaagaagccagccccaccccacccccacctgaacaagagccagagcctgaccaacagcctgagcaccagtgacaccagccagaggggcacccccagtgaagatgaggccaaggccgagaccatccggaacctgaggaagagctttgccagcctcttcagtgactag

SEQ ID NO: 172214 - DNA, 1212 bp, synthetic construct
  misc_feature 1..1212: note = Description of Artificial Sequence: Synthetic coding sequence
  source 1..1212: mol_type = other DNA
atgagccacaggaagttcagcgcccccaggcatggcagcctgggcttcctgcccaggaagaggagcagccgccaccggggcaaggtgaagagcttccccaaggatgaccccagcaagcctgtgcacctgacagccttcctgggctacaaggccggcatgacccacatcgtgcgggaggtggacaggcctggcagcaaggtgaacaagaaggaggtggtggaggccgtgaccatcgtggagaccccacccatggtggtggtgggcatcgtgggctacgtggagaccccccggggcctgcggaccttcaagacagtgtttgctgagcacatcagtgatgagtgcaagaggcgcttctacaagaactggcacaagagcaagaagaaggccttcaccaagtactgcaagaagtggcaggatgaagatggcaagaagcagctggagaaggacttcagctccatgaagaagtactgccaggtgatccgggtgattgcccacacccagatgaggctgctgcccctgcggcagaagaaggcccacctgatggagatccaggtgaatggaggcaccgtggccgagaagctggactgggcccgggagcggctggagcagcaggtgcctgtgaaccaggtgtttggccaggatgagatgattgatgtgattggagtgaccaagggcaagggctacaagggcgtgaccagccgctggcacaccaagaagctgcccaggaagacccaccggggcctgaggaaggtggcctgcatcggggcctggcacccagcccgggtggccttctctgtggcccgggccggccagaagggctaccaccacaggacagagatcaacaagaagatctacaagattggccagggctacctgatcaaggatggcaagctgatcaagaacaatgccagcacagattatgacctgagtgacaagagcatcaaccccctgggcggctttgtgcactatggagaggtgaccaatgactttgtgatgctgaagggctgtgtggtgggcaccaagaagagggtgctgaccctgaggaagagcctgctggtgcagaccaagagaagagccctggagaagattgacctgaagttcatcgacaccaccagcaagtttggccacggccgcttccagaccatggaggagaagaaggccttcatgggccccctgaagaaggacagaattgccaaggaggagggcgcctag

SEQ ID NO: 172215 - DNA, 576 bp, synthetic construct
  misc_feature 1..576: note = Description of Artificial Sequence: Synthetic coding sequence
  source 1..576: mol_type = other DNA
atggagggcggggcctacggggccggcaaggccggcggggcctttgacccctacaccctggtgcggcagccccacaccatcctgcgggtggtgtcctggctgttcagcatcgtggtgtttggcagcatcgtgaatgaaggctacctgaacagcgccagcgagggggaggagttctgcatctacaacagaaaccccaatgcctgcagctatggagtggccgtgggcgtgctggccttcctgacctgcctgctgtacctggccctggatgtgtacttcccccagatcagctctgtgaaggacaggaagaaggctgtgctgagtgacattggagtgtctgccttctgggccttcctgtggtttgtgggcttctgctacctggccaaccagtggcaggtgtccaagcccaaggacaaccccctgaatgaaggaacagatgctgcccgggccgccatcgccttctccttcttcagcatcttcacctggagcctgacagctgccctggccgtgcggcgcttcaaggacctgtccttccaggaggagtacagcaccctcttccctgccagcgcccagccctag

SEQ ID NO: 172216 - DNA, 702 bp, synthetic construct
  misc_feature 1..702: note = Description of Artificial Sequence: Synthetic coding sequence
  source 1..702: mol_type = other DNA
atggagggcggggcctacggggccggcaaggccggcggggcctttgacccctacaccctggtgcggcagccccacaccatcctgcgggtggtgtcctggctgttcagcatcgtggtgtttggcagcatcgtgaatgaaggctacctgaacagcgccagcgagggggaggagttctgcatctacaacagaaaccccaatgcctgcagctatggagtggccgtgggcgtgctggccttcctgacctgcctgctgtacctggccctggatgtgtacttcccccagatcagctctgtgaaggacaggaagaaggctgtgctgagtgacattggagtgtctgccttctgggccttcctgtggtttgtgggcttctgctacctggccaaccagtggcaggtgtccaagcccaaggacaaccccctgaatgaaggaacagatgctgcccgggccgccatcgccttctccttcttcagcatcttcacctgggccggccaggccgtgctggccttccagcgctaccagatcggggctgacagcgccctcttcagccaggactacatggaccccagccaggacagctccatgccctatgccccctacgtggagcccactggaccagaccctgctggcatgggcggcacctaccagcagcctgccaacacctttgacacagagccccagggctaccagagccagggctactag

SEQ ID NO: 172217 - DNA, 579 bp, synthetic construct
  misc_feature 1..579: note = Description of Artificial Sequence: Synthetic coding sequence
  source 1..579: mol_type = other DNA
atgctgaccctggagtttggcatcctggagtttgaccccagctggattggctcctggacccagaggtcctgggtgtcctggaggagcaggcctggctgtgagctgttcagcatcgtggtgtttggcagcatcgtgaatgaaggctacctgaacagcgccagcgagggggaggagttctgcatctacaacagaaaccccaatgcctgcagctatggagtggccgtgggcgtgctggccttcctgacctgcctgctgtacctggccctggatgtgtacttcccccagatcagctctgtgaaggacaggaagaaggctgtgctgagtgacatcggcgtgtctgccttctgggccttcctgtggtttgtgggcttctgctacctggccaaccagtggcaggtgtccaagcccaaggacaaccccctgaatgaaggaacagatgctgcccgggccgccatcgccttctccttcttcagcatcttcacctggagcctgacagctgccctggccgtgcggcgcttcaaggacctgtccttccaggaggagtacagcaccctcttccctgccagcgcccagccctag

SEQ ID NO: 172218 - DNA, 510 bp, synthetic construct
  misc_feature 1..510: note = Description of Artificial Sequence: Synthetic coding sequence
  source 1..510: mol_type = other DNA
atggagggcggggcctacggggccggcaaggccggcggggcctttgacccctacaccctggtgcggcagccccacaccatcctgcgggtggtgtcctggctgttcagcatcgtggtgtttggcagcatcgtgaatgaaggctacctgaacagcgccagcgagggggaggagttctgcatctacaacagaaaccccaatgcctgcagctatggagtggccgtgggcgtgctggccttcctgacctgcctgctgtacctggccctggatgtgtacttcccccagatcagctctgtgaaggacaggaagaaggctgtgctgagtgacattggagtgtctgccttctgggccttcctgtggtttgtgggcttctgctacctggccaaccagtggcaggtgtccaagcccaaggacaaccccctgaatgaaggaacagatgctgcccgggccgccatcgccttctccttcttcagcatcttcacctggaggtctggggccaccagccccccatag

SEQ ID NO: 172219 - DNA, 297 bp, synthetic construct
  misc_feature 1..297: note = Description of Artificial Sequence: Synthetic coding sequence
  source 1..297: mol_type = other DNA
atggccagcggggccggcggctcctggggccgcagccccccccagagcgctgtgcccaccccctgggtgaccttcctgcagcccctgtcctgggccgtgcccccagccccaccccagcccggccgggtgaaggaggacctgctggagctgatgatgctgcagaatgcccagatgcaccagctgctgctgagccggctggtggccggggccctgcagcccaggcctgccagcccctgcccccaggagagctgtgcccccacccccaccccccagtgccaccgggactgtggctgctag

SEQ ID NO: 172220 - DNA, 690 bp, synthetic construct
  misc_feature 1..690: note = Description of Artificial Sequence: Synthetic coding sequence
  source 1..690: mol_type = other DNA
atggagggcgccagctttggagctggccgggccggggccgccctggaccctgtgtcctttgcccggcggccccagaccctgctgcgggtggcctcctgggtgttcagcattgctgtgtttggccccatcgtgaatgaaggctacgtgaacacagattctggccctgagctgcgctgtgtgttcaatggaaatgctggggcctgccgcttcggcgtggccctgggcctgggcgccttcctggcctgtgccgccttcctgctgctggatgtgcgcttccagcagatcagctctgtgcgggacagaagaagagctgtgctgctggacctgggcttcagcggcctgtggagcttcctgtggtttgtgggcttctgcttcctgaccaaccagtggcagaggacagcccctggccctgccaccacccaggccggagatgctgcccgggccgccatcgccttctccttcttcagcatcctgtcctgggtggccctgactgtgaaggccctgcagcgcttccggctgggcacagacatgagcctgtttgccacagagcagctgagcactggagccagccaggcctacccaggctaccctgtgggcagcggcgtggagggcacagagacctaccagagcccccccttcacagagaccctggacaccagccccaagggctaccaggtgcctgcctactag

SEQ ID NO: 172221 - DNA, 438 bp, synthetic construct
  misc_feature 1..438: note = Description of Artificial Sequence: Synthetic coding sequence
  source 1..438: mol_type = other DNA
atggagggcgccagctttggagctggccgggccggggccgccctggaccctgtgtcctttgcccggcggccccagaccctgctgcgggtggcctcctgggtgttcagcattgctgtgtttggccccatcgtgaatgaaggctacgtgaacacagattctggccctgagctgcgctgtgtgttcaatggaaatgctggggcctgccgcttcggcgtggccctgggcctgggcgccttcctggcctgtgccgccttcctgctgctggatgtgcgcttccagcagagcggcggccggggcaagaccccacccagcccccaggactggggctcctggcccctcttccccagccacgtgcctgtgggcagtgactgcctggtgtctgtgatggtggtgcggcctgtgcgcagccacagccccctgagcctgaccggctgctag

SEQ ID NO: 172222 - DNA, 705 bp, synthetic construct
  misc_feature 1..705: note = Description of Artificial Sequence: Synthetic coding sequence
  source 1..705: mol_type = other DNA
atgcacatccccaagagcctgcaggagctggccaacagcgaggccgtgcagttcctgcggcggcccaagaccatcaccagggtgtttgaaggagtcttcagcctcatcgtgttcagcagcctgctgacagatggctaccagaacaagatggagagcccccagctgcactgcatcctgaacagcaacagcgtggcctgcagctttgctgtgggcgccggcttcctggccttcctgagctgcctggccttcctggtgctggacacccaggagaccagaattgctggcacccgcttcaagacagccttccagctgctggacttcatcctggccgtgctgtgggccgtggtgtggttcatgggcttctgcttcctggccaaccagtggcagcacagcccccccaaggagttcctgctgggcagcagcagcgcccaggccgccatcgccttcaccttcttcagcatcctggtgtggatcttccaggcctacctggccttccaggacctgagaaatgatgcccctgtgccctacaagcgcttcctggatgaaggaggcatggtgctgaccaccctgcccctgcccagcgccaacagccctgtgaacatgcccaccaccggccccaacagcctgtcctatgccagcagcgccctgagcccctgcctgacagcccccaagagcccccggctggccatgatgccagacaactag

SEQ ID NO: 172223 - DNA, 4722 bp, synthetic construct
  misc_feature 1..4722: note = Description of Artificial Sequence: Synthetic coding sequence
  source 1..4722: mol_type = other DNA
atggccttcagcaagggcttccgcatctaccacaagctggaccccccacccttcagcctgattgtggagaccaggcacaaggaggagtgcctgatgtttgaaagtggagctgtggccgtgctgagcagcgctgagaaggaggccatcaagggcacctacagcaaggtgctggatgcctacggcctgctgggcgtgctgcggctgaacctgggggacaccatgctgcactacctggtgctggtgacaggctgcatgtctgtgggcaagatccaggagagcgaggtgttccgggtgaccagcacagagttcatcagcctgagaattgacagcagtgatgaagatcgcatcagcgaggtgaggaaggtgctgaacagcggcaacttctactttgcctggagcgccagcggcatcagcctggacctgagcctgaatgcccaccgctccatgcaggagcagaccacagacaaccgcttcttctggaaccagagcctgcacctgcacctgaagcactatggagtgaactgtgatgactggctgctgcggctgatgtgtggcggcgtggagatccgcaccatctatgctgcccacaagcaggccaaggcctgcctgatcagccggctgagctgtgagcgggccggcacccgcttcaacgtgcggggcaccaatgatgatggccacgtggccaactttgtggagacagagcaggtggtgtacctggatgacagcgtgtcctccttcatccagatccggggctctgtgcccctcttctgggagcagcccggcctgcaggtgggcagccaccgggtgaggatgagccggggctttgaggccaatgccccagcctttgacagacacttccgcaccctgaagaacctgtatggcaagcagatcatcgtgaacctgctgggcagcaaggagggggagcacatgctgagcaaggccttccagagccacctgaaggccagcgagcacgccgctgacatccagatggtgaactttgactaccaccagatggtgaagggcggcaaggccgagaagctgcacagcgtgctgaagccccaggtgcagaagttcctggactatggcttcttctacttcaatggaagtgaggtgcagcgctgccagagcggcaccgtgaggaccaactgcctggactgcctggacaggaccaacagcgtgcaggccttcctgggcctggagatgctggccaagcagctggaggccctgggcctggccgagaagccccagctggtgacccgcttccaggaggtgttccgctccatgtggagcgtgaatggagacagcatcagcaagatctatgccggcactggagccctggagggcaaggccaagctgaaggatggagcccggtctgtgaccaggaccatccagaacaacttctttgacagcagcaagcaggaggccattgatgtgctgctgctgggcaacaccctgaacagcgacctggccgacaaggcccgggccctgctgaccaccggcagcctgcgggtgtctgagcagaccctgcagagcgccagcagcaaggtgctgaagtccatgtgtgagaacttctacaagtacagcaagcccaagaagatccgggtgtgtgtgggcacctggaatgtgaatggaggcaagcagttccgcagcatcgccttcaagaaccagaccctgacagactggctgctggatgcccccaagctggccggcatccaggagttccaggacaagaggagcaagcccacagacatctttgccatcggctttgaggagatggtggagctgaatgccggcaacatcgtgtctgccagcaccaccaaccagaagctgtgggccgtggagctgcagaagaccatcagccgggacaacaagtatgtgctgctggccagcgagcagctggtgggcgtgtgcctgtttgtgttcatccggccccagcacgcccccttcatcagagatgtggccgtggacacagtgaagacaggcatgggcggggccaccggcaacaagggagctgtggccatccgcatgctgttccacaccaccagcctgtgctttgtgtgcagccactttgctgctggccagagccaggtgaaggagagaaatgaagacttcattgaaattgccaggaagctgtccttccccatgggccgcatgctgttcagccatgactatgtgttctggtgtggggacttcaactacagaattgacctgcccaatgaggaggtgaaggagctgatccggcagcagaactgggacagcctgattgctggggaccagctgatcaaccagaagaatgccggccaggtgttccggggcttcctggagggcaaggtgacctttgcccccacctacaagtatgacctcttcagtgatgattatgacaccagcgagaagtgcaggaccccagcctggacagacagagtgctgtggaggaggaggaagtggccctttgacagatctgctgaggacctggacctgctgaatgccagcttccaggatgagagcaagatcctgtacacctggaccccaggcaccctgctgcactacggccgggcagagctgaagaccagtgaccacaggcctgtggtggccctgattgacatcgacatctttgaggtggaggccgaggagcggcagaacatctacaaggaggtgattgctgtgcagggccccccagatggcaccgtgctggtgtccatcaagagcagcctgcctgagaacaacttctttgatgatgccctgattgatgagctgctgcagcagtttgccagctttggagaggtgatcctgatccgctttgtggaggacaagatgtgggtgaccttcctggagggcagcagcgccctgaatgtgctgagcctgaatggcaaggagctgctgaacagaaccatcaccatcgccctgaagagcccagactggatcaagaacctggaggaggagatgagcctggagaagatcagcatcgccctgcccagcagcaccagcagcaccctgctgggagaagatgctgaggtggccgctgactttgacatggagggagatgtggatgactacagcgctgaggtggaggagctgctgccccagcacctgcagcccagcagcagcagcggcctgggcaccagccccagcagcagccccaggaccagcccctgccagagccccaccatcagcgagggccctgtgcccagcctgcccatccggcccagccgggcccccagcaggaccccaggcccccccagcgcccagagcagccccattgatgcccagcctgccacccccctgccccagaaggaccctgcccagcccctggagcccaagaggcctcctccacccaggcctgtggccccacccaccaggcctgccccaccccagaggcctcctccacccagcggggcccggagccctgcccccaccaggaaggagtttggaggcattggagccccacccagccctggggtggcccggcgggagatggaggcccccaagagccctggcaccaccaggaaggacaacatcggccgcagccagcccagcccccaggccggcctggccggccctggccctgctggctacagcacagcccggcccaccatccccccccgggccggggtcatcagcgccccccagagccacgcccgggccagcgctggccgcctgaccccagagagccagagcaagaccagcgagaccagcaagggcagcaccttcctgcctgagcccctgaagccccaggccgccttccccccccagagcagcctgcccccaccagcccagaggctgcaggagcccctggtgcctgtggccgcccccatgccccagagcggcccccagcccaacctggagaccccaccccagcccccacccaggagccgcagcagccacagcctgcccagcgaggccagcagccagccccaggtgaagaccaacggcatcagtgatggcaagcgggagagccccctgaagattgacccctttgaggacctgtccttcaacctgctggccgtgtccaaggcccagctgtctgtgcagaccagccctgtgcccaccccagaccccaagaggctcatccagctgcccagcgccacccagagcaatgtgctgagctctgtgtcctgcatgcccaccatgccacccatcccagcccggagccagagccaggagaacatgaggagcagccccaaccccttcatcaccggcctgaccaggaccaaccccttcagtgacagaacagctgcccctggcaaccccttccgggccaagtctgaggagagcgaggccacctcctggttcagcaaggaggagcctgtgaccatcagccccttccccagcctgcagcccctgggccacaacaagagccgggccagcagcagcctggatggcttcaaggacagctttgacctgcagggccagagcaccctgaagatcagcaaccccaagggctgggtgacctttgaggaggaggaggactttggagtgaagggcaagagcaagagcgcctgcagcgacctgctgggcaaccagcccagcagcttcagcggcagcaacctgaccctgaatgatgactggaacaagggcaccaacgtgtccttctgtgtgctgcccagccggcggcccccacctcctcctgtgcccctgctgcccccaggcaccagcccccctgtggaccccttcaccaccctggccagcaaggccagccccaccctggacttcacagaaagatag

SEQ ID NO: 172224 - DNA, 3888 bp, synthetic construct
  misc_feature 1..3888: note = Description of Artificial Sequence: Synthetic coding sequence
  source 1..3888: mol_type = other DNA
atggccttcagcaagggcttccgcatctaccacaagctggaccccccacccttcagcctgattgtggagaccaggcacaaggaggagtgcctgatgtttgaaagtggagctgtggccgtgctgagcagcgctgagaaggaggccatcaagggcacctacagcaaggtgctggatgcctacggcctgctgggcgtgctgcggctgaacctgggggacaccatgctgcactacctggtgctggtgacaggctgcatgtctgtgggcaagatccaggagagcgaggtgttccgggtgaccagcacagagttcatcagcctgagaattgacagcagtgatgaagatcgcatcagcgaggtgaggaaggtgctgaacagcggcaacttctactttgcctggagcgccagcggcatcagcctggacctgagcctgaatgcccaccgctccatgcaggagcagaccacagacaaccgcttcttctggaaccagagcctgcacctgcacctgaagcactatggagtgaactgtgatgactggctgctgcggctgatgtgtggcggcgtggagatccgcaccatctatgctgcccacaagcaggccaaggcctgcctgatcagccggctgagctgtgagcgggccggcacccgcttcaacgtgcggggcaccaatgatgatggccacgtggccaactttgtggagacagagcaggtggtgtacctggatgacagcgtgtcctccttcatccagatccggggctctgtgcccctcttctgggagcagcccggcctgcaggtgggcagccaccgggtgaggatgagccggggctttgaggccaatgccccagcctttgacagacacttccgcaccctgaagaacctgtatggcaagcagatcatcgtgaacctgctgggcagcaaggagggggagcacatgctgagcaaggccttccagagccacctgaaggccagcgagcacgccgctgacatccagatggtgaactttgactaccaccagatggtgaagggcggcaaggccgagaagctgcacagcgtgctgaagccccaggtgcagaagttcctggactatggcttcttctacttcaatggaagtgaggtgcagcgctgccagagcggcaccgtgaggaccaactgcctggactgcctggacaggaccaacagcgtgcaggccttcctgggcctggagatgctggccaagcagctggaggccctgggcctggccgagaagccccagctggtgacccgcttccaggaggtgttccgctccatgtggagcgtgaatggagacagcatcagcaagatctatgccggcactggagccctggagggcaaggccaagctgaaggatggagcccggtctgtgaccaggaccatccagaacaacttctttgacagcagcaagcaggaggccattgatgtgctgctgctgggcaacaccctgaacagcgacctggccgacaaggcccgggccctgctgaccaccggcagcctgcgggtgtctgagcagaccctgcagagcgccagcagcaaggtgctgaagtccatgtgtgagaacttctacaagtacagcaagcccaagaagatccgggtgtgtgtgggcacctggaatgtgaatggaggcaagcagttccgcagcatcgccttcaagaaccagaccctgacagactggctgctggatgcccccaagctggccggcatccaggagttccaggacaagaggagcaagcccacagacatctttgccatcggctttgaggagatggtggagctgaatgccggcaacatcgtgtctgccagcaccaccaaccagaagctgtgggccgtggagctgcagaagaccatcagccgggacaacaagtatgtgctgctggccagcgagcagctggtgggcgtgtgcctgtttgtgttcatccggccccagcacgcccccttcatcagagatgtggccgtggacacagtgaagacaggcatgggcggggccaccggcaacaagggagctgtggccatccgcatgctgttccacaccaccagcctgtgctttgtgtgcagccactttgctgctggccagagccaggtgaaggagagaaatgaagacttcattgaaattgccaggaagctgtccttccccatgggccgcatgctgttcagccatgactatgtgttctggtgtggggacttcaactacagaattgacctgcccaatgaggaggtgaaggagctgatccggcagcagaactgggacagcctgattgctggggaccagctgatcaaccagaagaatgccggccaggtgttccggggcttcctggagggcaaggtgacctttgcccccacctacaagtatgacctcttcagtgatgattatgacaccagcgagaagtgcaggaccccagcctggacagacagagtgctgtggaggaggaggaagtggccctttgacagatctgctgaggacctggacctgctgaatgccagcttccaggatgagagcaagatcctgtacacctggaccccaggcaccctgctgcactacggccgggcagagctgaagaccagtgaccacaggcctgtggtggccctgattgacatcgacatctttgaggtggaggccgaggagcggcagaacatctacaaggaggtgattgctgtgcagggccccccagatggcaccgtgctggtgtccatcaagagcagcctgcctgagaacaacttctttgatgatgccctgattgatgagctgctgcagcagtttgccagctttggagaggtgatcctgatccgctttgtggaggacaagatgtgggtgaccttcctggagggcagcagcgccctgaatgtgctgagcctgaatggcaaggagctgctgaacagaaccatcaccatcgccctgaagagcccagactggatcaagaacctggaggaggagatgagcctggagaagatcagcatcgccctgcccagcagcaccagcagcaccctgctgggagaagatgctgaggtggccgctgactttgacatggagggagatgtggatgactacagcgctgaggtggaggagctgctgccccagcacctgcagcccagcagcagcagcggcctgggcaccagccccagcagcagccccaggaccagcccctgccagagccccaccatcagcgagggccctgtgcccagcctgcccatccggcccagccgggcccccagcaggaccccaggcccccccagcgcccagagcagccccattgatgcccagcctgccacccccctgccccagaaggaccctgcccagcccctggagcccaagaggcctcctccacccaggcctgtggccccacccaccaggcctgccccaccccagaggcctcctccacccagcggggcccggagccctgcccccaccaggaaggagtttggagcccccaagagccctggcaccaccaggaaggacaacatcggccgcagccagcccagcccccaggccggcctggccggccctggccctgctggctacagcacagcccggcccaccatccccccccgggccggggtcatcagcgccccccagagccacgcccgggccagcgctggccgcctgaccccagagagccagagcaagaccagcgagaccagcaagggcagcaccttcctgcctgagcccctgaagccccaggccgccttccccccccagagcagcctgcccccaccagcccagaggctgcaggagcccctggtgcctgtggccgcccccatgccccagagcggcccccagcccaacctggagaccccaccccagcccccacccaggagccgcagcagccacagcctgcccagcgaggccagcagccagccccagcaggagcagcccagcggctag

SEQ ID NO: 172225 - DNA, 4581 bp, synthetic construct
  misc_feature 1..4581: note = Description of Artificial Sequence: Synthetic coding sequence
  source 1..4581: mol_type = other DNA
atggccttcagcaagggcttccgcatctaccacaagctggaccccccacccttcagcctgattgtggagaccaggcacaaggaggagtgcctgatgtttgaaagtggagctgtggccgtgctgagcagcgctgagaaggaggccatcaagggcacctacagcaaggtgctggatgcctacggcctgctgggcgtgctgcggctgaacctgggggacaccatgctgcactacctggtgctggtgacaggctgcatgtctgtgggcaagatccaggagagcgaggtgttccgggtgaccagcacagagttcatcagcctgagaattgacagcagtgatgaagatcgcatcagcgaggtgaggaaggtgctgaacagcggcaacttctactttgcctggagcgccagcggcatcagcctggacctgagcctgaatgcccaccgctccatgcaggagcagaccacagacaaccgcttcttctggaaccagagcctgcacctgcacctgaagcactatggagtgaactgtgatgactggctgctgcggctgatgtgtggcggcgtggagatccgcaccatctatgctgcccacaagcaggccaaggcctgcctgatcagccggctgagctgtgagcgggccggcacccgcttcaacgtgcggggcaccaatgatgatggccacgtggccaactttgtggagacagagcaggtggtgtacctggatgacagcgtgtcctccttcatccagatccggggctctgtgcccctcttctgggagcagcccggcctgcaggtgggcagccaccgggtgaggatgagccggggctttgaggccaatgccccagcctttgacagacacttccgcaccctgaagaacctgtatggcaagcagatcatcgtgaacctgctgggcagcaaggagggggagcacatgctgagcaaggccttccagagccacctgaaggccagcgagcacgccgctgacatccagatggtgaactttgactaccaccagatggtgaagggcggcaaggccgagaagctgcacagcgtgctgaagccccaggtgcagaagttcctggactatggcttcttctacttcaatggaagtgaggtgcagcgctgccagagcggcaccgtgaggaccaactgcctggactgcctggacaggaccaacagcgtgcaggccttcctgggcctggagatgctggccaagcagctggaggccctgggcctggccgagaagccccagctggtgacccgcttccaggaggtgttccgctccatgtggagcgtgaatggagacagcatcagcaagatctatgccggcactggagccctggagggcaaggccaaggccggcaagctgaaggatggagcccggtctgtgaccaggaccatccagaacaacttctttgacagcagcaagcaggaggccattgatgtgctgctgctgggcaacaccctgaacagcgacctggccgacaaggcccgggccctgctgaccaccggcagcctgcgggccagcagcaaggtgctgaagtccatgtgtgagaacttctacaagtacagcaagcccaagaagatccgggtgtgtgtgggcacctggaatgtgaatggaggcaagcagttccgcagcatcgccttcaagaaccagaccctgacagactggctgctggatgcccccaagctggccggcatccaggagttccaggacaagaggagcaagcccacagacatctttgccatcggctttgaggagatggtggagctgaatgccggcaacatcgtgtctgccagcaccaccaaccagaagctgtgggccgtggagctgcagaagaccatcagccgggacaacaagtatgtgctgctggccagcgagcagctggtgggcgtgtgcctgtttgtgttcatccggccccagcacgcccccttcatcagagatgtggccgtggacacagtgaagacaggcatgggcggggccactggaaacaagggagctgtggccatccgcatgctgttccacaccaccagcctgtgctttgtgtgcagccactttgctgctggccagagccaggtgaaggagagaaatgaagacttcatcgagatcgccaggaagctgtccttccccatgggccgcatgctgttcagccatgactatgtgttctggtgtggggacttcaactacagaattgacctgcccaatgaggaggtgaaggagctgatccggcagcagaactgggacagcctgattgctggggaccagctgatcaaccagaagaatgccggccaggtgttccggggcttcctggagggcaaggtgacctttgcccccacctacaagtatgacctcttcagtgatgattatgacaccagcgagaagtgcaggaccccagcctggacagacagagtgctgtggaggaggaggaagtggccctttgacagatctgctgaggacctggacctgctgaatgccagcttccaggatgagagcaagatcctgtacacctggaccccaggcaccctgctgcactacggccgggcagagctgaagaccagtgaccacaggcctgtggtggccctgattgatattgacatctttgaggtggaggccgaggagcggcagaacatctacaaggaggtgattgctgtgcagggccccccagatggcaccgtgctggtgtccatcaagagcagcctgcctgagaacaacttctttgatgatgccctgattgatgagctgctgcagcagtttgccagctttggagaggtgatcctgatccgctttgtggaggacaagatgtgggtgaccttcctggagggcagcagcgccctgaatgtgctgagcctgaatggcaaggagctgctgaacagaaccatcaccatcgccctgaagagcccagactggatcaagaacctggaggaggagatgagcctggagaagatcagcatcgccctgcccagcagcaccagcagcaccctgctgggggaggatgctgaggtggccgctgactttgacatggagggagatgtggatgactacagcgctgaggtggaggagctgctgccccagcacctgcagcccagcagcagcagcggcctgggcaccagccccagcagcagccccaggaccagcccctgccagagccccaccatcagcgagggccctgtgcccagcctgcccatccggcccagccgggcccccagcaggaccccaggccccccatctgcccagagcagccccattgatgcccagcctgccacccccctgccccagaaggaccctgcccagcccctggagcccaagaggcctcctccacccaggcctgtggccccacccaccaggcctgccccaccccagaggcctcctcctccttctggccgcagccagcccagcccccaggccggcctggccggccctggccctgctggctacagcacagcccggcccaccatcccccccagggctggggtcatcagcgccccccagagccacgcccgggccagcgctggccgcctgaccccagagagccagagcaagaccagcgagaccagcaagggcagcaccttcctgcctgagcccctgaagccccaggccgccttccccccccagagcagcctgcccccaccagcccagaggctgcaggagcccctggtgcctgtggccgcccccatgccccagagcggcccccagcccaacctggagaccccaccccagcccccacccaggagccgcagcagccacagcctgcccagcgaggccagcagccagccccaggtgaagaccaacggcatcagtgatggcaagcgggagagccccctgaagattgacccctttgaggacctgtccttcaacctgctggccgtgtccaaggcccagctgtctgtgcagaccagccctgtgcccaccccagaccccaagaggctcatccagctgcccagcgccacccagagcaatgtgctgagctctgtgtcctgcatgcccaccatgccacccatcccagcccggagccagagccaggagaacatgaggagcagccccaaccccttcatcaccggcctgaccaggaccaaccccttcagtgacagaacagctgcccctggcaaccccttccgggccaagtctgaggagagcgaggccacctcctggttcagcaaggaggagcctgtgaccatcagccccttccccagcctgcagcccctgggccacaacaagagccgggccagcagcagcctggatggcttcaaggacagctttgacctgcagggccagagcaccctgaagatcagcaaccccaagggctgggtgacctttgaggaggaggaggactttggagtgaagggcaagagcaagagcgcctgcagcgacctgctgggcaaccagcccagcagcttcagcggcagcaacctgaccctgaatgatgactggaacaagggcaccaacgtgtccttctgtgtgctgcccagcagaagacctcctcctcctcctgtgcccctgctgcccccaggcaccagcccccctgtggaccccttcaccaccctggccagcaaggccagccccaccctggacttcacagagaggtag

SEQ ID NO: 172226 - DNA, 4053 bp, synthetic construct
  misc_feature 1..4053: note = Description of Artificial Sequence: Synthetic coding sequence
  source 1..4053: mol_type = other DNA
atgaggaagcgctgggcctgctggagcggcagtgatgcccctgggggctgcggcggcggctgcggcagaagaagaagaagaagcaggaggaagagagctgccagcgaggagaggaggatggccttcagcaagggcttccgcatctaccacaagctggaccccccacccttcagcctcatcgtggagaccaggcacaaggaggagtgcctgatgtttgagagcggggctgtggccgtgctgagcagcgctgagaaggaggccatcaagggcacctacagcaaggtgctggatgcctacggcctgctgggcgtgctgcggctgaacctgggggacaccatgctgcactacctggtgctggtgacaggctgcatgtctgtgggcaagatccaggagagcgaggtgttccgggtgaccagcacagagttcatcagcctgagaattgacagcagtgatgaggaccgcatcagcgaggtgaggaaggtgctgaacagcggcaacttctactttgcctggagcgccagcggcatcagcctggacctgagcctgaatgcccaccgctccatgcaggagcagaccacagacaaccgcttcttctggaaccagagcctgcacctgcacctgaagcactacggcgtgaactgtgatgactggctgctgcggctgatgtgtggcggcgtggagatccgcaccatctatgctgcccacaagcaggccaaggcctgcctgatcagccggctgagctgtgaaagagctggcacccgcttcaacgtgcggggcaccaatgatgatggccacgtggccaactttgtggagacagagcaggtggtgtacctggatgattctgtgagcagcttcatccagatccggggctctgtgcccctcttctgggagcagcccggcctgcaggtgggcagccaccgggtgaggatgagccggggctttgaggccaatgccccagcctttgacagacacttccgcaccctgaagaacctgtatggcaagcagatcatcgtgaacctgctgggcagcaaggagggggagcacatgctgagcaaggccttccagagccacctgaaggccagcgagcacgccgctgacatccagatggtgaactttgactaccaccagatggtgaagggcggcaaggccgagaagctgcacagcgtgctgaagccccaggtgcagaagttcctggactatggcttcttctacttcaacggcagcgaggtgcagcgctgccagagcggcaccgtgaggaccaactgcctggactgcctggacaggaccaacagcgtgcaggccttcctgggcctggagatgctggccaagcagctggaggccctgggcctggccgagaagccccagctggtgacccgcttccaggaggtgttccgctccatgtggagcgtgaatggagacagcatcagcaagatctatgccggcaccggggccctggagggcaaggccaagctgaaggatggagcccggtctgtgaccaggaccatccagaacaacttctttgacagcagcaagcaggaggccattgatgtgctgctgctgggcaacaccctgaacagcgacctggccgacaaggcccgggccctgctgaccaccggcagcctgcgggtgtctgagcagaccctgcagagcgccagcagcaaggtgctgaagtccatgtgtgagaacttctacaagtacagcaagcccaagaagatccgggtgtgtgtgggcacctggaatgtgaatggaggcaagcagttccgcagcatcgccttcaagaaccagaccctgacagactggctgctggatgcccccaagctggccggcatccaggagttccaggacaagaggagcaagcccacagacatctttgccatcggctttgaggagatggtggagctgaatgccggcaacatcgtgtctgccagcaccaccaaccagaagctgtgggccgtggagctgcagaagaccatcagccgggacaacaagtatgtgctgctggccagcgagcagctggtgggcgtgtgcctgtttgtgttcatccggccccagcacgcccccttcatcagagatgtggccgtggacacagtgaagacaggcatgggcggggccactggaaacaagggagctgtggccatccgcatgctgttccacaccaccagcctgtgctttgtgtgcagccactttgctgctggccagagccaggtgaaggagagaaatgaagacttcatcgagatcgccaggaagctgtccttccccatgggccgcatgctgttcagccatgactatgtgttctggtgtggggacttcaactacagaattgacctgcccaatgaggaggtgaaggagctgatccggcagcagaactgggacagcctgattgctggggaccagctgatcaaccagaagaatgccggccaggtgttccggggcttcctggagggcaaggtgacctttgcccccacctacaagtatgacctcttcagtgatgattatgacaccagcgagaagtgcaggaccccagcctggacagacagagtgctgtggaggaggaggaagtggccctttgacagatctgctgaggacctggacctgctgaatgccagcttccaggatgagagcaagatcctgtacacctggaccccaggcaccctgctgcactacggccgggcagagctgaagaccagtgaccacaggcctgtggtggccctgattgatattgacatctttgaggtggaggccgaggagcggcagaacatctacaaggaggtgattgctgtgcagggccccccagatggcaccgtgctggtgtccatcaagagcagcctgcctgagaacaacttctttgatgatgccctgattgatgagctgctgcagcagtttgccagctttggagaggtgatcctgatccgctttgtggaggacaagatgtgggtgaccttcctggagggcagcagcgccctgaatgtgctgagcctgaatggcaaggagctgctgaacagaaccatcaccatcgccctgaagagcccagactggatcaagaacctggaggaggagatgagcctggagaagatcagcatcgccctgcccagcagcaccagcagcaccctgctgggggaggatgctgaggtggccgctgactttgacatggagggagatgtggatgactacagcgctgaggtggaggagctgctgccccagcacctgcagcccagcagcagcagcggcctgggcaccagccccagcagcagccccaggaccagcccctgccagagccccaccatcagcgagggccctgtgcccagcctgcccatccggcccagccgggcccccagcaggaccccaggccccccatctgcccagagcagccccattgatgcccagcctgccacccccctgccccagaaggaccctgcccagcccctggagcccaagaggcctcctccacccaggcctgtggccccacccaccaggcctgccccaccccagaggcctcctcctccttctggggcccggagccctgcccccaccaggaaggagtttggaggcatcggggccccacccagccctggggtggcccggcgggagatggaggcccccaagagccctggcaccaccaggaaggacaacatcggccgcagccagcccagcccccaggccggcctggccggccctggccctgctggctacagcacagcccggcccaccatcccccccagggctggggtcatcagcgccccccagagccacgcccgggccagcgctggccgcctgaccccagagagccagagcaagaccagcgagaccagcaagggcagcaccttcctgcctgagcccctgaagccccaggccgccttccccccccagagcagcctgcccccaccagcccagaggctgcaggagcccctggtgcctgtggccgcccccatgccccagagcggcccccagcccaacctggagaccccaccccagcccccacccaggagccgcagcagccacagcctgcccagcgaggccagcagccagccccagcaggagcagcccagcggctag

SEQ ID NO: 172227 - DNA, 4839 bp, synthetic construct
  misc_feature 1..4839: note = Description of Artificial Sequence: Synthetic coding sequence
  source 1..4839: mol_type = other DNA
atgaggaagcgctgggcctgctggagcggcagtgatgcccctgggggctgcggcggcggctgcggcagaagaagaagaagaagcaggaggaagagagctgccagcgaggagaggaggatggccttcagcaagggcttccgcatctaccacaagctggaccccccacccttcagcctcatcgtggagaccaggcacaaggaggagtgcctgatgtttgagagcggggctgtggccgtgctgagcagcgctgagaaggaggccatcaagggcacctacagcaaggtgctggatgcctacggcctgctgggcgtgctgcggctgaacctgggggacaccatgctgcactacctggtgctggtgacaggctgcatgtctgtgggcaagatccaggagagcgaggtgttccgggtgaccagcacagagttcatcagcctgagaattgacagcagtgatgaggaccgcatcagcgaggtgaggaaggtgctgaacagcggcaacttctactttgcctggagcgccagcggcatcagcctggacctgagcctgaatgcccaccgctccatgcaggagcagaccacagacaaccgcttcttctggaaccagagcctgcacctgcacctgaagcactacggcgtgaactgtgatgactggctgctgcggctgatgtgtggcggcgtggagatccgcaccatctatgctgcccacaagcaggccaaggcctgcctgatcagccggctgagctgtgaaagagctggcacccgcttcaacgtgcggggcaccaatgatgatggccacgtggccaactttgtggagacagagcaggtggtgtacctggatgattctgtgagcagcttcatccagatccggggctctgtgcccctcttctgggagcagcccggcctgcaggtgggcagccaccgggtgaggatgagccggggctttgaggccaatgccccagcctttgacagacacttccgcaccctgaagaacctgtatggcaagcagatcatcgtgaacctgctgggcagcaaggagggggagcacatgctgagcaaggccttccagagccacctgaaggccagcgagcacgccgctgacatccagatggtgaactttgactaccaccagatggtgaagggcggcaaggccgagaagctgcacagcgtgctgaagccccaggtgcagaagttcctggactatggcttcttctacttcaacggcagcgaggtgcagcgctgccagagcggcaccgtgaggaccaactgcctggactgcctggacaggaccaacagcgtgcaggccttcctgggcctggagatgctggccaagcagctggaggccctgggcctggccgagaagccccagctggtgacccgcttccaggaggtgttccgctccatgtggagcgtgaatggagacagcatcagcaagatctatgccggcaccggggccctggagggcaaggccaagctgaaggatggagcccggtctgtgaccaggaccatccagaacaacttctttgacagcagcaagcaggaggccattgatgtgctgctgctgggcaacaccctgaacagcgacctggccgacaaggcccgggccctgctgaccaccggcagcctgcgggtgtctgagcagaccctgcagagcgccagcagcaaggtgctgaagtccatgtgtgagaacttctacaagtacagcaagcccaagaagatccgggtgtgtgtgggcacctggaatgtgaatggaggcaagcagttccgcagcatcgccttcaagaaccagaccctgacagactggctgctggatgcccccaagctggccggcatccaggagttccaggacaagaggagcaagcccacagacatctttgccatcggctttgaggagatggtggagctgaatgccggcaacatcgtgtctgccagcaccaccaaccagaagctgtgggccgtggagctgcagaagaccatcagccgggacaacaagtatgtgctgctggccagcgagcagctggtgggcgtgtgcctgtttgtgttcatccggccccagcacgcccccttcatcagagatgtggccgtggacacagtgaagacaggcatgggcggggccactggaaacaagggagctgtggccatccgcatgctgttccacaccaccagcctgtgctttgtgtgcagccactttgctgctggccagagccaggtgaaggagagaaatgaagacttcatcgagatcgccaggaagctgtccttccccatgggccgcatgctgttcagccatgactatgtgttctggtgtggggacttcaactacagaattgacctgcccaatgaggaggtgaaggagctgatccggcagcagaactgggacagcctgattgctggggaccagctgatcaaccagaagaatgccggccaggtgttccggggcttcctggagggcaaggtgacctttgcccccacctacaagtatgacctcttcagtgatgattatgacaccagcgagaagtgcaggaccccagcctggacagacagagtgctgtggaggaggaggaagtggccctttgacagatctgctgaggacctggacctgctgaatgccagcttccaggatgagagcaagatcctgtacacctggaccccaggcaccctgctgcactacggccgggcagagctgaagaccagtgaccacaggcctgtggtggccctgattgatattgacatctttgaggtggaggccgaggagcggcagaacatctacaaggaggtgattgctgtgcagggccccccagatggcaccgtgctggtgtccatcaagagcagcctgcctgagaacaacttctttgatgatgccctgattgatgagctgctgcagcagtttgccagctttggagaggtgatcctgatccgctttgtggaggacaagatgtgggtgaccttcctggagggcagcagcgccctgaatgtgctgagcctgaatggcaaggagctgctgaacagaaccatcaccatcgccctgaagagcccagactggatcaagaacctggaggaggagatgagcctggagaagatcagcatcgccctgcccagcagcaccagcagcaccctgctgggggaggatgctgaggtggccgctgactttgacatggagggagatgtggatgactacagcgctgaggtggaggagctgctgccccagcacctgcagcccagcagcagcagcggcctgggcaccagccccagcagcagccccaggaccagcccctgccagagccccaccatcagcgagggccctgtgcccagcctgcccatccggcccagccgggcccccagcaggaccccaggccccccatctgcccagagcagccccattgatgcccagcctgccacccccctgccccagaaggaccctgcccagcccctggagcccaagaggcctcctccacccaggcctgtggccccacccaccaggcctgccccaccccagaggcctcctcctccttctggggcccggagccctgcccccaccaggaaggagtttggaggcatcggggccccacccagccctggggtggcccggcgggagatggaggcccccaagagccctggcaccaccaggaaggacaacatcggccgcagccagcccagcccccaggccggcctggccggccctggccctgctggctacagcacagcccggcccaccatcccccccagggctggggtcatcagcgccccccagagccacgcccgggccagcgctggccgcctgaccccagagagccagagcaagaccagcgagaccagcaagggcagcaccttcctgcctgagcccctgaagccccaggccgccttccccccccagagcagcctgcccccaccagcccagaggctgcaggagcccctggtgcctgtggccgcccccatgccccagagcggcccccagcccaacctggagaccccaccccagcccccacccaggagccgcagcagccacagcctgcccagcgaggccagcagccagccccaggtgaagaccaacggcatcagtgatggcaagcgggagagccccctgaagattgacccctttgaggacctgtccttcaacctgctggccgtgtccaaggcccagctgtctgtgcagaccagccctgtgcccaccccagaccccaagaggctcatccagctgcccagcgccacccagagcaatgtgctgagctctgtgtcctgcatgcccaccatgccacccatcccagcccggagccagagccaggagaacatgaggagcagccccaaccccttcatcaccggcctgaccaggaccaaccccttcagtgacagaacagctgcccctggcaaccccttccgggccaagtctgaggagagcgaggccacctcctggttcagcaaggaggagcctgtgaccatcagccccttccccagcctgcagcccctgggccacaacaagagccgggccagcagcagcctggatggcttcaaggacagctttgacctgcagggccagagcaccctgaagatcagcaaccccaagggctgggtgacctttgaggaggaggaggactttggagtgaagggcaagagcaagagcgcctgcagcgacctgctgggcaaccagcccagcagcttcagcggcagcaacctgaccctgaatgatgactggaacaagggcaccaacgtgtccttctgtgtgctgcccagcagaagacctcctcctcctcctgtgcccctgctgcccccaggcaccagcccccctgtggaccccttcaccaccctggccagcaaggccagccccaccctggacttcacagagaggtag

SEQ ID NO: 172228 - DNA, 4491 bp, synthetic construct
  misc_feature 1..4491: note = Description of Artificial Sequence: Synthetic coding sequence
  source 1..4491: mol_type = other DNA
atggccctgagcaagggcctgcggctgctgggccgcctgggcgctgagggggactgcagcgtgctgctggaggcccggggcagagatgactgcctgctgtttgaggccggcaccgtggccaccctggcccctgaggagaaggaggtgatcaagggccagtatggcaagctgacagatgcctacggctgcctgggggagctgcggctgaagagcggcggcaccagcctgtccttcctggtgctggtgacaggctgcacctctgtgggccgcatcccagatgctgagatctacaagatcacagccacagacttctaccccctgcaggaggaggccaaggaggaggagcggctcatcgccctgaagaagatcctgagcagcggggtcttctacttctcctggcccaatgatggcagcagatttgacctgactgtgaggacccagaagcagggagatgacagcagcgagtggggcaacagcttcttctggaaccagctgctgcacgtgcccctgcggcagcaccaggtgtcctgctgtgactggctgctgaagatcatctgtggggtggtgaccatcagaacagtgtatgccagccacaagcaggccaaggcctgcctggtgtcccgggtgtcctgtgagaggacaggcacccgcttccacacccggggcgtgaatgatgatggccacgtgagcaactttgtggagacagagcagatgatctacatggatgatggagtgtcctcctttgtgcagatccggggctctgtgcccctcttctgggagcagcccggcctgcaggtgggcagccaccacctgcggctgcaccggggcctggaggccaatgccccagcctttgacagacacatggtgctgctgaaggagcagtatggccagcaggtggtggtgaacctgctgggcagccggggcggggaggaggtgctgaacagagccttcaagaagctgctgtgggccagctgccacgccggggacacccccatgatcaactttgacttccaccagtttgccaagggcggcaagctggagaagctggagaccctgctgcggccccagctgaagctgcactgggaggactttgatgtgttcaccaagggagaaaatgtgagcccccgcttccagaagggcaccctgaggatgaactgcctggactgcctggacaggaccaacacagtgcagagcttcatcgccctggaggtgctgcacctgcagctgaagaccctgggcctgagcagcaagcccatcgtggacagatttgtggagagcttcaaggccatgtggagcctgaatggccacagcctgagcaaggtgttcaccggcagccgggccctggagggcaaggccaaggtgggcaagctgaaggatggagcccgctccatgagcaggaccatccagagcaacttctttgatggagtgaagcaggaggccatcaagctgctgctggtgggagatgtgtatggagaggaggtggccgacaagggcggcatgctgctggacagcacagccctgctggtgaccccccgcatcctgaaggccatgacagagcggcagagcgagttcaccaacttcaagaggatccgcatcgccatgggcacctggaatgtgaatggaggcaagcagttccgcagcaatgtgctgaggacagctgagctgacagactggctgctggacagcccccagctgagcggggccacagacagccaggatgacagcagccctgctgacatctttgctgtgggctttgaggagatggtggagctgtctgctggcaacatcgtgaatgccagcaccaccaacaagaagatgtggggcgagcagctgcagaaggccatcagccgcagccaccgctacatcctgctgaccagcgcccagctggtgggcgtgtgcctgtacatctttgtgcggccctaccacgtgcccttcatcagagatgtggccatcgacacagtgaagacaggcatgggcggcaaggccggcaacaagggagctgtgggcatccgcttccagttccacagcaccagcttctgcttcatctgcagccacctgacagctggccagagccaggtgaaggagagaaatgaagactacaaggagatcacccagaagctgtgcttccccatgggcagaaatgtgttcagccatgactatgtgttctggtgtggggacttcaactacagaattgacctgacctatgaggaggtgttctactttgtgaagaggcaggactggaagaagctgctggagtttgaccagctgcagctgcagaagagcagcggcaagatcttcaaggacttccacgagggcgccatcaactttggccccacctacaagtatgatgtgggcagcgctgcctatgacaccagtgacaagtgcaggaccccagcctggacagacagagtgctgtggtggaggaagaagcacccctttgacaagacagctggggagctgaacctgctggacagcgacctggatgtggacaccaaggtgcgccacacctggagccctggggccctgcagtactacggccgggcagagctgcaggccagtgaccacaggcctgtgctggccatcgtggaggtggaggtgcaggaggtggatgtgggcgcccgggagagggtcttccaggaggtgtcctccttccagggccccctggatgccaccgtggtggtgaacctgcagagccccaccctggaggagaagaatgagttccctgaggacctgaggacagagctgatgcagaccctgggcagctatggcaccatcgtgctggtgcgcatcaaccagggccagatgctggtgacctttgctgacagccacagcgccctgtctgtgctggatgtggatggcatgaaggtgaagggccgggctgtgaagatccggcccaagaccaaggactggctgaagggcctgcgggaggagatcatcaggaagagggacagcatggcccctgtgagccccacagccaacagctgcctgctggaggagaactttgacttcaccagcctggactatgagagcgagggggacatcctggaggatgatgaggactacctggtggatgagttcaaccagcccggggtgtctgacagcgagctgggcggagatgacctgagtgatgtgcccggccccacagccctggccccacccagcaagagccctgccctgaccaagaagaagcagcaccccacctacaaggatgatgctgacctggtggagctgaagcgggagctggaggccgtgggggagttccgccacaggagccccagccgcagcctgtctgtgcccaaccggccccggcccccccagcccccccagaggcctcctccacccaccggcctgatggtgaagaagagcgccagtgatgccagcatcagcagcggcacccacggccagtacagcatcctgcagacagcccggctgctgcccggggccccccagcagccccccaaggccaggacaggcatcagcaagccctacaacgtgaagcagatcaagaccaccaatgcccaggaggccgaggccgccatccgctgcctgctggaggcccggggcggggccagcgaggaggccctgtctgctgtggccccccgggacctggaggccagcagcgagcctgagcccaccccaggagctgccaagccagagaccccccaggccccacccctgctgccccggcggcccccaccccgggtgcctgccatcaagaagcccaccctgcggaggacaggcaagcccctgagccctgaggagcagtttgagcagcagacagtgcacttcaccatcggccccccagagacctctgtggaggcccctcctgtggtgacagccccccgggtgccccctgtgcccaagcccaggaccttccagcccgggaaggctgctgagcggcccagccacaggaagccagccagtgatgaggcccctcctggagctggggcctctgtgcccccacccctggaggccccacccctggtgcccaaggtgccccccaggaggaagaagagcgccccagctgccttccacctgcaggtgctgcagagcaacagccagctgctgcagggcctgacctacaacagcagtgacagccccagcggccaccccccagctgctggcaccgtcttcccccagggcgacttcctgagcaccagcagcgccaccagcccagacagtgatggcaccaaggccatgaagccagaggccgcccccctgctgggggactaccaggaccccttctggaacctgctgcaccaccccaagctgctgaacaacacctggctgagcaagagcagtgaccccctggacagcggcaccaggagccccaagagggaccccattgatcctgtgtctgctggggccagcgctgccaaggccgagctgcccccagaccacgagcacaagaccctgggccactgggtgaccatcagtgaccaggagaagaggacagccctgcaggtgtttgaccccctggccaagacctag

SEQ ID NO: 172229 - DNA, 1746 bp, synthetic construct
  misc_feature 1..1746: note = Description of Artificial Sequence: Synthetic coding sequence
  source 1..1746: mol_type = other DNA
atgcagaccctgggcagctatggcaccatcgtgctggtgcgcatcaaccagggccagatgctggtgacctttgctgacagccacagcgccctgtctgtgctggatgtggatggcatgaaggtgaagggccgggctgtgaagatccggcccaagaccaaggactggctgaagggcctgcgggaggagatcatcaggaagagggacagcatggcccctgtgagccccacagccaacagctgcctgctggaggagaactttgacttcaccagcctggactatgaaagtgaaggagacatcctggaggatgatgaggactacctggtggatgagttcaaccagcccggggtgtctgattctgagctgggcggagatgacctgagtgatgtgcccggccccacagccctggccccacccagcaagagccctgccctgaccaagaagaagcagcaccccacctacaaggatgatgctgacctggtggagctgaagcgggagctggaggccgtgggggagttccgccacaggagccccagccgcagcctgtctgtgcccaaccggcccaggcctccccagcccccccagaggcctcctccacccaccggcctgatggtgaagaagagcgccagtgatgccagcatcagcagcggcacccacggccagtacagcatcctgcagacagcccggctgctgcccggggccccccagcagccccccaaggccaggacaggcatcagcaagccctacaacgtgaagcagatcaagaccaccaatgcccaggaggccgaggccgccatccgctgcctgctggaggcccggggcggggccagcgaggaggccctgtctgctgtggccccccgggacctggaggccagcagcgagcctgagcccacccctggggccgccaagccagagaccccccaggccccacccctgctgccccggcggcccccaccccgggtgcctgccatcaagaagcccaccctgcggaggacaggcaagcccctgagccctgaggagcagtttgagcagcagacagtgcacttcaccatcggccccccagagacctctgtggaggcccctcctgtggtgacagccccccgggtgccccctgtgcccaagcccaggaccttccagcccgggaaggctgctgagcggcccagccacaggaagccagccagtgatgaggcccctcctggggccggggcctctgtgcccccacccctggaggccccacccctggtgcccaaggtgccccccaggaggaagaagagcgccccagctgccttccacctgcaggtgctgcagagcaacagccagctgctgcagggcctgacctacaacagcagtgacagccccagcggccaccccccagctgctggcaccgtcttcccccagggcgacttcctgagcaccagcagcgccaccagcccagacagtgatggcaccaaggccatgaagccagaggccgcccccctgctgggggactaccaggaccccttctggaacctgctgcaccaccccaagctgctgaacaacacctggctgagcaagagcagtgaccccctggacagcggcaccaggagccccaagagggaccccatcgaccctgtgtctgctggggccagcgctgccaaggccgagctgcccccagaccacgagcacaagaccctgggccactgggtgaccatcagtgaccaggagaagaggacagccctgcaggtgtttgaccccctggccaagacctag

SEQ ID NO: 172230 - DNA, 411 bp, synthetic construct
  misc_feature 1..411: note = Description of Artificial Sequence: Synthetic coding sequence
  source 1..411: mol_type = other DNA
tgaggaagagatgactgcctgctgtttgaagctggcaccgtggccaccctggcccctgaggagaaggaggtgatcaagggccagtatggcaagctgacagatgcctacggctgcctgggggagctgcggctgaagagcggcggcaccagcctgtccttcctggtgctggtgacaggctgcacctctgtgggccgcatcccagatgctgagatctacaagatcacagccacagacttctaccccctgcaggaggaggccaaggaggaggagcggctgattgccctgaagaagatcctgagcagtggagtcttctacttctcctggcccaatgatggcagcagatttgacctgactgtgaggacccagaagcagggagatgacagcagcgagtggggcaacagcttcttctag

SEQ ID NO: 172231 - DNA, 3867 bp, synthetic construct
  misc_feature 1..3867: note = Description of Artificial Sequence: Synthetic coding sequence
  source 1..3867: mol_type = other DNA
atggccctgagcaagggcctgcggctgctgggccgcctgggcgctgagggggactgcagcgtgctgctggaggcccggggcagagatgactgcctgctgtttgaggccggcaccgtggccaccctggcccctgaggagaaggaggtgatcaagggccagtatggcaagctgacagatgcctacggctgcctgggggagctgcggctgaagagcggcggcaccagcctgtccttcctggtgctggtgacaggctgcacctctgtgggccgcatcccagatgctgagatctacaagatcacagccacagacttctaccccctgcaggaggaggccaaggaggaggagcggctcatcgccctgaagaagatcctgagcagcggggtcttctacttctcctggcccaatgatggcagcagatttgacctgactgtgaggacccagaagcagggagatgacagcagcgagtggggcaacagcttcttctggaaccagctgctgcacgtgcccctgcggcagcaccaggtgtcctgctgtgactggctgctgaagatcatctgtggggtggtgaccatcagaacagtgtatgccagccacaagcaggccaaggcctgcctggtgtcccgggtgtcctgtgagaggacaggcacccgcttccacacccggggcgtgaatgatgatggccacgtgagcaactttgtggagacagagcagatgatctacatggatgatggagtgtcctcctttgtgcagatccggggctctgtgcccctcttctgggagcagcccggcctgcaggtgggcagccaccacctgcggctgcaccggggcctggaggccaatgccccagcctttgacagacacatggtgctgctgaaggagcagtatggccagcaggtggtggtgaacctgctgggcagccggggcggggaggaggtgctgaacagagccttcaagaagctgctgtgggccagctgccacgccggggacacccccatgatcaactttgacttccaccagtttgccaagggcggcaagctggagaagctggagaccctgctgcggccccagctgaagctgcactgggaggactttgatgtgttcaccaagggagaaaatgtgagcccccgcttccagaagggcaccctgaggatgaactgcctggactgcctggacaggaccaacacagtgcagagcttcatcgccctggaggtgctgcacctgcagctgaagaccctgggcctgagcagcaagcccatcgtggacagatttgtggagagcttcaaggccatgtggagcctgaatggccacagcctgagcaaggtgttcaccggcagccgggccctggagggcaaggccaaggtgggcaagctgaaggatggagcccgctccatgagcaggaccatccagagcaacttctttgatggagtgaagcaggaggccatcaagctgctgctggtgggagatgtgtatggagaggaggtggccgacaagggcggcatgctgctggacagcacagccctgctggtgaccccccgcatcctgaaggccatgacagagcggcagagcgagttcaccaacttcaagaggatccgcatcgccatgggcacctggaatgtgaatggaggcaagcagttccgcagcaatgtgctgaggacagctgagctgacagactggctgctggacagcccccagctgagcggggccacagacagccaggatgacagcagccctgctgacatctttgctgtgggctttgaggagatggtggagctgtctgctggcaacatcgtgaatgccagcaccaccaacaagaagatgtggggcgagcagctgcagaaggccatcagccgcagccaccgctacatcctgctgaccagcgcccagctggtgggcgtgtgcctgtacatctttgtgcggccctaccacgtgcccttcatcagagatgtggccatcgacacagtgaagacaggcatgggcggcaaggccggcaacaagggagctgtgggcatccgcttccagttccacagcaccagcttctgcttcatctgcagccacctgacagctggccagagccaggtgaaggagagaaatgaagactacaaggagatcacccagaagctgtgcttccccatgggcagaaatgtgttcagccatgactatgtgttctggtgtggggacttcaactacagaattgacctgacctatgaggaggtgttctactttgtgaagaggcaggactggaagaagctgctggagtttgaccagctgcagctgcagaagagcagcggcaagatcttcaaggacttccacgagggcgccatcaactttggccccacctacaagtatgatgtgggcagcgctgcctatgacaccagtgacaagtgcaggaccccagcctggacagacagagtgctgtggtggaggaagaagcacccctttgacaagacagctggggagctgaacctgctggacagcgacctggatgtggacaccaaggtgcgccacacctggagccctggggccctgcagtactacggccgggcagagctgcaggccagtgaccacaggcctgtgctggccatcgtggaggtggaggtgcaggaggtggatgtgggcgcccgggagagggtcttccaggaggtgtcctccttccagggccccctggatgccaccgtggtggtgaacctgcagagccccaccctggaggagaagaatgagttccctgaggacctgaggacagagctgatgcagaccctgggcagctatggcaccatcgtgctggtgcgcatcaaccagggccagatgctggtgacctttgctgacagccacagcgccctgtctgtgctggatgtggatggcatgaaggtgaagggccgggctgtgaagatccggcccaagaccaaggactggctgaagggcctgcgggaggagatcatcaggaagagggacagcatggcccctgtgagccccacagccaacagctgcctgctggaggagaactttgacttcaccagcctggactatgagagcgagggggacatcctggaggatgatgaggactacctggtggatgagttcaaccagcccggggtgtctgacagcgagctgggcggagatgacctgagtgatgtgcccggccccacagccctggccccacccagcaagagccctgccctgaccaagaagaagcagcaccccacctacaaggatgatgctgacctggtggagctgaagcgggagctggaggccgtgggggagttccgccacaggagccccagccgcagcctgtctgtgcccaaccggccccggcccccccagcccccccagaggcctcctccacccaccggcctgatggtgaagaagagcgccagtgatgccagcatcagcagcggcacccacggccagtacagcatcctgcagacagcccggctgctgcccggggccccccagcagccccccaaggccaggacaggcatcagcaagccctacaacgtgaagcagatcaagaccaccaatgcccaggaggccgaggccgccatccgctgcctgctggaggcccggggcggggccagcgaggaggccctgtctgctgtggccccccgggacctggaggccagcagcgagcctgagcccaccccaggagctgccaagccagagaccccccaggccccacccctgctgccccggcggcccccaccccgggtgcctgccatcaagaagcccaccctgcggaggacaggcaagatcgtgttctgcagccgcagccaggccagccagccctgcctgctgctgcagagacatgaatttgtgaggacagtggccgcccagaggctggcctctgtggacaccagcggcagctctgtgtag

SEQ ID NO: 172232 - DNA, 4356 bp, synthetic construct
  misc_feature 1..4356: note = Description of Artificial Sequence: Synthetic coding sequence
  source 1..4356: mol_type = other DNA
atggccctgagcaagggcctgcggctgctgggccgcctgggcgctgagggggactgcagcgtgctgctggaggcccggggcagagatgactgcctgctgtttgaggccggcaccgtggccaccctggcccctgaggagaaggaggtgatcaagggccagtatggcaagctgacagatgcctacggctgcctgggggagctgcggctgaagagcggcggcaccagcctgtccttcctggtgctggtgacaggctgcacctctgtgggccgcatcccagatgctgagatctacaagatcacagccacagacttctaccccctgcaggaggaggccaaggaggaggagcggctcatcgccctgaagaagatcctgagcagcggggtcttctacttctcctggcccaatgatggcagcagatttgacctgactgtgaggacccagaagcagggagatgacagcagcgagtggggcaacagcttcttctggaaccagctgctgcacgtgcccctgcggcagcaccaggtgtcctgctgtgactggctgctgaagatcatctgtggggtggtgaccatcagaacagtgtatgccagccacaagcaggccaaggcctgcctggtgtcccgggtgtcctgtgagaggacaggcacccgcttccacacccggggcgtgaatgatgatggccacgtgagcaactttgtggagacagagcagatgatctacatggatgatggagtgtcctcctttgtgcagatccggggctctgtgcccctcttctgggagcagcccggcctgcaggtgggcagccaccacctgcggctgcaccggggcctggaggccaatgccccagcctttgacagacacatggtgctgctgaaggagcagtatggccagcaggtggtggtgaacctgctgggcagccggggcggggaggaggtgctgaacagagccttcaagaagctgctgtgggccagctgccacgccggggacacccccatgatcaactttgacttccaccagtttgccaagggcggcaagctggagaagctggagaccctgctgcggccccagctgaagctgcactgggaggactttgatgtgttcaccaagggagaaaatgtgagcccccgcttccagaagggcaccctgaggatgaactgcctggactgcctggacaggaccaacacagtgcagagcttcatcgccctggaggtgctgcacctgcagctgaagaccctgggcctgagcagcaagcccatcgtggacagatttgtggagagcttcaaggccatgtggagcctgaatggccacagcctgagcaaggtgttcaccggcagccgggccctggagggcaaggccaaggtgggcaagctgaaggatggagcccgctccatgagcaggaccatccagagcaacttctttgatggagtgaagcaggaggccatcaagctgctgctggtgggagatgtgtatggagaggaggtggccgacaagggcggcatgctgctggacagcacagccctgctggtgaccccccgcatcctgaaggccatgacagagcggcagagcgagttcaccaacttcaagaggatccgcatcgccatgggcacctggaatgtgaatggaggcaagcagttccgcagcaatgtgctgaggacagctgagctgacagactggctgctggacagcccccagctgagcggggccacagacagccaggatgacagcagccctgctgacatctttgctgtgggctttgaggagatggtggagctgtctgctggcaacatcgtgaatgccagcaccaccaacaagaagatgtggggcgagcagctgcagaaggccatcagccgcagccaccgctacatcctgctgaccagcgcccagctggtgggcgtgtgcctgtacatctttgtgcggccctaccacgtgcccttcatcagagatgtggccatcgacacagtgaagacaggcatgggcggcaaggccggcaacaagggagctgtgggcatccgcttccagttccacagcaccagcttctgcttcatctgcagccacctgacagctggccagagccaggtgaaggagagaaatgaagactacaaggagatcacccagaagctgtgcttccccatgggcagaaatgtgttcagccatgactatgtgttctggtgtggggacttcaactacagaattgacctgacctatgaggaggtgttctactttgtgaagaggcaggactggaagaagctgctggagtttgaccagctgcagctgcagaagagcagcggcaagatcttcaaggacttccacgagggcgccatcaactttggccccacctacaagtatgatgtgggcagcgctgcctatgacaccagtgacaagtgcaggaccccagcctggacagacagagtgctgtggtggaggaagaagcacccctttgacaagacagctggggagctgaacctgctggacagcgacctggatgtggacaccaaggtgcgccacacctggagccctggggccctgcagtactacggccgggcagagctgcaggccagtgaccacaggcctgtgctggccatcgtggaggtggaggtgcaggaggtggatgtgggcgcccgggagagggtcttccaggaggtgtcctccttccagggccccctggatgccaccgtggtggtgaacctgcagagccccaccctggaggagaagaatgagttccctgaggacctgaggacagagctgatgcagaccctgggcagctatggcaccatcgtgctggtgcgcatcaaccagggccagatgctggtgacctttgctgacagccacagcgccctgtctgtgctggatgtggatggcatgaaggtgaagggccgggctgtgaagatccggcccaagaccaaggactggctgaagggcctgcgggaggagatcatcaggaagagggacagcatggcccctgtgagccccacagccaacagctgcctgctggaggagaactttgacttcaccagcctggactatgagagcgagggggacatcctggaggatgatgaggactacctggtggatgagttcaaccagcccggggtgtctgacagcgagctgggcggagatgacctgagtgatgtgcccggccccacagccctggccccacccagcaagagccctgccctgaccaagaagaagcagcaccccacctacaaggccggcctgatggtgaagaagagcgccagtgatgccagcatcagcagcggcacccacggccagtacagcatcctgcagacagcccggctgctgcccggggccccccagcagccccccaaggccaggacaggcatcagcaagccctacaacgtgaagcagatcaagaccaccaatgcccaggaggccgaggccgccatccgctgcctgctggaggcccggggcggggccagcgaggaggccctgtctgctgtggccccccgggacctggaggccagcagcgagcctgagcccacccctggggccgccaagccagagaccccccaggccccacccctgctgccccggcggcccccaccccgggtgcctgccatcaagaagcccaccctgcggaggacaggcaagcccctgagccctgaggagcagtttgagcagcagacagtgcacttcaccatcggccccccagagacctctgtggaggcccctcctgtggtgacagccccccgggtgccccctgtgcccaagcccaggaccttccagcccgggaaggctgctgagcggcccagccacaggaagccagccagtgatgaggcccctcctggggccggggcctctgtgcccccacccctggaggccccacccctggtgcccaaggtgccccccaggaggaagaagagcgccccagctgccttccacctgcaggtgctgcagagcaacagccagctgctgcagggcctgacctacaacagcagtgacagccccagcggccaccccccagctgctggcaccgtcttcccccagggcgacttcctgagcaccagcagcgccaccagcccagacagtgatggcaccaaggccatgaagccagaggccgcccccctgctgggggactaccaggaccccttctggaacctgctgcaccaccccaagctgctgaacaacacctggctgagcaagagcagtgaccccctggacagcggcaccaggagccccaagagggaccccatcgaccctgtgtctgctggggccagcgctgccaaggccgagctgcccccagaccacgagcacaagaccctgggccactgggtgaccatcagtgaccaggagaagaggacagccctgcaggtgtttgaccccctggccaagacctag

SEQ ID NO: 172233 - DNA, 279 bp, synthetic construct
  misc_feature 1..279: note = Description of Artificial Sequence: Synthetic coding sequence
  source 1..279: mol_type = other DNA
atgttcctgtatgccagcggccctgcccccccagctggcacctgccgctggggcggccagggcggcaccagcctgtccttcctggtgctggtgacaggctgcacctctgtgggccgcatcccagatgctgagatctacaagatcacagccacagacttctaccccctgcaggaggaggccaaggaggaggagcggctgattgccctgaagaagatcctgagcagtggagtcttctacttctcctggcccaatgatggcagcagatttgacctgacctag

SEQ ID NO: 172234 - DNA, 1551 bp, synthetic construct
  misc_feature 1..1551: note = Description of Artificial Sequence: Synthetic coding sequence
  source 1..1551: mol_type = other DNA
atgttcctgtatgccagcggccctgcccccccagctggcacctgccgctggggcggccagggcggcaccagcctgtccttcctggtgctggtgacaggctgcacctctgtgggccgcatcccagatgctgagatctacaagatcacagccacagacttctaccccctgcaggaggaggccaaggaggaggagcggctgattgccctgaagaagatcctgagcagtggagtcttctacttctcctggcccaatgatggcagcagatttgacctgactgtgaggacccagaagcagggagatgacagcagcgagtggggcaacagcttcttctggaaccagctgctgcacgtgcccctgcggcagcaccaggtgtcctgctgtgactggctgctgaagatcatctgtggggtggtgaccatcagaacagtgtatgccagccacaagcaggccaaggcctgcctggtgtcccgggtgtcctgtgagaggacaggcacccgcttccacacccggggcgtgaatgatgatggccacgtgagcaactttgtggagacagagcagatgatctacatggatgatggagtgagcagctttgtgcagatccggggctctgtgcccctcttctgggagcagcccggcctgcaggtgggcagccaccacctgcggctgcaccggggcctggaggccaatgccccagcctttgacagacacatggtgctgctgaaggagcagtatggccagcaggtggtggtgaacctgctgggcagcagaggaggagaggaggtgctgaacagagccttcaagtttgccaagggcggcaagctggagaagctggagaccctgctgcggccccagctgaagctgcactgggaggactttgatgtgttcaccaagggagaaaatgtgagcccccgcttccagaagggcaccctgaggatgaactgcctggactgcctggacaggaccaacacagtgcagagcttcatcgccctggaggtgctgcacctgcagctgaagaccctgggcctgagcagcaagcccatcgtggacagatttgtggagagcttcaaggccatgtggagcctgaatggccacagcctgagcaaggtgttcaccggcagccgggccctggagggcaaggccaaggtgggcaagctgaaggatggagcccgctccatgagcaggaccatccagagcaacttctttgatggagtgaagcaggaggccatcaagctgctgctggtgggagatgtgtatggagaggaggtggccgacaagggcggcatgctgctggacagcacagccctgctggtgaccccccgcatcctgaaggccatgacagagcggcagagcgagttcaccaacttcaagaggatccgcatcgccatgggcacctggaatgtgaatggaggcaagcagttccgcagcaatgtgctgaggacagctgagctgacagactggctgctggacagcccccagctgagcggggccacagacagccagggcgagggcagtgactttggaggagacaagatccagctgcacctgacctag

SEQ ID NO: 172235 - DNA, 438 bp, synthetic construct
  misc_feature 1..438: note = Description of Artificial Sequence: Synthetic coding sequence
  source 1..438: mol_type = other DNA
atgaatggccgggtggactacctggtgacagaggaggagatcaacctgacccggggccccagcggcctgggcttcaacatcgtgggcggcacagaccagcagtatgtgtccaatgacagcggcatctacgtgagccgcatcaaggaaaatggagctgctgccctggatggccgcctgcaggagggggacaagatcctgtctgtgaatggccaggacctgaagaacctgctgcaccaggatgctgtggacctcttcagaaatgccggctatgctgtgtccctgcgggtgcagcaccggctgcaggtgcagaatggccccatcggccacagaggagagggggaccccagcggcatccccatcttcatggtgctggtgcctgtgtttgccctgaccatggtggccgcctgggccttcatgagataccggcagcagctgtag

SEQ ID NO: 172236 - DNA, 957 bp, synthetic construct
  misc_feature 1..957: note = Description of Artificial Sequence: Synthetic coding sequence
  source 1..957: mol_type = other DNA
atggccggccgcagcctgaccagcaaggccgagcccacagctggagctgtggacagagctgagaaggccggcggccaggacaccagcagccagaagattgaggacctgatggagatggtgcagaagctgcagaaggtgggcagcctggagccccgggtggaggtgctgatcaaccgcatcaatgaggtgcagcaggccaagaagaaggccaacaaggacctgggggaggcccggaccatctgtgaggccctgcagaaggagctggacagcctgcacggggagaaggtgcacctgaaggagatcctgagcaagaagcaggagaccctgcgcatcctgcggctgcactgccaggagaaggagagcgaggcccacaggaagcacaccatgctgcaggagtgcaaggagcgcatcagcgccctgaacctgcagatcgaggaggagaagaacaagcagaggcagctgcggctggcctttgaggagcagctggaggacctgatgggccagcacaaggacctgtgggacttccacatgcctgagcggctggccaaggagatctgtgccctggacagcagcaaggagcagctgctgaaggaggagaagctggtgaaggccaccctggaggatgtgaagcaccagctgtgcagcctgtgtggggctgagggccccagcaccctggatgagggcctcttcctgcggagccaggaggccgccgccaccgtgcagctgttccaggaggagcacaggaaggccgaggagctgctggccgctgctgcccagaggcaccagcagctgcagcagaagtgccagcagcagcagcagaagaggcagaggctgaaggaggagctggagaagcacggcatgcaggtgcctgcccaggcccagagcacccaggaggaggaggccggccctggagatgtggccccccggcccggccggcctgtgacctggtggagctag

SEQ ID NO: 172237 - DNA, 1056 bp, synthetic construct
  misc_feature 1..1056: note = Description of Artificial Sequence: Synthetic coding sequence
  source 1..1056: mol_type = other DNA
atggccggccgcagcctgaccagcaaggccgagcccacagctggagctgtggacagagctgagaaggccggcggccaggacaccagcagccagaagattgaggacctgatggagatggtgcagaagctgcagaaggtgggcagcctggagccccgggtggaggtgctgatcaaccgcatcaatgaggtgcagcaggccaagaagaaggccaacaaggacctgggggaggcccggaccatctgtgaggccctgcagaaggagctggacagcctgcacggggagaaggtgcacctgaaggagatcctgagcaagaagcaggagaccctgcgcatcctgcggctgcactgccaggagaaggagagcgaggcccacaggaagcacaccatgctgcaggagtgcaaggagcgcatcagcgccctgaacctgcagatcgaggaggagaagaacaagcagaggcagctgcggctggcctttgaggagcagctggaggacctgatgggccagcacaaggacctgtgggacttccacatgcctgagcggctggccaaggagatctgtgccctggacagcagcaaggagcagctgctgaaggaggagaagctggtgaaggccaccctggaggatgtgaagcaccagctgtgcagcctgtgtggggctgagggccccagcaccctggatgagggcctcttcctgcggagccaggaggccgccgccaccgtgcagctgttccaggaggagcacaggaaggccgaggagctgctggccgctgctgcccagaggcaccagcagctgcagcagaagtgccagcagcagcagcagaagaggcagaggctgaaggaggagctggagaagcacggcatgcaggtgcctgcccaggcccagagcacccaggaggaggaggccggccctggagatgtggccagccccaagcccctgaagggggagaggcctggagctgcccaccaggccggcccagatgtgctgattggccaggaggacaccctgcacccagacctgagcccccggggcttccaggagatcaaggagctgttctag

SEQ ID NO: 172238 - DNA, 849 bp, synthetic construct
  misc_feature 1..849: note = Description of Artificial Sequence: Synthetic coding sequence
  source 1..849: mol_type = other DNA
atggagatggtgcagaagctgcagaaggtgggcagcctggagccccgggtggaggtgctgatcaaccgcatcaatgaggtgcagcaggccaagaagaaggccaacaaggacctgggggaggcccggaccatctgtgaggccctgcagaaggagctggacagcctgcacggggagaaggtgcacctgaaggagatcctgagcaagaagcaggagaccctgcgcatcctgcggctgcactgccaggagaaggagagcgaggcccacaggaagcacaccatgctgcaggagtgcaaggagcgcatcagcgccctgaacctgcagatcgaggaggagaagaacaagcagaggcagctgcggctggcctttgaggagcagctggaggacctgatgggccagcacaaggacctgtgggacttccacatgcctgagcggctggccaaggagatctgtgccctggacagcagcaaggagcagctgctgaaggaggagaagctggtgaaggccaccctggaggatgtgaagcaccagctgtgcagcctgtgtggggctgagggccccagcaccctggatgagggcctcttcctgcggagccaggaggccgccgccaccgtgcagctgttccaggaggagcacaggaaggccgaggagctgctggccgctgctgcccagaggcaccagcagctgcagcagaagtgccagcagcagcagcagaagaggcagaggctgaaggaggagctggagaagcacggcatgcaggtgcctgcccaggcccagagcacccaggaggaggaggccggccctggagatgtggccccccggcccggccggcctgtgacctggtggagctag

SEQ ID NO: 172239 - DNA, 849 bp, synthetic construct; identical to SEQ ID NO: 172238
  misc_feature 1..849: note = Description of Artificial Sequence: Synthetic coding sequence
  source 1..849: mol_type = other DNA

SEQ ID NO: 172240 - DNA, 657 bp, synthetic construct
  misc_feature 1..657: note = Description of Artificial Sequence: Synthetic coding sequence
  source 1..657: mol_type = other DNA
atggagcggcagggcgtggatgtgccccacgtgaagtgcaaggaccaggagccccagcccctgggggagagcaaggagcacccccgctgggaggagaactgtgaggaggaggccggcggcggccctgccagcgccagctgccagctgactgtgctggagggcaagagcggcctgtacttcagcagcctggacagcagcattgacatcctgcagaagagggcccaggagctgattgagaacatcaacaagagccggcagaaggaccacgccctgatgaccaacttcaggaacagcctgaagaccaaggtgtctgacctgacagagaagctggaggagcgcatctaccagatctacaatgaccacaacaagatcatccaggagaagctgcaggagttcacccagaagatggccaagatcagccacctggagacagagctgaagcaggtgtgccacagcgtggagaccgtgtacaaggacctgtgcctgcagcctgagcagagcctgcggctgcgctggggccctgaccacagccggggcaagagcccccccaggcctggcaacagccagcccccagatgtgtttgtgtcctctgtggccgagaccaccagccaggccacagccagcgaggtgcagaccaacagagatggagaatgttag

SEQ ID NO: 172241 - DNA, 2931 bp, synthetic construct
  misc_feature 1..2931: note = Description of Artificial Sequence: Synthetic coding sequence
  source 1..2931: mol_type = other DNA
atggagaagcagaagccctttgccctgtttgtgccccccaggagcagcagcagccaggtgtctgctgtgaagccccagaccctgggcggggacagcaccttcttcaagagcttcaacaagtgcacagaagatgactttgagttcccctttgccaagaccaacctgagcaagaatggagagaacatcgacagcgaccctgccctgcagaaggtgaacttcctgcctgtgctggagcaggtgggcaacagcgactgccactaccaggagggcctgaaggacagcgacctggagaacagcgagggcctgagccgggtgtacagcaagctgtacaaggaggccgagaagatcaagaagtggaaggtgtccacagaagctgagctgcggcagaaggagagcaagctgcaggagaacaggaagatcatcgaggcccagaggaaggccatccaggagctgcagtttggaaatgagaaggtgtccctgaagctggaggagggcatccaggagaacaaggacctgatcaaggaaaataatgccaccaggcacctgtgcaacctgctgaaggagacctgtgcccggtctgctgagaagaccaagaagtatgaatatgaaagagaggagacccggcaggtgtacatggacctgaacaacaacatcgagaagatgatcacagcctttgaggagctgcgggtgcaggccgagaacagccggctggagatgcacttcaagctgaaggaggactatgagaagatccagcacctggagcaggagtacaagaaggagatcaatgacaaggagaagcaggtgtccctgctgctgatccagatcacagagaaggagaacaagatgaaggacctgaccttcctgctggaggagagccgggacaaggtgaaccagctggaggagaagaccaagctgcagagcgagaacctgaagcagagcattgagaagcagcaccacctgaccaaggagctggaggacatcaaggtgtccctgcagaggtctgtgtccacccagaaggccctggaggaggacctgcagatcgccaccaagaccatctgccagctgacagaggagaaggagacccagatggaggagagcaacaaggcccgggccgcccacagctttgtggtgacagaatttgagaccaccgtgtgcagcctggaggagctgctgaggacagagcagcagaggctggagaagaatgaagaccagctgaagatcctgaccatggagctgcagaagaagagcagcgagctggaggagatgaccaagctgaccaacaacaaggaggtggagctggaggagctgaagaaggtgctgggggagaaggagaccctgctgtatgagaacaagcagtttgagaagattgctgaggagctgaagggcacagagcaggagctgattggcctgctgcaggcccgggagaaggaggtgcatgacctggagatccagctgacagccatcaccaccagcgagcagtactacagcaaggaggtgaaggacctgaagacagagctggagaatgagaagctgaagaacacagagctgaccagccactgcaacaagctgagcctggagaacaaggagctgacccaggagaccagtgacatgaccctggagctgaagaaccagcaggaggacatcaacaacaacaagaagcaggaggagaggatgctgaagcagatcgagaacctgcaggagacagagacccagctgagaaatgagctggagtatgtgcgggaggagctgaagcagaagagagatgaggtgaagtgcaagctggacaagtctgaggagaactgcaacaacctgaggaagcaggtggagaacaagaacaagtacatcgaggagctgcagcaggagaacaaggccctgaagaagaagggcacagctgagagcaagcagctgaatgtgtatgagatcaaggtgaacaagctggagctggagctggagagcgccaagcagaagtttggagagatcacagacacctaccagaaggagattgaggacaagaagatcagcgaggagaacctgctggaggaggtggagaaggccaaggtgattgctgatgaggccgtgaagctgcagaaggagattgacaagcgctgccagcacaagattgctgagatggtggccctgatggagaagcacaagcaccagtatgacaagatcatcgaggagcgggacagcgagctgggcctgtacaagagcaaggagcaggagcagagcagcctgcgggccagcctggagattgagctgagcaacctgaaggccgagctgctgtctgtgaagaagcagctggagattgagcgggaggagaaggagaagctgaagcgggaggccaaggaaaatacagccaccctgaaggagaagaaggacaagaagacccagaccttcctgctggagaccccagagatctactggaagctggacagcaaggctgtgcccagccagacagtgtccaggaacttcacctctgtggaccacggcatcagcaaggacaagagggactacctgtggaccagcgccaagaacaccctgagcacccccctgcccaaggcctacacagtgaagacccccaccaagcccaagctgcagcagcgggagaacctgaacatccccatcgaggagagcaagaagaagaggaagatggcctttgaatttgacatcaacagcgacagcagcgagaccacagacctgctgtccatggtgtctgaggaggagaccctgaagaccctgtacagaaacaacaaccccccagccagccacctgtgtgtgaagacccccaagaaggcccccagcagcctgaccaccccaggcagcaccctgaagtttggagccatcaggaagatgagagaagatcgctgggccgtgattgccaagatggacaggaagaagaagctgaaggaggccgagaagctgtttgtgtag

SEQ ID NO: 172242 - DNA, 2931 bp, synthetic construct; identical to SEQ ID NO: 172241
  misc_feature 1..2931: note = Description of Artificial Sequence: Synthetic coding sequence
  source 1..2931: mol_type = other DNA

SEQ ID NO: 172243 - DNA, 2379 bp, synthetic construct
  misc_feature 1..2379: note = Description of Artificial Sequence: Synthetic coding sequence
  source 1..2379: mol_type = other DNA
atggagaagcagaagccctttgccctgtttgtgccccccaggagcagcagcagccaggtgtctgctgtgaagccccagaccctgggcggggacagcaccttcttcaagagcttcaacaagtgcacagaagatgactttgagttcccctttgccaagaccaacctgagcaagaatggagagaacatcgacagcgaccctgccctgcagaaggtgaacttcctgcctgtgctggagcaggtgggcaacagcgactgccactaccaggagggcctgaaggacagcgacctggagaacagcgagggcctgagccgggtgtacagcaagctgtacaaggaggccgagaagatcaagaagtggaaggtgtccacagaagctgagctgcggcagaaggagagcaagctgcaggagaacaggaagatcatcgaggcccagaggaaggccatccaggagctgcagtttggaaatgagaaggtgtccctgaagctggaggagggcatccaggagaacaaggacctgatcaaggaaaataatgccaccaggcacctgtgcaacctgctgaaggagacctgtgcccggtctgctgagaagaccaagaagtatgaatatgaaagagaggagacccggcaggtgtacatggacctgaacaacaacatcgagaagatgatcacagcctttgaggagctgcgggtgcaggccgagaacagccggctggagatgcacttcaagctgaaggaggactatgagaagatccagcacctggagcaggagtacaagaaggagatcaatgacaaggagaagcaggtgtccctgctgctgatccagatcacagagaaggagaacaagatgaaggacctgaccttcctgctggaggagagccgggacaaggtgaaccagctggaggagaagaccaagctgcagagcgagaacctgaagcagagcattgagaagcagcaccacctgaccaaggagctggaggacatcaaggtgtccctgcagaggtctgtgtccacccagaaggccctggaggaggacctgcagatcgccaccaagaccatctgccagctgacagaggagaaggagacccagatggaggagagcaacaaggcccgggccgcccacagctttgtggtgacagaatttgagaccaccgtgtgcagcctggaggagctgctgaggacagagcagcagaggctggagaagaatgaagaccagctgaagatcctgaccatggagctgcagaagaagagcagcgagctggaggagatgaccaagctgaccaacaacaaggaggtggagctggaggagctgaagaaggtgctgggggagaaggagaccctgctgtatgagaacaagcagtttgagaagattgctgaggagctgaagggcacagagcaggagctgattggcctgctgcaggcccgggagaaggaggtgcatgacctggagatccagctgacagccatcaccaccagcgagcagtactacagcaaggaggtgaaggacctgaagacagagctggagaatgagaagctgaagaacacagagctgaccagccactgcaacaagctgagcctggagaacaaggagctgacccaggagaccagtgacatgaccctggagctgaagaaccagcaggaggacatcaacaacaacaagaagcaggaggagaggatgctgaagcagatcgagaacctgcaggagacagagacccagctgagaaatgagctggagtatgtgcgggaggagctgaagcagaagagagatgaggtgaagtgcaagctggacaagtctgaggagaactgcaacaacctgaggaagcaggtggagaacaagaacaagtacatcgaggagctgcagcaggagaacaaggccctgaagaagaagggcacagctgagagcaagcagctgaatgtgtatgagatcaaggtgaacaagctggagctggagctggagagcgccaagcagaagtttggagagatcacagacacctaccagaaggagattgaggacaagaagatcagcgaggagaacctgctggaggaggtggagaaggccaaggtgattgctgatgaggccgtgaagctgcagaaggagattgacaagcgctgccagcacaagattgctgagatggtggccctgatggagaagcacaagcaccagtatgacaagatcatcgaggagcgggacagcgagctgggcctgtacaagagcaaggagcaggagcagagcagcctgcgggccagcctggagattgagctgagcaacctgaaggccgagctgctgtctgtgaagaagcagctggagattgagcgggaggagaaggagaagctgaagcgggaggccaaggaaaatacagccaccctgaaggagaagaagtag

SEQ ID NO: 172244 - DNA, 2388 bp, synthetic construct
  misc_feature 1..2388: note = Description of Artificial Sequence: Synthetic coding sequence
  source 1..2388: mol_type = other DNA
atggagaagcagaagccctttgccctgtttgtgccccccaggagcagcagcagccaggtgtctgctgtgaagccccagaccctgggcggggacagcaccttcttcaagagcttcaacaagtgcacagaagatgactttgagttcccctttgccaagaccaacctgagcaagaatggagagaacatcgacagcgaccctgccctgcagaaggtgaacttcctgcctgtgctggagcaggtgggcaacagcgactgccactaccaggagggcctgaaggacagcgacctggagaacagcgagggcctgagccgggtgtacagcaagctgtacaaggaggccgagaagatcaagaagtggaaggtgtccacagaagctgagctgcggcagaaggagagcaagctgcaggagaacaggaagatcatcgaggcccagaggaaggccatccaggagctgcagtttggaaatgagaaggtgtccctgaagctggaggagggcatccaggagaacaaggacctgatcaaggaaaataatgccaccaggcacctgtgcaacctgctgaaggagacctgtgcccggtctgctgagaagaccaagaagtatgaatatgaaagagaggagacccggcaggtgtacatggacctgaacaacaacatcgagaagatgatcacagcctttgaggagctgcgggtgcaggccgagaacagccggctggagatgcacttcaagctgaaggaggactatgagaagatccagcacctggagcaggagtacaagaaggagatcaatgacaaggagaagcaggtgtccctgctgctgatccagatcacagagaaggagaacaagatgaaggacctgaccttcctgctggaggagagccgggacaaggtgaaccagctggaggagaagaccaagctgcagagcgagaacctgaagcagagcattgagaagcagcaccacctgaccaaggagctggaggacatcaaggtgtccctgcagaggtctgtgtccacccagaaggccctggaggaggacctgcagatcgccaccaagaccatctgccagctgacagaggagaaggagacccagatggaggagagcaacaaggcccgggccgcccacagctttgtggtgacagaatttgagaccaccgtgtgcagcctggaggagctgctgaggacagagcagcagaggctggagaagaatgaagaccagctgaagatcctgaccatggagctgcagaagaagagcagcgagctggaggagatgaccaagctgaccaacaacaaggaggtggagctggaggagctgaagaaggtgctgggggagaaggagaccctgctgtatgagaacaagcagtttgagaagattgctgaggagctgaagggcacagagcaggagctgattggcctgctgcaggcccgggagaaggaggtgcatgacctggagatccagctgacagccatcaccaccagcgagcagtactacagcaaggaggtgaaggacctgaagacagagctggagaatgagaagctgaagaacacagagctgaccagccactgcaacaagctgagcctggagaacaaggagctgacccaggagaccagtgacatgaccctggagctgaagaaccagcaggaggacatcaacaacaacaagaagcaggaggagaggatgctgaagcagatcgagaacctgcaggagacagagacccagctgagaaatgagctggagtatgtgcgggaggagctgaagcagaagagagatgaggtgaagtgcaagctggacaagtctgaggagaactgcaacaacctgaggaagcaggtggagaacaagaacaagtacatcgaggagctgcagcaggagaacaaggccctgaagaagaagggcacagctgagagcaagcagctgaatgtgtatgagatcaaggtgaacaagctggagctggagctggagagcgccaagcagaagtttggagagatcacagacacctaccagaaggagattgaggacaagaagatcagcgaggagaacctgctggaggaggtggagaaggccaaggtgattgctgatgaggccgtgaagctgcagaaggagattgacaagcgctgccagcacaagattgctgagatggtggccctgatggagaagcacaagcaccagtatgacaagatcatcgaggagcgggacagcgagctgggcctgtacaagagcaaggagcaggagcagagcagcctgcgggccagcctggagattgagctgagcaacctgaaggccgagctgctgtctgtgaagaagcagctggagattgagcgggaggagaaggagaagctgaagcgggaggccaaggaaaatacagccaccctgaaggagaagaaggacaagaagtag

SEQ ID NO: 172245 - DNA, 4593 bp, synthetic construct
  misc_feature 1..4593: note = Description of Artificial Sequence: Synthetic coding sequence
  source 1..4593: mol_type = other DNA
atgcccatccggccagacctgcagcagctggagaagtgcattgatgatgccctgaggaagaatgacttcaagcccctgaagaccctgctgcagattgacatctgtgaagatgtgaagatcaagtgcagcaagcagttcttccacaaggtggacaacctgatctgccgggagctgaacaaggaggacatccacaacgtgtctgccatcctggtgtctgtgggccgctgtgggaagaacatctctgtgctgggccaggccggcctgctgaccatgatcaagcagggcctcatccagaagatggtggcctggtttgagaagagcaaggacatcatccagagccagggcaacagcaaggatgaagctgtgctgaacatgattgaggacctggtggacctgctgctggtgattcatgatgtgtctgatgagggcaagaagcaggtggtggagagctttgtgccccgcatctgcagcctggtgattgacagccgggtgaacatctgcatccagcaggagatcatcaagaagatgaatgccatgctggacaagatgccccaggatgccaggaagatcctgagcaaccaggagatgctgatcctgatgagctccatgggagagcgcatcctggatgctggggactatgacctgcaggtgggcatcgtggaggccctgtgcaggatgaccacagagaagcagaggcaggagctggcccaccagtggttctccatggacttcatcgccaaggccttcaagaggatcaaggacagcgagtttgaaacagactgccgcatcttcctgaacctggtgaatggcatgctgggggacaagagaagagtcttcaccttcccctgcctgagcgccttcctggacaagtatgagctgcagatccccagtgatgagaagctggaggagttctggattgacttcaacctgggcagccagaccctgtccttctacatcgccggggacaatgatgaccaccagtgggaggccgtgacagtgcctgaggagaaggtgcagatctacagcattgaggtgcgggagagcaagaagctgctgaccatcatcctgaagaacacagtgaagatcagcaagcgggagggcaaggagctgctgctgtactttgatgccagcctggagatcaccaacgtgacccagaagatctttggagccaccaagcaccgggagagcatcaggaagcagggcatctctgtggccaagaccagcctgcacatcctgtttgatgccagcggcagccagatcctggtgcctgagagccagatcagccctgtgggggaggagctggtgtccctgaaggagaagagcaagagccccaaggagtttgccaagcccagcaagtacatcaagaacagcgacaagggcaacagaaacaacagccagctggagaagaccacccccagcaagaggaagatgtctgaggcctccatgattgtgtctggagctgaccgctacaccatgaggagccctgtgctcttcagcaacaccagcatcccccccaggagaagacgcatcaagccacccctgcagatgaccagcagcgctgagaagcccagcgtgtcccagaccagcgagaacagagtggacaatgctgccagcctgaagagccgcagcagcgagggccgccacagaagagacaacatcgacaagcacatcaagacagccaagtgtgtggagaacacagagaacaagaatgtggagttccccaaccagaacttcagcgagctgcaggatgtgatcccagacagccaggccgctgagaagagggaccacaccatcctgcccggggtgctggacaacatctgtggcaacaagatccacagcaagtgggcctgctggacccctgtgaccaacatcgagctgtgcaacaaccagagggccagcaccagcagcggggacaccctgaaccaggacatcgtcatcaacaagaagctgaccaagcagaagagcagcagcagcatcagtgaccacaacagcgagggcaccgggaaggtgaagtacaagaaggagcagacagaccacatcaagattgacaaggccgaggtggaggtgtgcaagaagcacaaccagcagcagaaccaccccaagtacagcggccagaagaacacagaaaatgccaagcagagcgactggcctgtggagagcgagaccaccttcaagtctgtgctgctgaacaagaccatcgaggagagcctcatctacaggaagaagtacatcctgagcaaggatgtgaacacagccacctgtgacaagaaccccagcgccagcaagaatgtgcagagccacaggaaggccgagaaggagctgaccagcgagctgaacagctgggacagcaagcagaagaagatgagggagaagagcaagggcaaggagttcaccaacgtggccgagagcctcatcagccagatcaacaagcgctacaagaccaaggatgacatcaagagcaccaggaagctgaaggagagcctcatcaacagcggcttcagcaacaagcctgtggtgcagctgagcaaggagaaggtgcagaagaagagctacaggaagctgaagaccacctttgtgaatgtgaccagcgagtgccctgtgaatgatgtgtacaacttcaacctgaatggagcagatgaccccatcatcaagctgggcatccaggagttccaggccacagccaaggaggcctgtgccgacaggagcatccggctggtgggccccagaaatcatgatgagctgaagagctctgtgaagaccaaggacaagaagatcatcaccaaccaccagaagaagaacctcttcagtgacacagaaacagagtaccgctgtgatgacagcaagacagacatctcctggctgcgggagcccaagagcaagccccagctgattgactacagcaggaacaagaatgtgaagaaccacaagagcggcaagagccgcagcagcctggagaagggccagcccagcagcaagatgacccccagcaagaacatcaccaagaagatggacaagaccatccctgagggccgcatccggctgcccaggaaggccaccaagaccaagaagaactacaaggacctgagcaacagcgagagtgaatgtgagcaggagttcagccacagcttcaaggagaacatccctgtgaaggaggagaacatccacagcaggatgaagacagtgaagctgcccaagaagcagcagaaggtgttctgtgccgagacagagaaggagctgagcaagcagtggaagaacagcagcctgctgaaggatgccatccgggacaactgcctggacctgagccccaggagcctgagcggcagccccagcagcattgaggtgacccgctgcatcgagaagatcacagagaaggacttcacccaggactatgactgcatcaccaagagcatcagcccctaccccaagaccagcagcctggagagcctgaacagcaacagcggcgtgggcggcaccatcaagagccccaagaacaatgagaagaacttcctgtgtgccagcgagagctgcagccccatcccccggcccctcttcctgcccaggcacacccccaccaagagcaacaccatcgtgaacaggaagaagatcagcagcctggtgctgacccaggagacccagaacagcaacagctacagtgatgtgagcagctacagcagcgaggagcgcttcatggagattgagagcccccacatcaatgaaaactacatccagagcaagcgggaggagagccacctggccagcagcctgagcaagagcagcgagggccgggagaagacctggtttgacatgccctgtgatgccacccacgtgtctggccccacccagcacctgagcaggaagaggatctacatcgaggacaacctgagcaacagcaatgaggtggagatggaggagaagggggagcggcgggccaacctgctgcccaagaagctgtgcaagattgaagatgctgaccaccacatccacaagatgtctgagagcgtgagcagcctgagcaccaatgacttcagcatcccctgggagacctggcagaatgaatttgctggcatcgagatgacctatgagacctatgagcggctgaacagcgagttcaagagaagaaacaacatccgccacaagatgctgagctacttcaccacccagagctggaagacagcccagcagcacctgcggaccatgaaccaccagagccaggacagccgcatcaagaagctggacaagttccagttcatcatcatcgaggagctggagaactttgagaaggacagccagagcctgaaggacctggagaaggagtttgtggacttctgggagaagatcttccagaagttcagcgcctaccagaagtctgagcagcagaggctgcacctgctgaagaccagcctggccaagtctgtgttctgcaacacagacagcgaggagaccgtcttcaccagcgagatgtgcctgatgaaggaggacatgaaggtgctgcaggaccggctgctgaaggacatgctggaggaggagctgctgaatgtgcggcgggagctgatgtctgtgttcatgagccatgaaagaaatgccaacgtgtag

SEQ ID NO: 172246 - DNA, 4593 bp, synthetic construct; identical to SEQ ID NO: 172245
  misc_feature 1..4593: note = Description of Artificial Sequence: Synthetic coding sequence
  source 1..4593: mol_type = other DNA

SEQ ID NO: 172247 - DNA, 3072 bp, synthetic construct
  misc_feature 1..3072: note = Description of Artificial Sequence: Synthetic coding sequence
  source 1..3072: mol_type = other DNA
atgcccatccggccagacctgcagcagctggagaagtgcattgatgatgccctgaggaagaatgacttcaagcccctgaagaccctgctgcagattgacatctgtgaagatgtgaagatcaagtgcagcaagcagttcttccacaaggtggacaacctgatctgccgggagctgaacaaggaggacatccacaacgtgtctgccatcctggtgtctgtgggccgctgtgggaagaacatctctgtgctgggccaggccggcctgctgaccatgatcaagcagggcctcatccagaagatggtggcctggtttgagaagagcaaggacatcatccagagccagggcaacagcaaggatgaagctgtgctgaacatgattgaggacctggtggacctgctgctggtgattcatgatgtgtctgatgagggcaagaagcaggtggtggagagctttgtgccccgcatctgcagcctggtgattgacagccgggtgaacatctgcatccagcaggagatcatcaagaagatgaatgccatgctggacaagatgccccaggatgccaggaagatcctgagcaaccaggagatgctgatcctgatgagctccatgggagagcgcatcctggatgctggggactatgacctgcaggtgggcatcgtggaggccctgtgcaggatgaccacagagaagcagaggcaggagctggcccaccagtggttctccatggacttcatcgccaaggccttcaagaggatcaaggacagcgagtttgaaacagactgccgcatcttcctgaacctggtgaatggcatgctgggggacaagagaagagtcttcaccttcccctgcctgagcgccttcctggacaagtatgagctgcagatccccagtgatgagaagctggaggagttctggattgacttcaacctgggcagccagaccctgtccttctacatcgccggggacaatgatgaccaccagtgggaggccgtgacagtgcctgaggagaaggtgcagatctacagcattgaggtgcgggagagcaagaagctgctgaccatcatcctgaagaacacagtgaagatcagcaagcgggagggcaaggagctgctgctgtactttgatgccagcctggagatcaccaacgtgacccagaagatctttggagccaccaagcaccgggagagcatcaggaagcagggcatctctgtggccaagaccagcctgcacatcctgtttgatgccagcggcagccagatcctggtgcctgagagccagatcagccctgtgggggaggagctggtgtccctgaaggagaagagcaagagccccaaggagtttgccaagcccagcaagtacatcaagaacagcgacaagggcaacagaaacaacagccagctggagaagaccacccccagcaagaggaagatgtctgaggcctccatgattgtgtctggagctgaccgctacaccatgaggagccctgtgctcttcagcaacaccagcatcccccccaggagaagacgcatcaagccacccctgcagatgaccagcagcgctgagaagcccagcgtgtcccagaccagcgagaacagagtggacaatgctgccagcctgaagagccgcagcagcgagggccgccacagaagagacaacatcgacaagcacatcaagacagccaagtgtgtggagaacacagagaacaagaatgtggagttccccaaccagaacttcagcgagctgcaggatgtgatcccagacagccaggccgctgagaagagggaccacaccatcctgcccggggtgctggacaacatctgtggcaacaagatccacagcaagtgggcctgctggacccctgtgaccaacatcgagctgtgcaacaaccagagggccagcaccagcagcggggacaccctgaaccaggacatcgtcatcaacaagaagctgaccaagcagaagagcagcagcagcatcagtgaccacaacagcgagggcaccgggaaggtgaagtacaagaaggagcagacagaccacatcaagattgacaaggccgaggtggaggtgtgcaagaagcacaaccagcagcagaaccaccccaagtacagcggccagaagaacacagaaaatgccaagcagagcgactggcctgtggagagcgagaccaccttcaagtctgtgctgctgaacaagaccatcgaggagagcctcatctacaggaagaagtacatcctgagcaaggatgtgaacacagccacctgtgacaagaaccccagcgccagcaagaatgtgcagagccacaggaaggccgagaaggagctgaccagcgagctgaacagctgggacagcaagcagaagaagatgagggagaagagcaagggcaaggagttcaccaacgtggccgagagcctcatcagccagatcaacaagcgctacaagaccaaggatgacatcaagagcaccaggaagctgaaggagagcctcatcaacagcggcttcagcaacaagcctgtggtgcagctgagcaaggagaaggtgcagaagaagagctacaggaagctgaagaccacctttgtgaatgtgaccagcgagtgccctgtgaatgatgtgtacaacttcaacctgaatggagcagatgaccccatcatcaagctgggcatccaggagttccaggccacagccaaggaggcctgtgccgacaggagcatccggctggtgggccccagaaatcatgatgagctgaagagctctgtgaagaccaaggacaagaagatcatcaccaaccaccagaagaagaacctcttcagtgacacagaaacagagtaccgctgtgatgacagcaagacagacatctcctggctgcgggagcccaagagcaagccccagctgattgactacagcaggaacaagaatgtgaagaaccacaagagcggcaagagccgcagcagcctggagaagggccagcccagcagcaagatgacccccagcaagaacatcaccaagaagatggacaagaccatccctgagggccgcatccggctgcccaggaaggccaccaagaccaagaagtag

SEQ ID NO: 172248 - DNA, 711 bp, synthetic construct
  misc_feature 1..711: note = Description of Artificial Sequence: Synthetic coding sequence
  source 1..711: mol_type = other DNA
atggtgagcagcggcaagaagtacagcaggaagagcggcaagcccagcgtggaggaccagttcacccgggcctatgactttgaaacagaggacaagaaggacctgagcggcagcgaggaggatgtgattgagggcaagacagctgtgattgagaagaggaggaagaagaggagcagcgctggggtggtggaggacatgggcggggaggtgcagaacatgctggagggcgtgggcgtggacatcaacaaggccctgctggccaagaggaagaggctggagatgtacaccaaggccagcctgaagaccagcaaccagaagattgaacatgtgtggaagacccagcaggaccagaggcagaagctgaaccaggagtacagccagcagttcctgaccctcttccagcagtgggacctggacatgcagaaggccgaggagcaggaggagaagatcctgaacatgttccggcagcagcagaagatcctgcagcagagccgcatcgtgcagagccagaggctgaagaccatcaagcagctgtatgagcagttcatcaagtccatggaggagctggagaagaaccacgacaacctgctgaccggggcccagaatgagttcaagaaggagatggccatgctgcagaagaagatcatgatggagacccagcagcaggagatcgcctctgtgaggaagagcctgcagagcatgctgttctag

SEQ ID NO: 172249 - DNA, 711 bp, synthetic construct; identical to SEQ ID NO: 172248
  misc_feature 1..711: note = Description of Artificial Sequence: Synthetic coding sequence
  source 1..711: mol_type = other DNA

SEQ ID NO: 172250 - DNA, 711 bp, synthetic construct; identical to SEQ ID NO: 172248
  misc_feature 1..711: note = Description of Artificial Sequence: Synthetic coding sequence
  source 1..711: mol_type = other DNA

SEQ ID NO: 172251 - DNA, 942 bp, synthetic construct
  misc_feature 1..942: note = Description of Artificial Sequence: Synthetic coding sequence
  source 1..942: mol_type = other DNA
atgctgctgctggccgacatggatgtggtgaaccagctggtggccggcggccagttccgggtggtgaaggagcccctgggctttgtgaaggtgctgcagtgggtgtttgccatctttgcctttgccacctgtggcagctacagcggggagctgcagctgtctgtggactgtgccaacaagacagaaagtgacctgagcattgaggtggagtttgagtaccccttccggctgcaccaggtgtactttgatgcccccacctgccggggcggcaccaccaaggtgttcctggtgggggactacagcagcagcgctgagttctttgtgacagtggccgtgtttgccttcctgtacagcatgggcgccctggccacctacatcttcctgcagaacaagtaccgggagaacaacaagggccccatgctggacttcctggccacagctgtgtttgccttcatgtggctggtgagcagcagcgcctgggccaagggcctgagtgatgtgaagatggccacagatcctgagaacatcatcaaggagatgcctgtgtgccggcagacaggcaacacctgcaaggagctgcgggaccctgtgaccagcggcctgaacacctctgtggtgtttggcttcctgaacctggtgctgtgggtgggcaacctgtggtttgtgttcaaggagaccggctgggccgcccccttcctgcgggcccctcctggggcccctgagaagcagcctgcccctggagatgcctatggagatgctggctacggccagggccctgggggctacggcccccaggacagctatggcccccagggcggctaccagcctgactatggccagcctgctggcagcggcggcagcggctacggcccccagggcgactatggccagcagggctacggcccccagggcgcccccaccagcttcagcaaccagatgtag

SEQ ID NO: 172252 - DNA, 942 bp, synthetic construct; identical to SEQ ID NO: 172251
  misc_feature 1..942: note = Description of Artificial Sequence: Synthetic coding sequence
  source 1..942: mol_type = other DNA

SEQ ID NO: 172253 - DNA, 588 bp, synthetic construct
  misc_feature 1..588: note = Description of Artificial Sequence: Synthetic coding sequence
  source 1..588: mol_type = other DNA
atgggcgccctggccacctacatcttcctgcagaacaagtaccgggagaacaacaagggccccatgctggacttcctggccacagctgtgtttgccttcatgtggctggtgagcagcagcgcctgggccaagggcctgagtgatgtgaagatggccacagatcctgagaacatcatcaaggagatgcctgtgtgccggcagacaggcaacacctgcaaggagctgcgggaccctgtgaccagcggcctgaacacctctgtggtgtttggcttcctgaacctggtgctgtgggtgggcaacctgtggtttgtgttcaaggagaccggctgggccgcccccttcctgcgggcccctcctggggcccctgagaagcagcctgcccctggagatgcctatggagatgctggctacggccagggccctgggggctacggcccccaggacagctatggcccccagggcggctaccagcctgactatggccagcctgctggcagcggcggcagcggctacggcccccagggcgactatggccagcagggctacggcccccagggcgcccccaccagcttcagcaaccagatgtag

SEQ ID NO: 172254 - DNA, 2712 bp, synthetic construct
  misc_feature 1..2712: note = Description of Artificial Sequence: Synthetic coding sequence
  source 1..2712: mol_type = other DNA
atggagggctacagcgaggaggccagcctgctgcggcacctggagaaggtggccagcgaggaggaggaggtgcccctggtggtgtacctgaaggaaaatgctgccctgctgacagccaacggcctgcacctgagccagaaccgggaggcccagcagagcagccctgcccctcctcctgctgaggtgcacagccctgctgctgatgtgaaccagaacctggccagccccagcgccaccctgaccacccccaccagcaacagcagccacaaccccccagccacagatgtgaaccagaaccccccagccaccgtggtgccccagagcctgcccctgagcagcatccagcagaacagcagcgaggcccagctgcccagcaatggcaccggccctgccagcaagcccagcaccctgtgtgctgatggccagccccaggccccagctgaggaggtgcgctgcagcaccctgctgattgacaaggtgtccaccccagccaccaccaccagcaccttcagccgggaggccaccctcatccccagcagccggcccccagccagtgacttcatgagcagcagcctgctgattgacatccagcccaacaccctggtggtgtctgctgaccaggagatgagcggccgggccgccgccaccacccccaccaaggtgtacagcgaggtgcacttcaccctggccaagccacccagcgtggtgaacagaacagcccggcccttcggcatccaggcccctgggggcaccagccagatggagaggagccccatgctggagcggcggcactttggagagaaggccccagccccccagccccccagcctgcctgacaggagcccccggccccagaggcacatcatgagccgcagccccatggtggagaggaggatgatgggccagaggagccctgccagcgagcggcggcccctgggcaacttcaccgccccacccacctacacagagaccctgagcacagcccccctggcctcctgggtgcgcagccccccatcctacagcgtgctgtaccccagcagtgaccccaagagcagccacctgaagggccaggccgtgcctgccagcaagacaggcatcctggaggagagcatggcccggcggggcagcaggaagtccatgttcacctttgtggagaagcccaaggtgacccccaacccagacctgctggacctggtgcagacagcagatgagaagaggcggcagagggaccagggcgaggtgggcgtggaggaggagccctttgccctgggcgctgaggccagcaacttccagcaggagcccgccccccgggaccgggccagccctgctgctgctgaggaggtggtgcctgagtgggccagctgcctgaagagcccccgcatccaggccaagcccaagcccaagcccaaccagaacctgtctgaggccagcgggaaaggagctgagctgtatgcccggcggcagagcaggatggagaagtatgtgattgagagcagcagccacaccccagagctggcccgctgccccagccccaccatgagcctgcccagctcctggaagtaccccaccaatgcccctggggccttccgggtggccagccgcagccctgcccggaccccaccagccagcctgtaccacggctacctgcctgaaaatggagtgctgcggcctgagcccaccaagcagcccccctaccagctgcggcccagcctgtttgtgctgagccccatcaaggagcccgccaaggtgagccccagggctgccagccctgccaagcccagcagcctggacctggtgcccaacctgcccaagggggccctgccccccagccctgccctgccccggcccagccgcagcagccctggcctgtacaccagccctggccaggacagcctgcagcccacagctgtgtccccaccctatggaggagacatcagccctgtgagccccagccgggcctggagcccccgggccaagcaggccccccggcccagcttcagcaccagaaatgccggcatcgaggcccaggaccggcgggagagcctgcccaccagccccccctggacccctggggccagcaggcctcccagcagcctggatggctgggtgtccccaggcccctgggagcccggccggggcagctccatgagcagccccccacccctgcccccacctccacccatgagccccagctggagcgagaggtctgtgagccccctgcggcctgagacagaggcccggccccccagccggcagctgcaggccctgctggccaggaacatcatcaatgctgcccggaggaagagcgccagccccaggtctgctggagctgagaacccccggcccttcagccccccccgggcccctcctcctcctcctcctcctcctcctcctccacccaggatgaggagcccccagcctgcccggcccggcagcgctgctgtgcctggggccgcctttgcccccatccccaggagccccctgcctgctggccccagcagctgcaccagccccaggagccccctgcctgccccaccccggcccttcctgtaccgccgcagccccacagacagtgatgtgtccctggacagtgaagattctggggccaagagccctggcatcctgggctacaacatctgcccccggggctggaatggcagcctgcggctgaagaggggcagcctgcctgctgaggccagctgcaccacctag

SEQ ID NO: 172255 - DNA, 2790 bp, synthetic construct
  misc_feature 1..2790: note = Description of Artificial Sequence: Synthetic coding sequence
  source 1..2790: mol_type = other DNA
atgctgggcccccacctgcccccaccacccctggcccccagcgagggccggcccaccccctgtgccttccagatcccagatggcagctaccgctgcctggccctggaggccgaggagagcagtggagaggagggcctgcagggcgaggtgggccccacagacctggaggaggatgagggcgtgagccgctctggagatgacagcgcctgccgggtgacccagggcaccccccagctgcccaaggccctgggcatccagccccccagctgcagccgggaggagcagggcgccagccagcatgatgaccgggccagccaggactgggatgtggtgaaggccggccagatgatgacagccagccccagccctggccctggcccccgggtggcccagaagccagccctgggccgcagcaccagcctgacagagaaggacctgaaggaggccaaggcccggagccagcagattgctgcccagctgaccaccccacccagcagcaacagccggggcgtgcagctgttcaacagaagacggcagagggtgaatgagttcaccctggagagccacggccagaggggccagaagcccagccaggagagcctgcgggtgctgcccagcagcctgcccggccacgcccctggcctgagcctgagcagcaccagcctgcctgagcccggccccccaagacaccccagcccccagagcccagacagaggagtgcccggccacagcatggagggctacagcgaggaggccagcctgctgcggcacctggagaaggtggccagcgaggaggaggaggtgcccctggtggtgtacctgaaggaaaatgctgccctgctgacagccaacggcctgcacctgagccagaaccgggaggcccagcagagcagccctgcccctcctcctgctgaggtgcacagccctgctgctgatgtgaaccagaacctggccagccccagcgccaccctgaccacccccaccagcaacagcagccacaaccccccagccacagatgtgaaccagaaccccccagccaccgtggtgccccagagcctgcccctgagcagcatccagcagaacagcagcgaggcccagctgcccagcaatggcaccggccctgccagcaagcccagcaccctgtgtgctgatggccagccccaggccccagctgaggaggtgcgctgcagcaccctgctgattgacaaggtgtccaccccagccaccaccaccagcaccttcagccgggaggccaccctcatccccagcagccggcccccagccagtgacttcatgagcagcagcctgctgattgacatccagcccaacaccctggtggtgtctgctgaccaggagatgagcggccgggccgccgccaccacccccaccaaggtgtacagcgaggtgcacttcaccctggccaagccacccagcgtggtgaacagaacagcccggcccttcggcatccaggcccctgggggcaccagccagatggagaggagccccatgctggagcggcggcactttggagagaaggccccagccccccagccccccagcctgcctgacaggagcccccggccccagaggcacatcatgagccgcagccccatggtggagaggaggatgatgggccagaggagccctgccagcgagcggcggcccctgggcaacttcaccgccccacccacctacacagagaccctgagcacagcccccctggcctcctgggtgcgcagccccccatcctacagcgtgctgtaccccagcagtgaccccaagagcagccacctgaagggccaggccgtgcctgccagcaagacaggcatcctggaggagagcatggcccggcggggcagcaggaagtccatgttcacctttgtggagaagcccaaggtgacccccaacccagacctgctggacctggtgcagacagcagatgagaagaggcggcagagggaccagggcgaggtgggcgtggaggaggagccctttgccctgggcgctgaggccagcaacttccagcaggagcccgccccccgggaccgggccagccctgctgctgctgaggaggtggtgcctgagtgggccagctgcctgaagagcccccgcatccaggccaagcccaagcccaagcccaaccagaacctgtctgaggccagcgggaaaggagctgagctgtatgcccggcggcagagcaggatggagaagtatgtgattgagagcagcagccacaccccagagctggcccgctgccccagccccaccatgagcctgcccagctcctggaagtaccccaccaatgcccctggggccttccgggtggccagccgcagccctgcccggaccccaccagccagcctgtaccacggctacctgcctgaaaatggagtgctgcggcctgagcccaccaagcagcccccctaccagctgcggcccagcctgtttgtgctgagccccatcaaggagcccgccaaggtgagccccagggctgccagccctgccaagcccagcagcctggacctggtgcccaacctgcccaagggggccctgccccccagccctgccctgccccggcccagccgcagcagccctggcctgtacaccagccctggccaggacagcctgcagcccacagctgtgtccccaccctatggaggagacatcagccctgtgagccccagccgggcctggagcccccgggccaagcaggccccccggcccagcttcagcaccagaaatgccggcatcgaggcccaggtgtggaagcccagcttctgcttcaagtag

SEQ ID NO: 172256 - DNA, 2058 bp, synthetic construct
  misc_feature 1..2058: note = Description of Artificial Sequence: Synthetic coding sequence
  source 1..2058: mol_type = other DNA
atggagggctacagcgaggaggccagcctgctgcggcacctggagaaggtggccagcgaggaggaggaggtgcccctggtggtgtacctgaaggaaaatgctgccctgctgacagccaacggcctgcacctgagccagaaccgggaggcccagcagagcagccctgcccctcctcctgctgaggtgcacagccctgctgctgatgtgaaccagaacctggccagccccagcgccaccctgaccacccccaccagcaacagcagccacaaccccccagccacagatgtgaaccagaaccccccagccaccgtggtgccccagagcctgcccctgagcagcatccagcagaacagcagcgaggcccagctgcccagcaatggcaccggccctgccagcaagcccagcaccctgtgtgctgatggccagccccaggccccagctgaggaggtgcgctgcagcaccctgctgattgacaaggtgtccaccccagccaccaccaccagcaccttcagccgggaggccaccctcatccccagcagccggcccccagccagtgacttcatgagcagcagcctgctgattgacatccagcccaacaccctggtggtgtctgctgaccaggagatgagcggccgggccgccgccaccacccccaccaaggtgtacagcgaggtgcacttcaccctggccaagccacccagcgtggtgaacagaacagcccggcccttcggcatccaggcccctgggggcaccagccagatggagaggagccccatgctggagcggcggcactttggagagaaggccccagccccccagccccccagcctgcctgacaggagcccccggccccagaggcacatcatgagccgcagccccatggtggagaggaggatgatgggccagaggagccctgccagcgagcggcggcccctgggcaacttcaccgccccacccacctacacagagaccctgagcacagcccccctggcctcctgggtgcgcagccccccatcctacagcgtgctgtaccccagcagtgaccccaagagcagccacctgaagggccaggccgtgcctgccagcaagacaggcatcctggaggagagcatggcccggcggggcagcaggaagtccatgttcacctttgtggagaagcccaaggtgacccccaacccagacctgctggacctggtgcagacagcagatgagaagaggcggcagagggaccagggcgaggtgggcgtggaggaggagccctttgccctgggcgctgaggccagcaacttccagcaggagcccgccccccgggaccgggccagccctgctgctgctgaggaggtggtgcctgagtgggccagctgcctgaagagcccccgcatccaggccaagcccaagcccaagcccaaccagaacctgtctgaggccagcgggaaaggagctgagctgtatgcccggcggcagagcaggatggagaagtatgtgattgagagcagcagccacaccccagagctggcccgctgccccagccccaccatgagcctgcccagctcctggaagtaccccaccaatgcccctggggccttccgggtggccagccgcagccctgcccggaccccaccagccagcctgtaccacggctacctgcctgaaaatggagtgctgcggcctgagcccaccaagcagcccccctaccagctgcggcccagcctgtttgtgctgagccccatcaaggagcccgccaaggtgagccccagggctgccagccctgccaagcccagcagcctggacctggtgcccaacctgcccaagggggccctgccccccagccctgccctgccccggcccagccgcagcagccctggcctgtacaccagccctggccaggacagcctgcagcccacagctgtgtccccaccctatggaggagacatcagccctgtgagccccagccgggcctggagcccccgggccaagcaggccccccggcccagcttcagcaccagaaatgccggcatcgaggcccaggtgtggaagcccagcttctgcttcaagtag

SEQ ID NO: 172257 - DNA, 2790 bp, synthetic construct; identical to SEQ ID NO: 172255
  misc_feature 1..2790: note = Description of Artificial Sequence: Synthetic coding sequence
  source 1..2790: mol_type = other DNA

SEQ ID NO: 172258 - DNA, 636 bp, synthetic construct
  misc_feature 1..636: note = Description of Artificial Sequence: Synthetic coding sequence
  source 1..636: mol_type = other DNA
atggacaacctgagcagcgaggagatccagcagagggcccaccagatcacagatgagagcctggagagcacccggcgcatcctgggcctggccatcgagagccaggatgctggcatcaagaccatcaccatgctggatgagcagaaggagcagctgaacagaattgaggagggcctggaccagatcaacaaggacatgagggagacagagaagaccctgacagagctgaacaagtgctgcggcctgtgtgtgtgcccctgcaacagaaccaagaactttgaaagtggcaaggcctacaagaccacctggggagatggaggagagaacagcccctgcaatgtggtgtccaagcagcccggccctgtgaccaacggccagctgcagcagcccaccaccggggccgccagcggcggctacatcaagaggatcaccaatgatgccagagaagatgagatggaggagaacctgacccaggtgggcagcatcctgggcaacctgaaggacatggccctgaacattggaaatgaaattgatgcccagaacccccagatcaagaggatcacagacaaggctgacaccaacagagacagaattgacatcgccaatgcccgggccaagaagctgattgacagctag

SEQ ID NO: 172259 - DNA, 477 bp, synthetic construct
  misc_feature 1..477: note = Description of Artificial Sequence: Synthetic coding sequence
  source 1..477: mol_type = other DNA
atggacaacctgagcagcgaggagatccagcagagggcccaccagatcacagatgagagcctggagagcacccggcgcatcctgggcctggccatcgagagccaggatgctggcatcaagaccatcaccatgctggatgagcagaaggagcagctgaacagaattgaggagggcctggaccagatcaacaaggacatgagggagacagagaagaccctgacagagctgaacaagtgctgcggcctgtgtgtgtgcccctgcaacagcatcaccaatgatgcccgggaggatgagatggaggagaacctgacccaggtgggcagcatcctgggcaacctgaaggacatggccctgaacattggaaatgaaattgatgcccagaacccccagatcaagaggatcacagacaaggctgacaccaacagagacagaattgatattgccaatgcccgggccaagaagctgattgacagctag

SEQ ID NO: 172260 - DNA, 477 bp, synthetic construct; identical to SEQ ID NO: 172259
  misc_feature 1..477: note = Description of Artificial Sequence: Synthetic coding sequence
  source 1..477: mol_type = other DNA

SEQ ID NO: 172261 - DNA, 621 bp, synthetic construct
  misc_feature 1..621: note = Description of Artificial Sequence: Synthetic coding sequence
  source 1..621: mol_type = other DNA
atggctgaagatgctgacatgagaaatgagctggaggagatgcagaggagagctgaccagctggctgatgagagcctggagagcaccaggaggatgctgcagctggtggaggagagcaaggatgctggcatccgcaccctggtgatgctggatgagcagggcgagcagctggagcgcatcgaggagggcatggaccagatcaacaaggacatgaaggaggccgagaagaacctgacagacctgggcaagttctgtggcctgtgtgtgtgcccctgcaacaagctgaagagcagtgatgcctacaagaaggcctggggcaacaaccaggatggagtggtggccagccagcctgcccgggtggtggatgagcgggagcagatggccatcagcggcggcttcatcagaagagtgaccaatgatgccagagaaaatgagatggatgagaacctggagcaggtgtctggcatcatcggcaacctgcggcacatggccctggacatgggaaatgaaattgacacccagaaccggcagattgaccgcatcatggagaaggctgacagcaacaagaccagaattgatgaggccaaccagagggccaccaagatgctgggcagcggctag

SEQ ID NO: 172262 - DNA, 621 bp, synthetic construct
  misc_feature 1..621: note = Description of Artificial Sequence: Synthetic coding sequence
  source 1..621: mol_type = other DNA
atggctgaagatgctgacatgagaaatgagctggaggagatgcagaggagagctgaccagctggctgatgagagcctggagagcaccaggaggatgctgcagctggtggaggagagcaaggatgctggcatccgcaccctggtgatgctggatgagcagggcgagcagctggacagagtggaggagggcatgaaccacatcaaccaggacatgaaggaggccgagaagaacctgaaggacctgggcaagtgctgcggcctcttcatctgcccctgcaacaagctgaagagcagtgatgcctacaagaaggcctggggcaacaaccaggatggagtggtggccagccagcctgcccgggtggtggatgagcgggagcagatggccatcagcggcggcttcatcagaagagtgaccaatgatgccagagaaaatgagatggatgagaacctggagcaggtgtctggcatcatcggcaacctgcggcacatggccctggacatgggaaatgaaattgacacccagaaccggcagattgaccgcatcatggagaaggctgacagcaacaagaccagaattgatgaggccaaccagagggccaccaagatgctgggcagcggctag

SEQ ID NO: 172263 - DNA, 282 bp, synthetic construct
  misc_feature 1..282: note = Description of Artificial Sequence: Synthetic coding sequence
  source 1..282: mol_type = other DNA
atggctgaagatgctgacatgagaaatgagctggaggagatgcagaggagagctgaccagctggctgatgagagcctggagagcaccaggaggatgctgcagctggtggaggagagcaaggatgctggcatccgcaccctggtgatgctggatgagcagggcgagcagctggagcgcatcgaggagggcatggaccagatcaacaaggacatgaaggaggccgagaagaacctgacagacctgggcaagttctgtggcctgtgtgtgtgcccctgcaactag

SEQ ID NO: 172264 - DNA, 1500 bp, synthetic construct; identical to SEQ ID NO: 169414
  misc_feature 1..1500: note = Description of Artificial Sequence: Synthetic coding sequence
  source 1..1500: mol_type = other DNA

SEQ ID NO: 172265 - DNA, 1269 bp, synthetic construct
  misc_feature 1..1269: note = Description of Artificial Sequence: Synthetic coding sequence
  source 1..1269: mol_type = other DNA
atggtgtctgagagccaccacgaggccctggccgcccctcctgtgaccaccgtggccaccgtgctgcccagcaatgccacagagcccgccagccctggagagggcaaggaggatgccttcagcaagctgaaggagaagttcatgaatgagctgcacaagatccccctgcccccctgggccctgattgccatcgccatcgtggccgtgctgctggtgctgacctgctgcttctgcatctgcaagaagtgcctcttcaagaagaagaacaagaagaagggcaaggagaagggcggcaagaatgccatcaacatgaaggatgtgaaggacctgggcaagaccatgaaggaccaggccctgaaggatgatgatgctgagaccggcctgacagatggagaggagaaggaggagcccaaggaggaggagaagctgggcaagctgcagtacagcctggactatgacttccagaacaaccagctgctggtgggcatcatccaggccgctgagctgcctgccctggacatgggcggcaccagtgacccctacgtgaaggtgttcctgctgcctgacaagaagaagaagtttgagaccaaggtgcacaggaagaccctgaaccctgtgttcaatgagcagttcaccttcaaggtgccctacagcgagctgggcggcaagaccctggtgatggctgtgtatgactttgaccgcttcagcaagcatgacatcattggagagttcaaggtgcccatgaacacagtggactttggacatgtgacagaggagtggagggacctgcagagcgctgagaaggaggagcaggagaagctgggggacatctgcttcagcctgcgctacgtgcccacagctgggaagctgactgtggtgatcctggaggccaagaacctgaagaagatggatgtgggcggcctgagtgacccctacgtgaagatccacctgatgcagaatggcaagaggctgaagaagaagaagaccaccatcaagaagaacaccctgaacccctactacaatgaaagcttctcctttgaggtgccctttgagcagatccagaaggtgcaggtggtggtgacagtgctggactatgacaagattggcaagaatgatgccatcggcaaggtgtttgtgggctacaacagcactggagctgagctgcggcactggagcgacatgctggccaacccccggcggcccatcgcccagtggcacaccctgcaggtggaggaggaggtggatgccatgctggccgtgaagaagtag

SEQ ID NO: 172266 - DNA, 1269 bp, synthetic construct; identical to SEQ ID NO: 172265
  misc_feature 1..1269: note = Description of Artificial Sequence: Synthetic coding sequence
  source 1..1269: mol_type = other DNA

SEQ ID NO: 172267 - DNA, 549 bp, synthetic construct
  misc_feature 1..549: note = Description of Artificial Sequence: Synthetic coding sequence
  source 1..549: mol_type = other DNA
atggtgtctgagagccaccacgaggccctggccgcccctcctgtgaccaccgtggccaccgtgctgcccagcaatgccacagagcccgccagccctggagagggcaaggaggatgccttcagcaagctgaaggagaagttcatgaatgagctgcacaagatccccctgcccccctgggccctgattgccatcgccatcgtggccgtgctgctggtgctgacctgctgcttctgcatctgcaagaagtgcctcttcaagaagaagaacaagaagaagggcaaggagaagggcggcaagaatgccatcaacatgaaggatgtgaaggacctgggcaagaccatgaaggaccaggccctgaaggatgatgatgctgagaccggcctgacagatggagaggagaaggaggagcccaaggaggaggagaagctgggcaagctgcagtacagcctggactatgacttccagaacaaccagctgctggtgggcatcatccaggccgctgagctgcctgccctggacatgggcggcaccagtgacccctacgtgtag

SEQ ID NO: 172268 - DNA, 177 bp, synthetic construct
  misc_feature 1..177: note = Description of Artificial Sequence: Synthetic coding sequence
  source 1..177: mol_type = other DNA
atggtgtctgagagccaccacgaggccctggccgcccctcctgtgaccaccgtggccaccgtgctgcccagcaatgccacagagcccgccagccctggagagggcaaggaggatgccttcagcaagctgaaggagaagttcatgaatgagctgcacaagatccccctgcccccatag

SEQ ID NO: 172269 - DNA, 219 bp, synthetic construct
  misc_feature 1..219: note = Description of Artificial Sequence: Synthetic coding sequence
  source 1..219: mol_type = other DNA
atggtgtctgagagccaccacgaggccctggccgcccctcctgtgaccaccgtggccaccgtgctgcccagcaatgccacagagcccgccagccctggagagggcaaggaggatgccttcagcaagctgaaggagaagttcatgaatgagctgcacaagatccccctgcccccctgggccctgattgccatcgccatcgtggccgtgctgctggtgtag

SEQ ID NO: 172270 - DNA, 222 bp, synthetic construct
  misc_feature 1..222: note = Description of Artificial Sequence: Synthetic coding sequence
  source 1..222: mol_type = other DNA
atggtgtctgagagccaccacgaggccctggccgcccctcctgtgaccaccgtggccaccgtgctgcccagcaatgccacagagcccgccagccctggagagggcaaggaggatgccttcagcaagctgaaggagaagttcatgaatgagctgcacaagatccccctgcccccctgggccctgattgccatcgccatcgtggccgtgctgctggtgctgtag

SEQ ID NO: 172271 - DNA, 285 bp, synthetic construct
  misc_feature 1..285: note = Description of Artificial Sequence: Synthetic coding sequence
  source 1..285: mol_type = other DNA
atggtgtctgagagccaccacgaggccctggccgcccctcctgtgaccaccgtggccaccgtgctgcccagcaatgccacagagcccgccagccctggagagggcaaggaggatgccttcagcaagctgaaggagaagttcatgaatgagctgcacaagatccccctgcccccctgggccctgattgccatcgccatcgtggccgtgctgctggtgctgacctgctgcttctgcatctgcaagaagtgcctcttcaagaagaagaacaagaagaagggcaagtag

SEQ ID NO: 172272 - DNA, 1269 bp, synthetic construct; identical to SEQ ID NO: 172265
  misc_feature 1..1269: note = Description of Artificial Sequence: Synthetic coding sequence
  source 1..1269: mol_type = other DNA

SEQ ID NO: 172273 - DNA, 1773 bp, synthetic construct
  misc_feature 1..1773: note = Description of Artificial Sequence: Synthetic coding sequence
  source 1..1773: mol_type = other DNA
atgtctggggactatgaagatgacctgtgcagaagagccctgatcctggtgtctgacctgtgtgcccgggtgagagatgctgacaccaatgaccgctgccaggagttcaatgaccgcatccggggctacccccggggcccagatgctgacatctctgtgtccctgctgtctgtgattgtgaccttctgtggcatcgtgctgctgggcgtgtccctgtttgtgtcctggaagctgtgctgggtgccctggagggacaagggcggcagcgctgtgggcggcggccccctgaggaaggacctgggccctggggtgggcctggccggcctggtgggcggcggcggccaccacctggccgccggcctgggcggccaccccctgctgggcggcccccaccaccacgcccacgccgcccaccaccccccatttgctgagctgctggagcccggcagcctgggcggcagtgacaccccagagcccagctacctggacatggacagctacccagaggccgctgctgctgctgtggccgccggcgtgaagcccagccagaccagccctgagctgcccagcgagggcggggccggcagcggcctgctgctgctgccccccagcggcggcggcctgcccagcgcccagagccaccagcaggtgaccagcctggcccccaccacccgctacccagccctgccccggcccctgacccagcagaccctgaccagccagcctgaccccagcagcgaggagcggcccccagccctgcccctgcccctgcccggcggggaggagaaggccaagctgattggccagatcaagccagagctgtaccagggcaccggccctgggggcagaagaagtggcggcggccctggcagcggggaggccggcaccggggccccctgtggccgcatcagctttgccctgcgctacctgtatggcagtgaccagctggtggtgcgcatcctgcaggccctggacctgcctgccaaggacagcaatggcttcagtgacccctacgtgaagatctacctgctgcctgacaggaagaagaagttccagaccaaggtgcacaggaagaccctgaaccctgtgttcaatgagaccttccagttctctgtgcccctggccgagctggcccagaggaagctgcacttctctgtgtatgactttgaccgcttcagcagacatgacctgattggccaggtggtgctggacaacctgctggagctggccgagcagcccccagaccggcccctgtggagggacatcgtggagggcggcagcgagaaggctgacctgggggagctgaacttcagcctgtgctacctgcccacagctggccgcctgactgtgaccatcatcaaggccagcaacctgaaggccatggacctgaccggcttcagtgacccctacgtgaaggccagcctcatcagcgagggccggcggctgaagaagaggaagaccagcatcaagaagaacaccctgaaccccacctacaatgaggccctggtgtttgatgtggcccctgagagcgtggagaatgtgggcctgagcattgctgtggtggactatgactgcatcggccacaatgaagtcatcggcgtgtgccgggtgggcccagatgctgctgacccccacggccgggagcactgggccgagatgctggccaaccccaggaagcctgtggagcactggcaccagctggtggaggagaagacagtgaccagcttcaccaagggcagcaagggcctgtctgagaaggaaaattctgagtag

SEQ ID NO: 172274 - DNA, 1773 bp, synthetic construct; identical to SEQ ID NO: 172273
  misc_feature 1..1773: note = Description of Artificial Sequence: Synthetic coding sequence
  source 1..1773: mol_type = other DNA

SEQ ID NO: 172275 - DNA, 1773 bp, synthetic construct; identical to SEQ ID NO: 172273
  misc_feature 1..1773: note = Description of Artificial Sequence: Synthetic coding sequence
  source 1..1773: mol_type = other DNA

SEQ ID NO: 172276 - DNA, 1773 bp, synthetic construct; identical to SEQ ID NO: 172273
  misc_feature 1..1773: note = Description of Artificial Sequence: Synthetic coding sequence
  source 1..1773: mol_type = other DNA

SEQ ID NO: 172277 - DNA, 1278 bp, synthetic construct
  misc_feature 1..1278: note = Description of Artificial Sequence: Synthetic coding sequence
  source 1..1278: mol_type = other DNA
atggcccccatcaccaccagccgggaggagtttgatgagatccccaccgtggtgggcatcttcagcgccttcggcctggtgttcaccgtgtccctgtttgcctggatctgctgccagaggaagagcagcaagagcaacaagaccccaccctacaagtttgtgcacgtgctgaagggcgtggacatctacccagagaacctgaacagcaagaagaagtttggagcagatgacaagaatgaggtgaagaacaagccagctgtgcccaagaacagcctgcacctggacctggagaagagggacctgaatggaaacttccccaagaccaacctgaagccaggcagccccagcgacctggagaatgccacccccaagctgttcctggagggggagaaggagagcgtgtccccagagagcctgaagagcagcaccagcctgaccagcgaggagaagcaggagaagctgggcaccctcttcttcagcctggagtacaactttgagaggaaggcctttgtggtgaacatcaaggaggcccggggcctgcctgccatggatgagcagagcatgaccagtgacccctacatcaagatgaccatcctgcctgagaagaagcacaaggtgaagaccagggtgctgaggaagaccctggaccctgcctttgatgagaccttcaccttctacggcatcccctacacccagatccaggagctggccctgcacttcaccatcctgagctttgaccgcttcagcagagatgacatcatcggggaggtgctgatccccctgagcggcatcgagctgtctgagggcaagatgctgatgaaccgggagatcatcaagagaaatgtgaggaagagcagcggccgcggggagctgctgatcagcctgtgctaccagagcaccaccaacaccctgactgtggtggtgctgaaggcccggcacctgcccaagagtgatgtgtctggcctgagtgacccctacgtgaaggtgaacctgtaccacgccaagaagaggatcagcaagaagaagacccacgtgaagaagtgcaccccaaatgctgtgttcaatgagctgtttgtgtttgacatcccctgtgagggcctggaggacatctctgtggagttcctggtgctggacagcgagcggggcagcagaaatgaagtcatcggccagctggtgctgggcgctgctgctgagggcaccggcggggagcactggaaggagatctgtgactacccccggcggcagatcgccaagtggcacgtgctgtgtgatggatag

SEQ ID NO: 172278 - DNA, 693 bp, synthetic construct
  misc_feature 1..693: note = Description of Artificial Sequence: Synthetic coding sequence
  source 1..693: mol_type = other DNA
atggacctgctgtctgagaagaagcacaaggtgaagaccagggtgctgaggaagaccctggaccctgcctttgatgagaccttcaccttctacggcatcccctacacccagatccaggagctggccctgcacttcaccatcctgagctttgaccgcttcagcagagatgacatcattggagaggtgctgatccccctgtctggaattgagctgtctgagggcaagatgctgatgaaccgggagatcatcaagagaaatgtgaggaagagcagcggccgcggggagctgctgatcagcctgtgctaccagagcaccaccaacaccctgactgtggtggtgctgaaggcccggcacctgcccaagagtgatgtgtctggcctgagtgacccctacgtgaaggtgaacctgtaccacgccaagaagaggatcagcaagaagaagacccacgtgaagaagtgcaccccaaatgctgtgttcaatgagctgtttgtgtttgacatcccctgtgagggcctggaggacatctctgtggagttcctggtgctggacagcgagcggggcagcagaaatgaggtgattggccagctggtgctgggcgctgctgctgagggcactggaggagagcactggaaggagatctgtgactacccccggcggcagatcgccaagtggcacgtgctgtgtgatggatag

SEQ ID NO: 172279 - DNA, 1476 bp, synthetic construct
  misc_feature 1..1476: note = Description of Artificial Sequence: Synthetic coding sequence
  source 1..1476: mol_type = other DNA
atgcctggggccagagatgccctgtgccaccaggccctgcagctgctggccgagctgtgtgcccggggggccctggagcatgacagctgccaggacttcatctaccacctgcgggaccgggcccggccccggctgcgggaccctgacatctctgtgtccctgctgaccctggtggtgacagcctgtggcctggccctgtttggagtgtccctgtttgtgtcctggaagctgtgctgggtgccctggagggagcggggcctgcccagcggcagcaaggacaacaaccaggagcccctgaactacatggacacagagaccaatgagcaggagaacagcgaggacttcctggacccccccaccccctgcccagacagctccatgaagatcagccacaccagcccagacatccccctgagcacccagacaggcatccaggagaactgtgcccacggcgtgcgggtgcagaggcaggtgacagagcccaccagcagcgcccggcacaacagcatccggcggcagctgaacctgagcaacccagacttcaacatccagcagctgcagaagcaggagcagctgactggaattggccgcatcaagccagagctgtacaagcagaggagcctggacaatgatgatggccgccgcagcaacagcaaggcctgtgggaagctgaacttcatcctgaagtatgactgtgacctggagcagctgattgtgaagatccacaaggctgtgaacctgcctgccaaggacttcagcggcaccagtgacccctacgtgaagatctacctgctgcctgacaggaagaccaagcaccagaccaaggtgcacaggaagaccctgaaccctgtgtttgatgaggtgttcctgtttcctgtgccctacaatgacctggaggccaggaagctgcacttctctgtgtatgactttgaccgcttcagcagacatgacctgattggccaggtggtggtggaccacttcctggacctggccgacttcccccgggagtgcatcctgtggaaggacattgaatatgtgaccaatgacaacgtggacctgggggagctgatgttcagcctgtgctacctgcccacagctggccgcctgaccatcaccatcatcaaggccaggaacctgaaggccatggacatcactggagccagtgacccctacgtgaaggtgtccctgatgtgtgatggaagaaggctgaagaagaggaagaccagcaccaagaggaacaccctgaaccctgtgtacaatgaggccatcgtgtttgatgtgcccccagagaacatcgaccagatccacctgagcattgctgtgatggactatgacagagtgggccacaatgagatcattggagtgtgccaggtgggcaatgaggccgagcggctgggccgggaccactggagcgagatgctgagctaccccaggaagcccatcgcccactggcacagcctggtggagaagaggtag

SEQ ID NO: 172280 - DNA, 960 bp, synthetic construct
  misc_feature 1..960: note = Description of Artificial Sequence: Synthetic coding sequence
  source 1..960: mol_type = other DNA
atgctggccaaggtggtggagggggacctggccttcaagggcggccgggacatctctgtgtccctgctgaccctggtggtgacagcctgtggcctggccctgtttggagtgtccctgtttgtgtcctggaagctgtgctgggtgccctggagggagcggggcctgcccagcggcagcaaggacaacaaccaggagcccctgaactacatggacacagagaccaatgagcaggagaacagcgaggacttcctggacccccccaccccctgcccagacagctccatgaagatcagccacaccagcccagacatccccctgagcacccagacaggcatccaggagaactgtgcccacggcgtgcgggtgcagaggcaggtgacagagcccaccagcagcgcccggcacaacagcatccggcggcagctgaacctgagcaacccagacttcaacatccagcagctgcagaagcaggagcagctgactggaattggccgcatcaagccagagctgtacaagcagaggagcctggacaatgatgatggccgccgcagcaacagcaaggcctgtgggaagctgaacttcatcctgaagtatgactgtgacctggagcagctgattgtgaagatccacaaggctgtgaacctgcctgccaaggacttcagcggcaccagtgacccctacgtgaagatctacctgctgcctgacaggaagaccaagcaccagaccaaggtgcacaggaagaccctgaaccctgtgtttgatgaggtgttcctgtttcctgtgccctacaatgacctggaggccaggaagctgcacttctctgtgtatgactttgaccgcttcagcagacatgacctgattggccaggtggtggtggaccacttcctggacctggccgacttcccccgggagtgcatcctgtggaaggacattgaatatgtgaccaacatcctgtcctag

SEQ ID NO: 172281 - DNA, 1161 bp, synthetic construct
  misc_feature 1..1161: note = Description of Artificial Sequence: Synthetic coding sequence
  source 1..1161: mol_type = other DNA
atgtttcctgagccccccaccccaggcccccccagcccagacaccccaccagacagcagccgcatcagccacggccctgtgcccccctgggccctggccaccatcgtgctggtgtctggcctgctgatcttcagctgctgcttctgcctgtacaggaagagctgcagaagaagaacaggcaagaagagccaggcccaggcccaggtgcacctgcaggaggtgaagggcctgggccagagctacatcgacaaggtgcagcctgaggtggaggagctggagcccgcccccagcggccctggccagcaggtggccgacaagcatgagctgggccgcctgcagtacagcctggactatgacttccagagcggccagctgctggtgggcatcctgcaggccatgggcctggccgccctggacctgggcggcagcagtgacccctacgtgcgggtgtacctgctgcctgacaagagaagaagatatgagaccaaggtgcaccggcagaccctgaacccccactttggagagacctttgccttcaaggtgccctacgtggagctgggcggccgggtgctggtgatggctgtgtatgactttgaccgcttcagcagaaatgatgccatcggggaggtgcgggtgcccatgagctctgtggacctgggccggcctgtgcaggcctggagggagctgcaggccgccccccgggaggagcaggagaagctgggggacatctgcttcagcctgcgctacgtgcccacagctgggaagctgactgtgattgtgctggaggccaagaacctgaagaagatggatgtgggcggcctgagtgacccctacgtgaaggtgcacctgctgcagggcggcaagaaggtgaggaagaagaagaccaccatcaagaagaacaccctgaacccctactacaatgaggccttctcctttgaggtgccctgtgaccaggtgcagaaggtgcaggtggagctgactgtgctggactatgacaagctgggcaagaatgaggccatcggccgggtggccgtgggcgctgctgctggaggagctggcctgcggcactgggccgacatgctggccaacccccggcggcccatcgcccagtggcacagcctgcggcccccagacagagtgcggctgctgcctgccccctag

SEQ ID NO: 172282 - DNA, 1161 bp, synthetic construct; identical to SEQ ID NO: 172281
  misc_feature 1..1161: note = Description of Artificial Sequence: Synthetic coding sequence
  source 1..1161: mol_type = other DNA

SEQ ID NO: 172283 - DNA, 1149 bp, synthetic construct
  misc_feature 1..1149: note = Description of Artificial Sequence: Synthetic coding sequence
  source 1..1149: mol_type = other DNA
atgacccggggcggctgccctgtgtctgcccggctgtttgcccagaggccccacggctcctggagcagcctgctgtgtgtgggcctgaagggccgcctgggctgggagtggggcaccagggtgctggagtgcctgtgcaggaaggacagcaggaccccaccaccctgcagccgcagcccccagccccggggcctgcaccggcccacccggctgcccacccctgtggccagcgccacagcccaggtgcagcctgaggtggaggagctggagcccgcccccagcggccctggccagcaggtggccgacaagcatgagctgggccgcctgcagtacagcctggactatgacttccagagcggccagctgctggtgggcatcctgcaggccatgggcctggccgccctggacctgggcggcagcagtgacccctacgtgcgggtgtacctgctgcctgacaagagaagaagatatgagaccaaggtgcaccggcagaccctgaacccccactttggagagacctttgccttcaaggtgccctacgtggagctgggcggccgggtgctggtgatggctgtgtatgactttgaccgcttcagcagaaatgatgccatcggggaggtgcgggtgcccatgagctctgtggacctgggccggcctgtgcaggcctggagggagctgcaggccgccccccgggaggaggagaagctgggggacatctgcttcagcctgcgctacgtgcccacagctgggaagctgactgtgattgtgctggaggccaagaacctgaagaagatggatgtgggcggcctgagtgacccctacgtgaaggtgcacctgctgcagggcggcaagaaggtgaggaagaagaagaccaccatcaagaagaacaccctgaacccctactacaatgaggccttctcctttgaggtgccctgtgaccaggtgcagaaggtgcaggtggagctgactgtgctggactatgacaagctgggcaagaatgaggccatcggccgggtggccgtgggcgctgctgctggaggagctggcctgcggcactgggccgacatgctggccaacccccggcggcccatcgcccagtggcacagcctgcggcccccagacagagtgcggctgctgcctgccccctag

SEQ ID NO: 172284 - DNA, 1533 bp, synthetic construct
  misc_feature 1..1533: note = Description of Artificial Sequence: Synthetic coding sequence
  source 1..1533: mol_type = other DNA
atgtctggagtgtggggcgccggcggcccccgctgccaggaggccctggccgtgctggccagcctgtgccgggcccggcccccacccctgggcctggatgtggagacctgccgcagctttgagctgcagcccccagagaggagccccagcgctgctggggccggcacctctgtgtccctgctggccgtggtggtgattgtgtgtggggtggccctggtggccgtgttcctgttcctgttctggaagctgtgctggatgccctggaggaacaaggaggccagcagccccagcagcgccaacccccccctggaggccctgcagagccccagcttccggggcaacatggctgacaagctgaaggaccccagcaccctgggcttcctggaggccgctgtgaagatcagccacaccagcccagacatcccagctgaggtgcagatgtctgtgaaggagcacatcatgaggcacacccggctgcagaggcagaccacagagcccgccagcagcaccaggcacaccagcttcaagaggcacctgccccggcagatgcacgtgtcctctgtggactatggaaatgagctgcccccagctgctgagcagcccaccagcatcggccgcatcaagccagagctgtacaagcagaagtctgtggatggagaagatgccaagtctgaggccaccaagagctgtgggaagatcaacttcagcctgcgctatgactatgaaacagagaccctgattgtgcgcatcctgaaggcctttgacctgcctgccaaggacttctgtggcagcagtgacccctacgtgaagatctacctgctgcctgacaggaagtgcaagctgcagaccagggtgcacaggaagaccctgaaccccacctttgatgagaacttccacttccctgtgccctatgaggagctggccgacaggaagctgcacctgtctgtgtttgattttgaccgcttcagcagacatgacatgattggagaggtgatcctggacaacctgtttgaggccagtgacctgagccgggagaccagcatctggaaggacatccagtatgccaccagcgagagcgtggacctgggggagatcatgttcagcctgtgctacctgcccacagctggccgcctgaccctgaccgtcatcaagtgcaggaacctgaaggccatggacatcaccggctacagcgacccctacgtgaaggtgtccctgctgtgtgatggccggcggctgaagaagaagaagaccaccatcaagaagaacaccctgaaccctgtgtacaatgaggccatcatctttgacatccccccagagaacatggaccaggtgtccctgctgatctctgtgatggactatgacagagtgggccacaatgagatcatcggcgtgtgccgggtgggcatcacagctgagggcctgggccgggaccactggaatgagatgctggcctaccccaggaagcccatcgcccactggcacagcctggtggaggtgaagaagagcttcaaggagggcaacccccggctgtag

SEQ ID NO: 172285 - DNA, 1278 bp, synthetic construct
  misc_feature 1..1278: note = Description of Artificial Sequence: Synthetic coding sequence
  source 1..1278: mol_type = other DNA
atgccctggaggaacaaggaggccagcagccccagcagcgccaacccccccctggaggccctgcagagccccagcttccggggcaacatggctgacaagctgaaggaccccagcaccctgggcttcctggaggccgctgtgaagatcagccacaccagcccagacatcccagctgaggtgcagatgtctgtgaaggagcacatcatgaggcacacccggctgcagaggcagaccacagagcccgccagcagcaccaggcacaccagcttcaagaggcacctgccccggcagatgcacgtgtcctctgtggactatggaaatgagctgcccccagctgctgagcagcccaccagcatcggccgcatcaagccagagctgtacaagcagaagtctgtggatggagaagatgccaagtctgaggccaccaagagctgtgggaagatcaacttcagcctgcgctatgactatgaaacagagaccctcatcgtgcgcatcctgaaggcctttgacctgcctgccaaggacttctgtggcagcagtgacccctacgtgaagatctacctgctgcctgacaggaagtgcaagctgcagaccagggtgcacaggaagaccctgaaccccacctttgatgagaacttccacttccctgtgccctatgaggagctggccgacaggaagctgcacctgtctgtgtttgattttgaccgcttcagcagacatgacatgattggagaggtgatcctggacaacctgtttgaggccagtgacctgagccgggagaccagcatctggaaggacatccagtatgccaccagcgagagcgtggacctgggggagatcatgttcagcctgtgctacctgcccacagctggccgcctgaccctgaccgtcatcaagtgcaggaacctgaaggccatggacatcaccggctacagcgacccctacgtgaaggtgtccctgctgtgtgatggaagaaggctgaagaagaagaagaccaccatcaagaagaacaccctgaaccctgtgtacaatgaggccatcatctttgacatccccccagagaacatggaccaggtgtccctgctgatctctgtgatggactatgacagagtgggccacaatgagatcattggagtgtgccgggtgggcatcacagctgagggcctgggccgggaccactggaatgagatgctggcctaccccaggaagcccatcgcccactggcacagcctggtggaggtgaagaagagcttcaaggagggcaacccccggctgtag

SEQ ID NO: 172286 - DNA, 1278 bp, synthetic construct; identical to SEQ ID NO: 172285
  misc_feature 1..1278: note = Description of Artificial Sequence: Synthetic coding sequence
  source 1..1278: mol_type = other DNA

SEQ ID NO: 172287 - DNA, 1533 bp, synthetic construct; identical to SEQ ID NO: 172284
  misc_feature 1..1533: note = Description of Artificial Sequence: Synthetic coding sequence
  source 1..1533: mol_type = other DNA

SEQ ID NO: 172288 - DNA, 288 bp, synthetic construct
  misc_feature 1..288: note = Description of Artificial Sequence: Synthetic coding sequence
  source 1..288: mol_type = other DNA
atgccctggaggaacaaggaggccagcagccccagcagcgccaacccccccctggaggccctgcagagccccagcttccggggcaacatggctgacaagctgaaggaccccagcaccctgggcttcctggaggccgctgtgaagatcagccacaccagcccagacatcccagctgaggtgcagatgtctgtgaaggagcacatcatgaggcacacccggctgcagaggcagaccacagagcccgccagcagcaccaggcacaccagcttcaagaggcacctgccctag

SEQ ID NO: 172289 - DNA, 261 bp, synthetic construct
  misc_feature 1..261: note = Description of Artificial Sequence: Synthetic coding sequence
  source 1..261: mol_type = other DNA
atgccctggaggaacaaggaggccagcagccccagcagcgccaacccccccctggaggccctgcagagccccagcttccggggcaacatggctgacaagctgaaggaccccagcaccctgggcttcctggaggccgctgtgaagatcagccacaccagcccagacatcccagctgaggtgcagatgtctgtgaaggagcacatcatgaggcacacccggctgcagaggcagaccacagagcccgccagcagcaccaggtag

SEQ ID NO: 172290 - DNA, 1212 bp, synthetic construct
  misc_feature 1..1212: note = Description of Artificial Sequence: Synthetic coding sequence
  source 1..1212: mol_type = other DNA
atgtacagagatcctgaggccgccagccctggggcccccagcagagatgtgctgctggtgtctgccatcatcaccgtgtccctgtctgtgacagtggtgctgtgtggcctgtgccactggtgccagaggaagctgggcaagcgctacaagaacagcctggagaccgtgggcaccccagattctggccggggccgctctgagaagaaggccatcaagctgcctgctgggggcaaggctgtgaacacagcccctgtgcccggccagacccctcatgatgaaagtgacagaagaacagagcccaggagctctgtgtctgacctggtgaacagcctgaccagcgagatgctgatgctgagccctggcagcgaggaggatgaggcccacgagggctgcagccgggagaacctgggccgcatccagttctctgtgggctacaacttccaggagagcaccctgactgtgaagatcatgaaggcccaggagctgcctgccaaggacttcagcggcaccagtgacccctttgtgaagatctacctgctgcctgacaagaagcacaagctggagaccaaggtgaagaggaagaacctgaacccccactggaatgagaccttcctgtttgagggcttcccctatgagaaggtggtgcagaggatcctgtacctgcaggtgctggactatgaccgcttcagcagaaatgaccccatcggggaggtgtccatccccctgaacaaggtggacctgacccagatgcagaccttctggaaggacctgaagccctgcagtgatggcagcggcagcagaggagagctgctgctgagcctgtgctacaaccccagcgccaacagcatcatcgtgaacatcatcaaggccaggaacctgaaggccatggacatcggcggcaccagtgacccctacgtgaaggtgtggctgatgtacaaggacaagagggtggagaagaagaagacagtgaccatgaagaggaacctgaaccccatcttcaatgaaagctttgcctttgacatccccacagagaagctgcgggagaccaccatcatcatcaccgtgatggacaaggacaagctgagcagaaatgatgtgattggcaagatctacctgtcctggaagagcggccctggagaggtgaagcactggaaggacatgattgcccggccccggcagcctgtggcccagtggcaccagctgaaggcctag

SEQ ID NO: 172291 - DNA, 1266 bp, synthetic construct
  misc_feature 1..1266: note = Description of Artificial Sequence: Synthetic coding sequence
  source 1..1266: mol_type = other DNA
atggctgtggatgtggccgagtaccacctgagcgtcatcaagagccccccaggctgggaggtgggcgtgtatgctgctggggccctggccctgctgggcattgctgctgtgtccctgtggaagctgtggaccagcggcagcttccccagccccagccccttccccaactatgactaccgctacctgcagcagaagtacggggagagctgtgccgaggcccgggagaagagggtgcctgcctggaatgcccagagggccagcacccggggcccccccagcaggaagggcagcctgagcattgaggacacctttgagagcatcagcgagctgggccccctggagctgatgggccgggagctggacctggccccctacggcaccctgaggaagagccagagcgctgacagcctgaacagcatcagctctgtgagcaacaccttcggccaggacttcaccctgggccaggtggaggtgtccatggagtatgacacagccagccacaccctgaatgtggccgtgatgcagggcaaggacctgctggagcgggaggaggccagctttgagagctgcttcatgagggtgtccctgctgcctgatgagcagatcgtgggcatcagccgcatccagagaaatgcctacagcatcttctttgatgagaagttcagcatccccctggaccccacagccctggaggagaagagcctgcgcttctctgtgtttggaattgatgaagatgaaagaaatgtgtccactggagtggtggagctgaagctgtctgtgctggacctgcccctgcagcccttcagcggctggctgtacctgcaggaccagaacaaggctgctgatgctgtgggggagatcctgctgagcctgagctacctgcccacagctgagcggctgactgtggtggtggtgaaggccaagaacctgatctggaccaatgacaagaccacagctgacccctttgtgaaggtgtacctgctgcaggacggcaggaagatgagcaagaagaagacagctgtgaagagagatgaccccaaccctgtgttcaatgaggccatgatcttctctgtgcctgccatcgtgctgcaggacctgagcctgcgggtgacagtggccgagagcagcagtgatggccgcggggacaacgtgggccacgtgatcatcggccccagcgccagcggcatgggcaccacccactggaaccagatgctggccaccctgcggcggcctgtgtccatgtggcatgctgtgagaagaaattag

SEQ ID NO: 172292 - DNA, 1266 bp, synthetic construct; identical to SEQ ID NO: 172291
  misc_feature 1..1266: note = Description of Artificial Sequence: Synthetic coding sequence
  source 1..1266: mol_type = other DNA

SEQ ID NO: 172293 - DNA, 1266 bp, synthetic construct; identical to SEQ ID NO: 172291
  misc_feature 1..1266: note = Description of Artificial Sequence: Synthetic coding sequence
  source 1..1266: mol_type = other DNA

SEQ ID NO: 172294 - DNA, 1281 bp, synthetic construct
  misc_feature 1..1281: note = Description of Artificial Sequence: Synthetic coding sequence
  source 1..1281: mol_type = other DNA
atggtgctgtctgtgcctgtgattgccctgggcgccaccctgggcacagccaccagcatcctggccctgtgtggggtgacctgcctgtgccgccacatgcaccccaagaagggcctgctgccccgggaccaggaccctgacctggagaaggccaagcccagcctgctgggcagcgcccagcagttcaacgtgaagaagagcacagagcctgtgcagccccgggccctgctgaagttcccagacatctacggccccaggcctgctgtgacagcccctgaggtgatcaactatgctgactacagcctgcggagcacagaggagcccacagccccagccagcccccagcccccaaatgacagccggctgaagaggcaggtgacagaggagctgttcatcctgccccagaatggagtggtggaggatgtgtgtgtgatggagacctggaaccctgagaaggccgcctcctggaaccaggcccccaagctgcactactgcctggactatgactgccagaaggccgagctgtttgtgacccggctggaggccgtgaccagcaaccatgatggcggctgtgactgctacgtgcagggctctgtggccaacagaactggatctgtggaggcccagacagccctgaagaagaggcagctgcacaccacctgggaggagggcctggtgctgcccctggccgaggaggagctgcccacagccaccctgaccctgaccctgcggacctgtgaccgcttcagccgccacagcgtggccggggagctgcggctgggcctggatggcacctctgtgcccctgggcgccgcccagtggggcgagctgaagaccagcgccaaggagcccagcgctggggccggggaggtgctgctgagcatctcctacctgcctgctgccaaccggctgctggtggtgctgatcaaggccaagaacctgcacagcaaccagagcaaggagctgctgggcaaggatgtgtctgtgaaggtgaccctgaagcaccaggccaggaagctgaagaagaagcagaccaagagggccaagcacaagatcaaccctgtgtggaatgagatgatcatgtttgagctgcctgatgacctgctgcaggccagctctgtggagctggaggtgctgggccaggatgacagcggccagagctgtgccctgggccactgcagcctgggcctgcacaccagcggcagcgagaggagccactgggaggagatgctgaagaacccccggcggcagatcgccatgtggcaccagctgcacctgtag

SEQ ID NO: 172295 - DNA, 1554 bp, synthetic construct
  misc_feature 1..1554: note = Description of Artificial Sequence: Synthetic coding sequence
  source 1..1554: mol_type = other DNA
atgctgctgctcttcctgtacatcaacaagaagttctgctttgaaaatgtgggcggcttcccagacctgggcagcgagtacagcaccaggaagaacagccaggacaagatctacaacagctacatggacaaggatgaacatggcagcagcagcgagagtgaagatgaggccctgggcaagtaccacgaggccctgagcaggacccacaacagccggctgcccctggccgacagccggcagagaaattatgcctgggagacccggcagaagtacagccccctgtctgcagaatatgatggctacagcagcgaggccagcattgatgagggcaactgcatccagaggatgaggaggaccccacccctggatgagctgcagcccccaccctaccaggatgacagcggcagcccccacctgagctgcacccccagcgagatcggggacagcaaatgtgagttcagccactgcagcaacagcccccgctgcagctacaacaagtgccccagcgagggcagcactggacatgaaattgagagcttccacaacaagggctatgaagaagatgtgcccagcgacagcacagctgtgctgagccctgaggacatgtctgcccagggcagcagcagccagctgcccaagccctttgatcctgagcctgaggccaagtatggcaccctggatgtgacctttgattatgacagccaggagcagaagctgctggtgacagtgacagctgtgacagacatccccacctacaacagaactggaggcaacagctggcaggtgcacctggtgctgctgcccatcaagaagcagagggccaagaccagcatccagaggggcccctgccctgtgttcacagagaccttcaagttcaaccacgtggagagcgagatgattggcaactatgctgtgcgcttccggctgtatggagtgcacaggatgaagaaggagaagatcgtgggggagaagatcttctacctgaccaagctgaacctgcagggcaagatgagcctgcccgtcatcctggagcccagctacaaccacagcggctgtgacagccagatgtctgtgtctgagatgagctgcagcgagagcaccagcagctgccagagcctggagcacggctctgtgcctgagatcctgattggcctgctgtacaatgccaccaccggccgcctgtctgctgaggtgatcaagggcagccacttcaagaacctggccgccaaccggccccccaacacctacgtgaagctgaccctgctgaacagcatgggccaggagatgagcaagtgcaagaccagcatcagaagaggccagcccaaccctgtgtacaaggagacctttgtgttccaggtggccctcttccagctgagtgatgtgaccctcatcctgtctgtgtacaacaagaggtccatgaagaggaaggagatgattggctggatcagcctgggcctgaacagcagtggagaggaggagctgaaccactggacagagatgaaggagagcaagggccagcaggtgtgccgctggcacgccctgctggagagctag

SEQ ID NO: 172296 - DNA, 1725 bp, synthetic construct
  misc_feature 1..1725: note = Description of Artificial Sequence: Synthetic coding sequence
  source 1..1725: mol_type = other DNA
atggccattgaaggaggagagaggacctgtggggtgcatgagctgatctgcatcaggaaggtgtccccagaggccgtgggcttcctgtctgctgtgggcgtcttcatcatcctgatgctgctgctcttcctgtacatcaacaagaagttctgctttgaaaatgtgggcggcttcccagacctgggcagcgagtacagcaccaggaagaacagccaggacaagatctacaacagctacatggacaaggatgaacatggcagcagcagcgagagtgaagatgaggccctgggcaagtaccacgaggccctgagcaggacccacaacagccggctgcccctggccgacagccggcagagaaattatgcctgggagacccggcagaagtacagccccctgtctgcagaatatgatggctacagcagcgaggccagcattgatgagggcaactgcatccagaggatgaggaggaccccacccctggatgagctgcagcccccaccctaccaggatgacagcggcagcccccacctgagctgcacccccagcgagatcggggacagcaaatgtgagttcagccactgcagcaacagcccccgctgcagctacaacaagtgccccagcgagggcagcactggacatgaaattgagagcttccacaacaagggctatgaagaagatgtgcccagcgacagcacagctgtgctgagccctgaggacatgtctgcccagggcagcagcagccagctgcccaagccctttgatcctgagcctgaggccaagtatggcaccctggatgtgacctttgattatgacagccaggagcagaagctgctggtgacagtgacagctgtgacagacatccccacctacaacagaactggaggcaacagctggcaggtgcacctggtgctgctgcccatcaagaagcagagggccaagaccagcatccagaggggcccctgccctgtgttcacagagaccttcaagttcaaccacgtggagagcgagatgattggcaactatgctgtgcgcttccggctgtatggagtgcacaggatgaagaaggagaagatcgtgggggagaagatcttctacctgaccaagctgaacctgcagggcaagatgagcctgcccgtcatcctggagcccagctacaaccacagcggctgtgacagccagatgtctgtgtctgagatgagctgcagcgagagcaccagcagctgccagagcctggagcacggctctgtgcctgagatcctgattggcctgctgtacaatgccaccaccggccgcctgtctgctgaggtgatcaagggcagccacttcaagaacctggccgccaaccggccccccaacggcctcttctgctgcctgaagcacctgattggaggccaggtgtacatcatccgggacacctacgtgaagctgaccctgctgaacagcatgggccaggagatgagcaagtgcaagaccagcatccggcggggccagcccaaccctgtgtacaaggagacctttgtgttccaggtggccctcttccagctgagtgatgtgaccctcatcctgtctgtgtacaacaagaggtccatgaagaggaaggagatgattggctggatcagcctgggcctgaacagcagcggggaggaggagctgaaccactggacagagatgaaggagagcaagggccagcaggtgtgccgctggcacgccctgctggagagctag

SEQ ID NO: 172297 - DNA, 1377 bp, synthetic construct
  misc_feature 1..1377: note = Description of Artificial Sequence: Synthetic coding sequence
  source 1..1377: mol_type = other DNA
atggccattgaaggaggagagaggacctgtggggtgcatgagctgatctgcatcaggaaggtgtccccagaggccgtgggcttcctgtctgctgtgggcgtcttcatcatcctgatgctgctgctcttcctgtacatcaacaagaagttctgctttgaaaatgtgggcggcttcccagacctgggcagcgagtacagcaccaggaagaacagccaggacaagatctacaacagctacatggacaaggatgaacatggcagcagcagcgagagtgaagatgaggccctgggcaagtaccacgaggccctgagcaggacccacaacagccggctgcccctggccgacagccggcagagaaattatgcctgggagacccggcagaagtacagccccctgtctgcagaatatgatggctacagcagcgaggccagcattgatgagggcaactgcatccagaggatgaggaggaccccacccctggatgagctgcagcccccaccctaccaggatgacagcggcagcccccacctgagctgcacccccagcgagatcggggacagcaaatgtgagttcagccactgcagcaacagcccccgctgcagctacaacaagtgccccagcgagggcagcactggacatgaaattgagagcttccacaacaagggctatgaagaagatgtgcccagcgacagcacagctgtgctgagccctgaggacatgtctgcccagggcagcagcagccagctgcccaagccctttgatcctgagcctgaggccaagtatggcaccctggatgtgacctttgattatgacagccaggagcagaagctgctggtgacagtgacagctgtgacagacatccccacctacaacagaactggaggcaacagctggcaggtgcacctggtgctgctgcccatcaagaagcagagggccaagaccagcatccagaggggcccctgccctgtgttcacagagaccttcaagttcaaccacgtggagagcgagatgattggcaactatgctgtgcgcttccggctgtatggagtgcacaggatgaagaaggagaagatcgtgggggagaagatcttctacctgaccaagctgaacctgcagggcaagatgagcctgcccgtcatcctggagcccagctacaaccacagcggctgtgacagccagatgtctgtgtctgagatgagctgcagcgagagcaccagcagctgccagagcctggagcacggctctgtgcctgagatcctgattggcctgctgtacaatgccaccaccggccgcctgtctgctgaggtgatcaagggcagccacttcaagaacctggccgccaaccggccccccaagatggactgcagcgtggtgtag

SEQ ID NO: 172298 - DNA, 1860 bp, synthetic construct
  misc_feature 1..1860: note = Description of Artificial Sequence: Synthetic coding sequence
  source 1..1860: mol_type = other DNA
atggccagcgcctcctggaggctgaaggtggagcgggagcctgtggagtacatgaacctgtctgtgctggagaagattggctacttctctgtggcccggctggagtacagcggcaccatcctggcccactgcaacttccggctgctgggcagcaatgacagcagcgccagcgccagccaggtgacaggcaccaccgtgtccccagaggccgtgggcttcctgtctgctgtgggcgtcttcatcatcctgatgctgctgctcttcctgtacatcaacaagaagttctgctttgaaaatgtgggcggcttcccagacctgggcagcgagtacagcaccaggaagaacagccaggacaagatctacaacagctacatggacaaggatgagcacggcagcagcagcgagagtgaagatgaggccctgggcaagtaccacgaggccctgagcaggacccacaacagccggctgcccctggccgacagccggcagaggaactatgcctgggagacccggcagaagtacagccccctgtctgcagaatatgatggctacagcagcgaggccagcattgatgagggcaactgcatccagaggatgaggaggaccccacccctggatgagctgcagcccccaccctaccaggatgattctggcagcccccacctgagctgcaccccatctgaaattggagacagcaaatgtgagttcagccactgcagcaacagcccccgctgcagctacaacaagtgccccagcgagggcagcacaggccacgagattgagagcttccacaacaagggctatgaggaggatgtgcccagcgacagcacagctgtgctgagccctgaggacatgtctgcccagggcagcagcagccagctgcccaagccctttgatcctgagcctgaggccaagtatggcaccctggatgtgacctttgattatgacagccaggagcagaagctgctggtgacagtgacagctgtgacagacatccccacctacaacagaactggaggcaacagctggcaggtgcacctggtgctgctgcccatcaagaagcagagggccaagaccagcatccagaggggcccctgccctgtgttcacagagaccttcaagttcaaccacgtggagagcgagatgattggcaactatgctgtgcgcttccggctgtatggagtgcacaggatgaagaaggagaagatcgtgggggagaagatcttctacctgaccaagctgaacctgcagggcaagatgagcctgcctgtgatcctggagcccagctacaaccacagcggctgtgacagccagatgtctgtgtctgagatgagctgcagcgagagcaccagcagctgccagagcctggagcacggctctgtgcctgagatcctgattggcctgctgtacaatgccaccaccggccgcctgtctgctgaggtgatcaagggcagccacttcaagaacctggccgccaacagacctccaaatggcctcttctgctgcctgaagcacctgattggaggccaggtgtacatcatccgggacacctacgtgaagctgaccctgctgaacagcatgggccaggagatgagcaagtgcaagaccagcatcagaagaggccagcccaaccctgtgtacaaggagacctttgtgttccaggtggccctcttccagctgagtgatgtgaccctcatcctgtctgtgtacaacaagaggtccatgaagaggaaggagatgattggctggatcagcctgggcctgaacagcagtggagaggaggagctgaaccactggacagagatgaaggagagcaagggccagcaggtgtgccgctggcacgccctgctggagagctag

SEQ ID NO: 172299 - DNA, 1668 bp, synthetic construct
  misc_feature 1..1668: note = Description of Artificial Sequence: Synthetic coding sequence
  source 1..1668: mol_type = other DNA
atggccattgaaggaggagagaggacctgtggggtgcatgagctgatctgcatcaggaaggtgtccccagaggccgtgggcttcctgtctgctgtgggcgtcttcatcatcctgatgctgctgctcttcctgtacatcaacaagaagttctgctttgaaaatgtgggcggcttcccagacctgggcagcgagtacagcaccaggaagaacagccaggacaagatctacaacagctacatggacaaggatgaacatggcagcagcagcgagagtgaagatgaggccctgggcaagtaccacgaggccctgagcaggacccacaacagccggctgcccctggccgacagccggcagagaaattatgcctgggagacccggcagaagtacagccccctgtctgcagaatatgatggctacagcagcgaggccagcattgatgagggcaactgcatccagaggatgaggaggaccccacccctggatgagctgcagcccccaccctaccaggatgacagcggcagcccccacctgagctgcacccccagcgagatcggggacagcaaatgtgagttcagccactgcagcaacagcccccgctgcagctacaacaagtgccccagcgagggcagcactggacatgaaattgagagcttccacaacaagggctatgaagaagatgtgcccagcgacagcacagctgtgctgagccctgaggacatgtctgcccagggcagcagcagccagctgcccaagccctttgatcctgagcctgaggccaagtatggcaccctggatgtgacctttgattatgacagccaggagcagaagctgctggtgacagtgacagctgtgacagacatccccacctacaacagaactggaggcaacagctggcaggtgcacctggtgctgctgcccatcaagaagcagagggccaagaccagcatccagaggggcccctgccctgtgttcacagagaccttcaagttcaaccacgtggagagcgagatgattggcaactatgctgtgcgcttccggctgtatggagtgcacaggatgaagaaggagaagatcgtgggggagaagatcttctacctgaccaagctgaacctgcagggcaagatgagcctgcccgtcatcctggagcccagctacaaccacagcggctgtgacagccagatgtctgtgtctgagatgagctgcagcgagagcaccagcagctgccagagcctggagcacggctctgtgcctgagatcctgattggcctgctgtacaatgccaccaccggccgcctgtctgctgaggtgatcaagggcagccacttcaagaacctggccgccaaccggccccccaacacctacgtgaagctgaccctgctgaacagcatgggccaggagatgagcaagtgcaagaccagcatcagaagaggccagcccaaccctgtgtacaaggagacctttgtgttccaggtggccctcttccagctgagtgatgtgaccctcatcctgtctgtgtacaacaagaggtccatgaagaggaaggagatgattggctggatcagcctgggcctgaacagcagtggagaggaggagctgaaccactggacagagatgaaggagagcaagggccagcaggtgtgccgctggcacgccctgctggagagctag

SEQ ID NO: 172300 - DNA, 1746 bp, synthetic construct
  misc_feature 1..1746: note = Description of Artificial Sequence: Synthetic coding sequence
  source 1..1746: mol_type = other DNA
atggccattgaaggaggagagaggacctgtggggtgcatgagctgatctgcatcaggaaggtgtccccagaggccgtgggcttcctgtctgctgtgggcgtcttcatcatcctgatgctgctgctcttcctgtacatcaacaagaagttctgctttgaaaatgtgggcggcttcccagacctgggcagcgagtacagcaccaggaagaacagccaggacaagatctacaacagctacatggacaaggatgaacatggcagcagcagcgagagtgaagatgaggccctgggcaagtaccacgaggccctgagcaggacccacaacagccggctgcccctggccgacagccggcagagaaattatgcctgggagacccggcagaagtacagccccctgtctgcagaatatgatggctacagcagcgaggccagcattgatgagggcaactgcatccagaggatgaggaggaccccacccctggatgagctgcagcccccaccctaccaggatgacagcggcagcccccacctgagctgcacccccagcgagatcggggacagcaaatgtgagttcagccactgcagcaacagcccccgctgcagctacaacaagtgccccagcgagggcagcactggacatgaaattgagagcttccacaacaagggctatgaagaagatgtgcccagcgacagcacagctgtgctgagccctgaggacatgtctgcccagggcagcagcagccagctgcccaagccctttgatcctgagcctgaggccaagtatggcaccctggatgtgacctttgattatgacagccaggagcagaagctgctggtgacagtgacagctgtgacagacatccccacctacaacagaactggaggcaacagctggcaggtgcacctggtgctgctgcccatcaagaagcagagggccaagaccagcatccagaggggcccctgccctgtgttcacagagaccttcaagttcaaccacgtggagagcgagatgattggcaactatgctgtgcgcttccggctgtatggagtgcacaggatgaagaaggagaagatcgtgggggagaagatcttctacctgaccaagctgaacctgcagggcaagatgagcctgcccgtcatcctggagcccagctacaaccacagcggctgtgacagccagatgtctgtgtctgagatgagctgcagcgagagcaccagcagctgccagagcctggagcacggctctgtgcctgagatcctgattggcctgctgtacaatgccaccaccggccgcctgtctgctgaggtgatcaagggcagccacttcaagaacctggccgccaaccggccccccaccttccaccccctgctgagtgatggcctcttctgctgcctgaagcacctgattggaggccaggtgtacatcatccgggacacctacgtgaagctgaccctgctgaacagcatgggccaggagatgagcaagtgcaagaccagcatcagaagaggccagcccaaccctgtgtacaaggagacctttgtgttccaggtggccctcttccagctgagtgatgtgaccctcatcctgtctgtgtacaacaagaggtccatgaagaggaaggagatgattggctggatcagcctgggcctgaacagcagtggagaggaggagctgaaccactggacagagatgaaggagagcaagggccagcaggtgtgccgctggcacgccctgctggagagctag

SEQ ID NO: 172301 - DNA, 1554 bp, synthetic construct; identical to SEQ ID NO: 172295
  misc_feature 1..1554: note = Description of Artificial Sequence: Synthetic coding sequence
  source 1..1554: mol_type = other DNA

SEQ ID NO: 172302 - DNA, 1266 bp, synthetic construct
  misc_feature 1..1266: note = Description of Artificial Sequence: Synthetic coding sequence
  source 1..1266: mol_type = other DNA
atggccgagcagctggccctggtgattggaggcaccatcggcggcctgctgctgctgctgctgattggagccagctgctgcctgtggaggcgcttctgtgccaccctgacctatgaggagctgcccggcaccccagccatggccaccacagctgccagcagcggccagagggaccggccctgccagccccacgcccggacccagctgagccggcccccagctgtgccctttgtggtgccccccaccctgcagggccgggactgggtgcccctgcacagcggggagtgggcagatgccccctgggacccctgcccagccagcgagctgctgccccacaccagcagcggcggcctgggagatgcctgcatggtgggcgccatcaaccctgagctgtacaagtttcctgaggacaagtcagaaacagacttcccagatggctgcctgggccgcctgtggttctctgtggagtatgagcaggaggccgagcggctgctggtgggcctcatcaaggcccagcacctgcaggcccccagcgagacctgcagccccctggtgaagctgtacctgctgcctgatgagcggcgcttcctgcagagcaagaccaagaggaagaccagcaacccccagtttgatgagcacttcatcttccaggtgagcagcaagaccatcacccagagggtgctgaagttctctgtgtaccacgtggaccggcagaggaagcaccagctgctgggccaggtgctcttccccctgaagaatgagaccctggtgggggactgcagaagagtcatctggagggacctggaggccgagagcctggagcccccatctgaatttggagacctgcagttctgcctgagctacaatgactacctgagccggctgactgtggtggtgctgcgggccaagggcctgcggctgcaggaggaccggggcatcgtgtctgtgtttgtgaaggtgtccctgatgaaccacaacaagtttgtgaagtgcaagaagaccagcgctgtgctgggcagcatcaaccctgtgtacaatgagaccttctccttcaaggcagatgccacagagctggacacagccagcctgagcctgactgtggtgcagaacatggagggggacaagagccagcagctgggccgggtggtggtgggcccctacatgtacacccggggccgggagctggagcactgggatgagatgctgagcaagcccaaggagctggtgaagcgctggcacgccctgtgcaggaccacagagccctag

SEQ ID NO: 172303 - DNA, 1425 bp, synthetic construct
  misc_feature 1..1425: note = Description of Artificial Sequence: Synthetic coding sequence
  source 1..1425: mol_type = other DNA
atgggcgtggtgctgagcccccacccagcccccagcagaagagagcccctggcccccctggcccctggcacccggcccggctggagccctgctgtgtctggcagcagccgcagcgccctgcggcccagcacagctggccctggccctggccctggcaccggctggggcggcacagctgccagcggccgctgggtgcctgccccagctgtgcactgtgccgcccccagggctgctgctggccaccagcagcaccacggcccccccctgtgcagcccagatggagccccccggcgcttcaagagaagacctggcagccctgccccagctgcccagacaggagagaccagcctgcgggagcagccccacggcggccccccagctgtgccctttgtggtgccccccaccctgcagggccgggactgggtgcccctgcacagcggggagtgggcagatgccccctgggacccctgcccagccagcgagctgctgccccacaccagcagcggcggcctgggagatgcctgcatggtgggcgccatcaaccctgagctgtacaagtttcctgaggacaagtcagaaacagacttcccagatggctgcctgggccgcctgtggttctctgtggagtatgagcaggaggccgagcggctgctggtgggcctcatcaaggcccagcacctgcaggcccccagcgagacctgcagccccctggtgaagctgtacctgctgcctgatgaaagacgcttcctgcagagcaagaccaagaggaagaccagcaacccccagtttgatgagcacttcatcttccaggtgagcagcaagaccatcacccagagggtgctgaagttctctgtgtaccacgtggaccggcagaggaagcaccagctgctgggccaggtgctcttccccctgaagaatgagaccctggtgggggactgccggcgggtcatctggagggacctggaggccgagagcctggagccccccagcgagtttggagacctgcagttctgcctgagctacaatgactacctgagccggctgactgtggtggtgctgcgggccaagggcctgcggctgcaggaggaccggggcatcgtgtctgtgtttgtgaaggtgtccctgatgaaccacaacaagtttgtgaagtgcaagaagaccagcgctgtgctgggcagcatcaaccctgtgtacaatgagaccttctccttcaaggcagatgccacagagctggacacagccagcctgagcctgactgtggtgcagaacatggagggggacaagagccagcagctgggccgggtggtggtgggcccctacatgtacacccggggccgggagctggagcactgggatgagatgctgagcaagcccaaggagctggtgaagcgctggcacgccctgtgcaggaccacagagccctag

SEQ ID NO: 172304 - DNA, 1173 bp, synthetic construct
  misc_feature 1..1173: note = Description of Artificial Sequence: Synthetic coding sequence
  source 1..1173: mol_type = other DNA
atggccgagcagctggccctggtgattggaggcaccatcggcggcctgctgctgctgctgctgattggagccagctgctgcctgtggaggcgcttctgtgccaccctgacctatgaggagctgcccggcaccccagccatggccaccacagctgccagcagcggccagagggaccggccctgccagccccacgcccggacccagctgagccggcccccagctgtgccctttgtggtgccccccaccctgcagggccgggactgggtgcccctgcacagcggggagtgggcagatgccccctgggacccctgcccagccagcgagctgctgccccacaccagcagcggcggcctgggagatgcctgcatggtgggcgccatcaaccctgagctgtacaagtttcctgaggacaagtcagaaacagacttcccagatggctgcctgggccgcctgtggttctctgtggagtatgagcaggaggccgagcggctgctggtgggcctcatcaaggcccagcacctgcaggcccccagcgagacctgcagccccctggtgaagctgtacctgctgcctgatgagcggcgcttcctgcagagcaagaccaagaggaagaccagcaacccccagtttgatgagcacttcatcttccaggtgagcagcaagaccatcacccagagggtgctgaagttctctgtgtaccacgtggaccggcagaggaagcaccagctgctgggccaggtgctcttccccctgaagaatgagaccctggtgggggactgcagaagagtcatctggagggacctggaggccgagagcctggagcccccatctgaatttggagacctgcagttctgcctgagctacaatgactacctgagccggctgactgtggtggtgctgcgggccaagggcctgcggctgcaggaggaccggggcatcgtgtctgtgtttgtgaaggtgtccctgatgaaccacaacaagtttgtgaagtgcaagaagaccagcgctgtgctgggcagcatcaaccctgtgtacaatgagaccttctccttcaaggcagatgccacagagctggacacagccagcctgagcctgactgtggtgcagaacatggagggggacaagcaggccaccaccgtggagctgttcctgttccacctgaccagcggctag

SEQ ID NO: 172305 - DNA, 543 bp, synthetic construct
  misc_feature 1..543: note = Description of Artificial Sequence: Synthetic coding sequence
  source 1..543: mol_type = other DNA
gatgagcacttcatcttccaggtgagcagcaagaccatcacccagagggtgctgaagttctctgtgtaccacgtggaccggcagaggaagcaccagctgctgggccaggtgctcttccccctgaagaatgagaccctggtgggggactgcagaagagtcatctggagggacctggaggccgagagcctggagcccccatctgaatttggagacctgcagttctgcctgagctacaatgactacctgagccggctgactgtggtggtgctgcgggccaagggcctgcggctgcaggaggaccggggcatcgtgtctgtgtttgtgaaggtgtccctgatgaaccacaacaagtttgtgaagtgcaagaagaccagcgctgtgctgggcagcatcaaccctgtgtacaatgagaccttctccttcaaggcagatgccacagagctggacacagccagcctgagcctgactgtggtgcagaacatggagggggacaagcaggccaccaccgtggagctgttcctgttccacctgaccagcggctag

SEQ ID NO: 172306 - DNA, 783 bp, synthetic construct
  misc_feature 1..783: note = Description of Artificial Sequence: Synthetic coding sequence
  source 1..783: mol_type = other DNA
atggtgggcgccatcaaccctgagctgtacaagtttcctgaggacaagtctgagacctgcagccccctggtgaagctgtacctgctgcctgatgaaagacgcttcctgcagagcaagaccaagaggaagaccagcaacccccagtttgatgagcacttcatcttccaggtgagcagcaagaccatcacccagagggtgctgaagttctctgtgtaccacgtggaccggcagaggaagcaccagctgctgggccaggtgctcttccccctgaagaatgagaccctggtgggggactgccggcgggtcatctggagggacctggaggccgagagcctggagccccccagcgagtttggagacctgcagttctgcctgagctacaatgactacctgagccggctgactgtggtggtgctgcgggccaagggcctgcggctgcaggaggaccggggcatcgtgtctgtgtttgtgaaggtgtccctgatgaaccacaacaagtttgtgaagtgcaagaagaccagcgctgtgctgggcagcatcaaccctgtgtacaatgagaccttctccttcaaggcagatgccacagagctggacacagccagcctgagcctgactgtggtgcagaacatggagggggacaagagccagcagctgggccgggtggtggtgggcccctacatgtacacccggggccgggagctggagcactgggatgagatgctgagcaagcccaaggagctggtgaagcgctggcacgccctgtgcaggaccacagagccctag

SEQ ID NO: 172307 - DNA, 1047 bp, synthetic construct
  misc_feature 1..1047: note = Description of Artificial Sequence: Synthetic coding sequence
  source 1..1047: mol_type = other DNA
atggccgagcagctggccctggtgattggaggcaccatcggcggcctgctgctgctgctgctgattggagccagctgctgcctgtggaggcgcttctgtgccaccctgacctatgaggagctgcccggcaccccagccatggccaccacagctgccagcagcggccagagggaccggccctgccagccccacgcccggacccagctgagccggcccccagctgtgccctttgtggtgccccccaccctgcagggccgggactgggtgcccctgcacagcggggagtgggcagatgccccctgggacccctgcccagccagcgagctgctgccccacaccagcagcggcggcctgggagatgcctgcatggtgggcgccatcaaccctgagctgtacaagtttcctgaggacaagtcagaaacagacttcccagatggctgcctgggccgcctgtggttctctgtggagtatgagcaggaggccgagcggctgctggtgggcctcatcaaggcccagcacctgcaggcccccagcgagacctgcagccccctggtgaagctgtacctgctgcctgatgagcggcgcttcctgcagagcaagaccaagaggaagaccagcaacccccagtttgatgagcacttcatcttccaggtgagcagcaagaccatcacccagagggtgctgaagttctctgtgtaccacgtggaccggcagaggaagcaccagctgctgggccaggtgctcttccccctgaagaatgagaccctggtgggggactgcagaagagtcatctggagggacctggaggccgagagcctggagcccccatctgaatttggagacctgcagttctgcctgagctacaatgactacctgagccggctgactgtggtggtgctgcgggccaagggcctgcggctgcaggaggaccggggcatcgtgtctgtgtttgtgaaggtgtccctgatgaaccacaacaagtttgccaagtgcaagccaggccctgacctgggggaggagagccggggcagcctgaacctgaagtag

SEQ ID NO: 172308 - DNA, 1173 bp, synthetic construct; identical to SEQ ID NO: 172304
  misc_feature 1..1173: note = Description of Artificial Sequence: Synthetic coding sequence
  source 1..1173: mol_type = other DNA

SEQ ID NO: 172309 - DNA, 1152 bp, synthetic construct
  misc_feature 1..1152: note = Description of Artificial Sequence: Synthetic coding sequence
  source 1..1152: mol_type = other DNA
atggtgctggccatggccagccaggatgtgcagaacttcttccagcccttcagctcctggatcagccgggtgtatgaggccctgcagcaggccggggacatgctgagcgccagcctggtgaacatcagcaagcaggacagcaagctgagtgacaagctggaccaggacctggacaacatccagatccaggagacctactttgaagatgaggagcaggacaatgactggagccaggaggatgccaacagcctcttcctggaggtggaccacttcagctgctgcaacagcgacctgcaggacagcgcccagaacagcagccccagcctgagccagcacgccaaggacagctgcagcaccatgagccagtggcccaactgggccagtgatgacaggaagctgccccacgtgctgagcagcattgctgaggaggagcaccacctggagaagcagaggagcggcctgcagcacggctttgacagccagctgcccggcaccctggagaccgtgaatggcaagaagcaggtgaacagctttggagatgatgaggagctgagcaccagcagtgacagtgatgaggaggtgatcaagcagtttgagatctctgtgagccgcagccagagcttccgctctgtgaccagcgagaagggcaagcagacaggcctggagcagaagcccaagttcagccgcagcctgctgacccacggggaggatggaacagaggtgtctgcctgtgaggacctggatggagccagccagaggcgctacagcgagaacctgtcctatggagaagatgaccacatcccagcccacagccagagcccctgtgaaagaggagatgccaagcaccacggcaccagccaccaggagagctctgtggtgcagagcctgcggcggcagagcacagagggcagcctggagatggagacagccttcaacagccggggctttgaagattcctatgccacagacagcagctccatgtggagccctgaggccaacctgaacctgaagaggaagggctacctgctggatgtgtactgcctgagcagccccctgctcttcaccaccagcctgcacagaagaaacagaacaggccccatctgccgctgccaccctggcagccagagccccagccagagcgtggtgacctag

SEQ ID NO: 172310 - DNA, 1938 bp, synthetic construct
  misc_feature 1..1938: note = Description of Artificial Sequence: Synthetic coding sequence
  source 1..1938: mol_type = other DNA
atggtgctggccatggccagccaggatgtgcagaacttcttccagcccttcagctcctggatcagccgggtgtatgaggccctgcagcaggccggggacatgctgagcgccagcctggtgaacatcagcaagcaggacagcaagctgagtgacaagctggaccaggacctggacaacatccagatccaggagacctactttgaagatgaggagcaggacaatgactggagccaggaggatgccaacagcctcttcctggaggtggaccacttcagctgctgcaacagcgacctgcaggacagcgcccagaacagcagccccagcctgagccagcacgccaaggacagctgcagcaccatgagccagtggcccaactgggccagtgatgacaggaagctgccccacgtgctgagcagcattgctgaggaggagcaccacctggagaagcagaggagcggcctgcagcacggctttgacagccagctgcccggcaccctggagaccgtgaatggcaagaagcaggtgaacagctttggagatgatgaggagctgagcaccagcagtgacagtgatgaggaggtgatcaagcagtttgagatctctgtgagccgcagccagagcttccgctctgtgaccagcgagaagggcaagcagacaggcctggagcagaagcccaagttcagccgcagcctgctgacccacggggaggatggaacagaggtgtctgcctgtgaggacctggatggagccagccagaggcgctacagcgagaacctgtcctatggagaagatgaccacatcccagcccacagccagagcccctgtgaaagaggagatgccaagcaccacggcaccagccaccaggagagctctgtggtgcagagcctgcggcggcagagcacagagggcagcctggagatggagacagccttcaacagccggggctttgaagattcctatgccacagacagcagctccatgtggagccctgaggagcaggacaggaccaacctgcaggtgcccagcggcgtgtctgagcccatcagcaaatgtggggacctggatgtgatctttgagtaccgggccgccagccagaagctgactgtgaccatcgtgcgggcccagggcctgcctgacaaggacagaagtggagtgaacagctggcaggtgcacgtggtgctgctgcccgggaagaagcaccggggccgcaccaacatccagaggggccccaaccctgtgttccgggagaaggtgacctttgccaagctggagcccagagatgtggccgcctgtgctgtgcgcttccggctgtatgctgccaggaagatgacccgggagaggatgatgggagagaagctgttctacctgagccacctgcaccctgagggggagatgaaggtgaccctggtgctggagcccaggagcaacatcagcagcggcggcagccccctgagccccagcgctgtgagccacagcgacagcaccagcagcacccagagcctgagccatggaggagcccctgagctgctggtgggcctgagctacaatgccaccaccggccgcctgtctgtggagatgatcaagggcagccacttcaggaacctggccgtgaacagagccccagacacctacggcaagctgttcctgctgaacagcgtgggccaggagatgagccgctgcaagaccagcatcagaagaggccagcccaaccctgtgtacaaggagacctttgtgttccaggtggccctcttccagctgagtgatgtgaccctgatgatctctgtgtacaacagaaggaccatgaagaggaaggagatgattggctggatcgccctgggccagaacagcagtggagaggaggagcaggaccactgggaggagatgaaggagaccaagggccagcagatctgccgctggcacaccctgctggagagctag

SEQ ID NO: 172311 - DNA, 1653 bp, synthetic construct
  misc_feature 1..1653: note = Description of Artificial Sequence: Synthetic coding sequence
  source 1..1653: mol_type = other DNA
atgccccagaggggccaccccagccaggagggcctgtgggccctgcccagcctgcccatggcccacggccccaagccagagacagagggcctgctggacctgtccttcctgacagaggaggagcaggaggccatcgccggcgtgctgcagagagatgcccggctgcggcagctggaggagggccgggtgtccaagctgcgggcctctgtggccgaccccggccagctgaagatcctgaccggggactggttccaggaggcccggagccagaggcaccacaatgcccactttggaagtgacctggtgcgggcctccatgaggaggaagaagagcaccaggggggaccaggcccctggccatgaccgggaggccgaggccgctgtgaaggagaaggaggagggccctgagccccggctgaccattgatgaggccccccaggagcggctgcgggagacagaggccagtgaccctgaggaggccagccaggcccaggaggaccccggccagggcgaccagcaggtgtgtgccgaggaggccgaccctgagctggagcccgccagcggcggggagcaggagccccggccccagcaggcccagaccaaggccgccagccagatcctggagaatggagaggaggcccctggccctgaccccagcctggacaggatgctgagcagcagcagctctgtgagcagcctgaacagcagcaccctgagcggcagccagatgagcctgtctggagatgctgaggccgtgcaggtgcggggctctgtgcactttgccctgcactatgagcccggggctgctgagctgcgggtgcacgtgatccagtgccagggcctggccgccgccaggagaagaagaagtgacccctacgtgaagagctacctgctgcctgacaagcagagcaagaggaagacagctgtgaagaagaggaacctgaaccctgtgttcaatgagaccctgcgctacagcgtgccccaggccgagctgcagggccgggtgctgagcctgtctgtgtggcaccgggagagcctgggcaggaacatcttcctgggggaggtggaggtgcccctggacacctgggactggggcagcgagcccacctggctgcccctgcagccccgggtgccccccagcccagatgacctgcccagccggggcctgctggccctgagcctgaagtatgtgcctgctggcagcgagggcgccggcctgcccccatctggagagctgcacttctgggtgaaggaggcccgggacctgctgcccctgcgggccggcagcctggacacctacgtgcagtgctttgtgctgcctgatgacagccaggccagccggcagaggaccagggtggtgcggcgcagcctgagccctgtgttcaaccacaccatggtgtatgatggcttcggccctgctgacctgcggcaggcctgtgccgagctgagcctgtgggaccatggagccctggccaaccggcagctgggcggcacccggctgagcctgggcaccggcagcagctatggcctgcaggtgccctggatggacagcaccccagaggagaagcagctgtggcaggccctgctggagcagccctgtgagtgggtggatggcctgctgcccctgcggaccaacctggcccccaggacatag

SEQ ID NO: 172312 - DNA, 231 bp, synthetic construct
  misc_feature 1..231: note = Description of Artificial Sequence: Synthetic coding sequence
  source 1..231: mol_type = other DNA
atgccccagaggggccaccccagccaggagggcctgtgggccctgcccagcctgcccatggcccacggccccaagccagagacagagggcctgctggacctgtccttcctgacagaggaggagcaggaggccatcgccggcgtgctgcagagagatgcccggctgcggcagctggaggagggccgggtgtccaagctgcgggcctctgtggccgaccccggccagctgtag

SEQ ID NO: 172313 - DNA, 1065 bp, synthetic construct
  misc_feature 1..1065: note = Description of Artificial Sequence: Synthetic coding sequence
  source 1..1065: mol_type = other DNA
atgccccagaggggccaccccagccaggagggcctgtgggccctgcccagcctgcccatggcccacggccccaagccagagacagagggcctgctggacctgtccttcctgacagaggaggagcaggaggccatcgccggcgtgctgcagagagatgcccggctgcggcagctggaggagggccgggtgtccaagctgcgggcctctgtggccgaccccggccagctgaagatcctgaccggggactggttccaggaggcccggagccagaggcaccacaatgcccactttggaagtgacctggtgcgggcctccatgaggaggaagaagagcaccaggggggaccaggcccctggccatgaccgggaggccgaggccgctgtgaaggagaaggaggagggccctgagccccggctgaccattgatgaggccccccaggagcggctgcgggagacagagggccctgacttccccagccccagcgtgcccctgaaggccagtgaccctgaggaggccagccaggcccaggaggaccccggccagggcgaccagcaggtgtgtgccgaggaggccgaccctgagctggagcccgccagcggcggggagcaggagccccggccccagcaggcccaggtgggcggcagcggcccctggctgctgagcaccagcggggctgacagcggccgcggggccctgctgccccgggccgccagccggccccggccccgggccctgggcgccggcgtgggcaaggagggcgcccccaggcacctgccccccctgcagaccaaggccgccagccagatcctggagaatggagaggaggcccctggccctgaccccagcctggacaggatgctgagcagcagcagctctgtgagcagcctgaacagcagcaccctgagcggcagccagatgagcctgtctggagatgctgaggccgtgcaggtgcggggctctgtgcactttgccctgcactatgagcctggagctgctgagctgcgggtgcacgtgatccagtgccagggcctggccgccgccaggagaagaagaagtgacccctag

SEQ ID NO: 172314 - DNA, 606 bp, synthetic construct
  misc_feature 1..606: note = Description of Artificial Sequence: Synthetic coding sequence
  source 1..606: mol_type = other DNA
atgggcaccacagccctgctgggcggcgtgcggctgtctgagaccatccctgtgaagaggctggcccggggcctggcccgggtgagagatggcggctggggcagcccccaggccggggagaaggccctgggcggccccctgctgaccagcggcagccacctgcccagctatgtgaagagctacctgctgcctgacaagcagagcaagaggaagacagctgtgaagaagaggaacctgaaccctgtgttcaatgagaccctgcgctacagcgtgccccaggccgagctgcagggccgggtgctgagcctgtctgtgtggcaccgggagagcctgggcaggaacatcttcctgggggaggtggaggtgcccctggacacctgggactggggcagcgagcccacctggctgcccctgcagccccgggtgccccccagcccagatgacctgcccagccggggcctgctggccctgagcctgaagtatgtgcctgctggcagcgagggcgccggcctgccccccagcggggagctgcacttctgggtgaaggaggcccgggacctgctgcccctgcgggccggcagcctggacacctacgtgcagtggtag

SEQ ID NO: 172315 - DNA, 1083 bp, synthetic construct
  misc_feature 1..1083: note = Description of Artificial Sequence: Synthetic coding sequence
  source 1..1083: mol_type = other DNA
atgccccagaggggccaccccagccaggagggcctgtgggccctgcccagcctgcccatggcccacggccccaagccagagacagagggcctgctggacctgtccttcctgacagaggaggagcaggaggccatcgccggcgtgctgcagagagatgcccggctgcggcagctggaggagggccgggtgtccaagctgcgggcctctgtggccgaccccggccagctgaagatcctgaccggggactggttccaggaggcccggagccagaggcaccacaatgcccactttggaagtgacctggtgcgggcctccatgaggaggaagaagagcaccaggggggaccaggcccctggccatgaccgggaggccgaggccgctgtgaaggagaaggaggagggccctgagccccggctgaccattgatgaggccccccaggagcggctgcgggagacagagggccctgacttccccagccccagcgtgcccctgaaggccagtgaccctgaggaggccagccaggcccaggaggaccccggccagggcgaccagcaggtgtgtgccgaggaggccgaccctgagctggagcccgccagcggcggggagcaggagccccggccccagcaggcccaggtgggcggcagcggcccctggctgctgagcaccagcggggctgacagcggccgcggggccctgctgccccgggccgccagccggccccggccccgggccctgggcgccggcgtgggcaaggagggcgcccccaggcacctgccccccctgcagaccaaggccgccagccagatcctggagaatggagaggaggcccctggccctgaccccagcctggacaggatgctgagcagcagcagctctgtgagcagcctgaacagcagcacagtgcggcgggagggcggggaccccggcggccggggcgtggaccccttccgctgtgtggccccagcctgccccagcctggccgccggccccacagctgctgccccccagcctgccacctatgaccccggcctgaagccaccccgctgcccccggccccggcgggagccctgtgagcggccctag

SEQ ID NO: 172316 - DNA, 879 bp, synthetic construct
  misc_feature 1..879: note = Description of Artificial Sequence: Synthetic coding sequence
  source 1..879: mol_type = other DNA
tgaccccggccccagcaggcccaggtgggcggcagcggcccctggctgctgagcaccagcggggctgacagcggccgcggggccctgctgcccagggctgccagccggccccggccccgggccctgggcgctggggtgggcaaggagggcgcccccaggcacctgccccccctgcagaccaaggccgccagccagatcctggagaatggagaggaggcccctggccctgaccccagcctggacaggatgctgagcagcagcagctctgtgagcagcctgaacagcagcaccctgagcggcagccagatgagcctgtctggagatgctgaggccgtgcaggtgcggggctctgtgcactttgccctgcactatgagcccggggctgctgagctgcgggtgcacgtgatccagtgccagggcctggccgccgccaggagaagaagaagtgacccctacgtgaagagctacctgctgcctgacaagcagagcaagaggaagacagctgtgaagaagaggaacctgaaccctgtgttcaatgagaccctgcgctacagcgtgccccaggccgagctgcagggccgggtgctgagcctgtctgtgtggcaccgggagagcctgggcaggaacatcttcctgggggaggtggaggtgcccctggacacctgggactggggcagcgagcccacctggctgcccctgcagccccgggtgccccccagcccagatgacctgcccagccggggcctgctggccctgagcctgaagtatgtgcctgctggcagcgagggcgccggcctgcccccatctggagagctgcacttctgggtgaaggaggcccgggacctgctgcccctgcgggccggcagcctggacacctag

SEQ ID NO: 172317 - DNA, 1689 bp, synthetic construct
  misc_feature 1..1689: note = Description of Artificial Sequence: Synthetic coding sequence
  source 1..1689: mol_type = other DNA
atgccccagaggggccaccccagccaggagggcctgtgggccctgcccagcctgcccatggcccacggccccaagccagagacagagggcctgctggacctgtccttcctgacagaggaggagcaggaggccatcgccggcgtgctgcagagagatgcccggctgcggcagctggaggagggccgggtgtccaagctgcgggcctctgtggccgaccccggccagctgaagatcctgaccggggactggttccaggaggcccggagccagaggcaccacaatgcccactttggaagtgacctggtgcgggcctccatgaggaggaagaagagcaccaggggggaccaggcccctggccatgaccgggaggccgaggccgctgtgaaggagaaggaggagggccctgagccccggctgaccattgatgaggccccccaggagcggctgcgggagacagagggccctgacttccccagccccagcgtgcccctgaaggccagtgaccctgaggaggccagccaggcccaggaggaccccggccagggcgaccagcaggtgtgtgccgaggaggccgaccctgagctggagcccgccagcggcggggagcaggagccccggccccagcaggcccagaccaaggccgccagccagatcctggagaatggagaggaggcccctggccctgaccccagcctggacaggatgctgagcagcagcagctctgtgagcagcctgaacagcagcaccctgagcggcagccagatgagcctgtctggagatgctgaggccgtgcaggtgcggggctctgtgcactttgccctgcactatgagcccggggctgctgagctgcgggtgcacgtgatccagtgccagggcctggccgccgccaggagaagaagaagtgacccctacgtgaagagctacctgctgcctgacaagcagagcaagaggaagacagctgtgaagaagaggaacctgaaccctgtgttcaatgagaccctgcgctacagcgtgccccaggccgagctgcagggccgggtgctgagcctgtctgtgtggcaccgggagagcctgggcaggaacatcttcctgggggaggtggaggtgcccctggacacctgggactggggcagcgagcccacctggctgcccctgcagccccgggtgccccccagcccagatgacctgcccagccggggcctgctggccctgagcctgaagtatgtgcctgctggcagcgagggcgccggcctgcccccatctggagagctgcacttctgggtgaaggaggcccgggacctgctgcccctgcgggccggcagcctggacacctacgtgcagtgctttgtgctgcctgatgacagccaggccagccggcagaggaccagggtggtgcggcgcagcctgagccctgtgttcaaccacaccatggtgtatgatggcttcggccctgctgacctgcggcaggcctgtgccgagctgagcctgtgggaccatggagccctggccaaccggcagctgggcggcacccggctgagcctgggcaccggcagcagctatggcctgcaggtgccctggatggacagcaccccagaggagaagcagctgtggcaggccctgctggagcagccctgtgagtgggtggatggcctgctgcccctgcggaccaacctggcccccaggacatag

SEQ ID NO: 172318 - DNA, 2808 bp, synthetic construct
  misc_feature 1..2808: note = Description of Artificial Sequence: Synthetic coding sequence
  source 1..2808: mol_type = other DNA
atgattgacctgtccttcctgacagaggaggagcaggaggccatcatgaaggtgctgcagagagatgctgccctgaagagagctgaggaggagcgggtgcgccacctgcctgagaagatcaaggatgaccagcagctgaagaacatgagcggccagtggttctatgaggccaaggccaagaggcaccgggacaagatccatggagctgacatcatccgggcctccatgaggaagaagaggccccagattgctgctgagcagagcaaggaccgggagaatggagccaaggagagctgggtgaacaacgtgaacaaggatgccttcctgcccccagagctggccggcgtggtggaggagcctgaggaggatgctgccccagccagccccagcagctctgtggtgaacccagccagctctgtgattgacatgagccaggagaacaccaggaagcccaacgtgtccccagagaagcagaggaagaaccccttcaacagcagcaagctgcctgagggccacagcagccagcagaccaagaatgagcagagcaagaatggccgcacaggcctcttccagaccagcaaagaagatgagctgtctgagagcaaggagaagagcacagtggccgacaccagcatccagaagctggagaagagcaagcagaccctgcccggcctgagcaatggcagccagatcaaggcccccatccccaaggccaggaagatgatctacaagagcacagacctgaacaaggatgacaaccagagcttcccccggcagaggacagacagcctgaaggcccggggggccccccggggcatcctgaagaggaacagcagcagcagcagcacagattctgagaccctgcgctacaaccacaactttgagcccaagagcaagatcgtgtccccaggcctgaccatccacgagcgcatcagcgagaaggagcacagcctggaggacaacagcagccccaacagcctggagcccctgaagcacgtgcgcttctctgctgtgaaggatgagctgccccagagccctggcctcatccacggccgggaggtgggggagttctctgtgctggagagtgaccggctgaagaatggcatggaggatgctggggacacagaggagttccagagcgaccccaagcccagccagtacaggaagcccagcctcttccaccagagcaccagcagcccctacgtgtccaagtctgagacccaccagcccatgaccagcggcagcttccccatcaatggcctgcacagccacagcgaggtgctgacagcccggccccagagcatggagaacagccccaccatcaatgagcccaaggacaagagcagcgagctgacccggctggagagcgtgctgcccaggagccctgcagatgagctgagccactgtgtggagcctgagcccagccaggtgcctgggggcagcagccgggaccggcagcagggcagcgaggaggagcccagccctgtgctgaagaccctggagaggtctgctgccaggaagatgcccagcaagagcctggaggacatcagcagtgacagcagcaaccaggccaaggtggacaaccagcctgaggagctggtgcgctctgcagaagatgtgtccacagtgcccacccagcctgacaaccccttcagccacccagacaagctgaagaggatgagcaagtctgtgcctgccttcctgcaggatgaaagtgatgaccgggagacagacacagccagcgagagcagctaccagctgagccgccacaagaagagccccagcagcctgaccaacctgagcagcagcagcggcatgaccagcctgagctctgtgtctggctctgtgatgtctgtgtacagcggggactttggaaacctggaggtgaagggcaacatccagtttgccattgaatatgtggagagcctgaaggagctgcacgtgtttgtggcccagtgcaaggacctggccgctgctgatgtgaagaagcagaggagtgacccctacgtgaaggcctacctgctgcctgacaagggcaagatgggcaagaagaagaccctggtggtgaagaagaccctgaaccctgtgtacaatgagatcctgcgctacaagattgagaagcagatcctgaagacccagaagctgaacctgagcatctggcaccgggacaccttcaagagaaattccttcctgggggaggtggagctggacctggagacctgggactgggacaacaagcagaacaagcagctgcgctggtaccccctgaagaggaagacagcccctgtggccctggaggccgagaacagaggagagatgaagctggccctgcagtatgtgcctgagcctgtgcctgggaagaagctgcccaccaccggggaggtgcacatctgggtgaaggaatgtctggacctgcccctgctgcggggcagccacctgaacagctttgtgaagtgcaccatcctgcctgacaccagcaggaagagccggcagaagaccagggctgtgggcaagaccaccaaccccatcttcaaccacaccatggtgtatgatggcttccggcctgaggacctgatggaggcctgtgtggagctgactgtgtgggaccactacaagctgaccaaccagttcctgggcggcctgagaattggatttggaacaggcaagagctatggaacagaggtggactggatggacagcaccagcgaggaggtggccctgtgggagaagatggtgaacagccccaacacctggattgaggccaccctgcccctgaggatgctgctgattgccaagatcagcaagtag

SEQ ID NO: 172319 - DNA, 3819 bp, synthetic construct
  misc_feature 1..3819: note = Description of Artificial Sequence: Synthetic coding sequence
  source 1..3819: mol_type = other DNA
atggatgagcccaatgctgagcaggtgtacaaccccagccagtttgagaacctgaggaagttctgggacctggaggccaacagcaacagcaaggacaatgacaagaacatcaccaccaccagccagaagaacagcgcccccttcaaccggcagaagcacaaggagttcagtgacatcaagctgagcggcaagaacacccatgaagctgaggtgctgctgagccccaagaaggtgatggcccgggaggagatggagaagctgaacagcaagggcatcctgcaggtgctgcctgatgagatcaccttccccctgagccccctgaggaagtacacctaccagctgcctggaaatgaaagcagcaaagaaaatgtggagaagaacacagagggcatcgtgacccctgtgttcaaggaggagaaggactacagcgagcaggagatccaggagagcatcatcaagaccaacgtgctgagcaaggactgcaaggacaccttcaatgacagcctgcagaagctgctgtctgagaccagcaccccagccatccagcccagcggcggcaaggtgcacggcaagcaggtgctggagcccagcgtgtctgagaacagaacctggccccagaagacagactttgctgacacagaggaggaggtgaagggccctgagaagatcatcaatgaacatgtggacaagacagtggtgcaccccaaggtgaagaggaacagcctgacagccagcctggacaagctgctgaaggaggccaccggcaccagccccagccccctgcaggccaagctggcccctgtgatcaccggcaccaacagcaagctggaggagggccgcttcttcggcaagggcatcgagcagagccacaacaccagcgctgacaagcgggagatcctggcccccttccctgtgagagatgagaccttcggcaacacagccctgctgaagaaggccgagagcggggagtgccagctgagcacccagaacctgatccagatggctgctgaggacagccaccccctggaccccaccagccagctgagcaggaagggcagctttggagatgtggccagccccccccaggacatgctgttcccccaggatgcccacctggtgccccaggcccgggtgcaccccagccagacagagatcagcgagaccgtggagaaggtgatcctgccccccaggcctgtgctgaatgatgtgtctgctgccctgcagaagctgtgtggggaggtgtggctgagctacccagctggccgggaggtgggccctggagaggtgaaccctgagttccctgaggccgtgcagcctgtgtgcagccccctgaaccccccaggagtcatcagcccctgggccaccatggacaccatcgtgcctgacaggaaggacttctacagcagcaatgtggtgcctgacaagacccatgaggtgggcagctacctggccgcccagatgagccccagcgaccagaccctgagcagctttgccagcatcgtggcccagtatggcaagggcctgccccaggaggtggaggagatcgtgcgggagaccatcgtgcagcccaagtctgagttcctggagttctctgctggcctggagaagctgctgaaggaggagacagagaccttccccagcaaatatgaaagtgacaccggcaacctgagccccagcaagctgattggcagcacagaggagccccggcgggccaccagcgagtgccaccctgaggagctgaaggagaccgtggagaaggccgaggcccccctcatcacagaaagtgcctttgatgctggctttgagaagctgctgaaggagatcacagaggccccaccctaccagccccaggtgtctgtgcgggaggagacccatgagaaggagagcagccagagcgagcagacccgcttcctgggcaccgtgccccacttctacagagctgccagccagaccagcgagatgaaggacaagagcaatggcctggagagccaggtgaaccagtgtgacaagatgctgggcggagatgccctggtgacagacctgctggtggacttctgtggcagccgcagcggcgtggagatccccaggaccccccagctgtatgtggcccacgagatcggcaccatcaagacagtgaccccacctgaggaccgggacagcgagagcggcgtggccggcggccagggcaccctgcaggagcccggctttggagaggccagcgaggccatctctgtgtccaggaaccggcagcccatccccctgctgatgaacaaggagaacagcaccaagaccagcaaggtggagctgaccctggccagcccctacatgaagcaggagaaggaggaggagaaggagggcttcagcgagagtgacttcagtgatggcaacaccagcagcaatgctgagagctggaggaaccccagcagcagcgaggaggagcccagccctgtgctgaagaccctggagaggtctgctgccaggaagatgcccagcaagagcctggaggacatcagcagtgacagcagcaaccaggccaaggtggacaaccagcctgaggagctggtgcgctctgcagaagatgatgagaagccagaccagaagcctgtgaccaatgaatgtgtgccccgcatcagcacagtgcccacccagcctgacaaccccttcagccacccagacaagctgaagaggatgagcaagtctgtgcctgccttcctgcaggatgaaagtgatgaccgggagacagacacagccagcgagagcagctaccagctgagccgccacaagaagagccccagcagcctgaccaacctgagcagcagcagcggcatgaccagcctgagctctgtgtctggctctgtgatgtctgtgtacagcggggactttggaaacctggaggtgaagggcaacatccagtttgccatcgagtatgtggagagcctgaaggagctgcacgtgtttgtggcccagtgcaaggacctggccgctgctgatgtgaagaagcagaggagtgacccctacgtgaaggcctacctgctgcctgacaagggcaagatgggcaagaagaagaccctggtggtgaagaagaccctgaaccctgtgtacaatgagatcctgcgctacaagattgagaagcagatcctgaagacccagaagctgaacctgagcatctggcaccgggacaccttcaagaggaacagcttcctgggggaggtggagctggacctggagacctgggactgggacaacaagcagaacaagcagctgcgctggtaccccctgaagaggaagacagcccctgtggccctggaggctgaaaatagaggagagatgaagctggccctgcagtatgtgcctgagcctgtgcctgggaagaagctgcccaccactggagaggtgcacatctgggtgaaggagtgcctggacctgcccctgctgcggggcagccacctgaacagctttgtgaagtgcaccatcctgcctgacaccagcaggaagagccggcagaagaccagggctgtgggcaagaccaccaaccccatcttcaaccacaccatggtgtatgatggcttccggcctgaggacctgatggaggcctgtgtggagctgactgtgtgggaccactacaagctgaccaaccagttcctgggcggcctgcgcatcggcttcggcaccgggaagagctatggaacagaggtggactggatggacagcaccagcgaggaggtggccctgtgggagaagatggtgaacagccccaacacctggattgaggccaccctgcccctgaggatgctgctgattgccaagatcagcaagtag

SEQ ID NO: 172320 - DNA, 5343 bp, synthetic construct
  misc_feature 1..5343: note = Description of Artificial Sequence: Synthetic coding sequence
  source 1..5343: mol_type = other DNA
atgatcaacagcagcctgtccatgctgttctcctacctggagaagtacttctacgtggctgatgagctgagccactgtgtggagcctgagcccagccaggtgcctgggggcagcagccgggaccggcagcagggcaagcccccacccctgcctgccctgaaggccaagaccagcagccgcagcggcccctatgccacagagatcaagaagagcacagatgacagcatcttcaaggtgctggactggttcaacagaagcagctacagtgatgacaacaagagcttcctgcagcacccccggggcatcgagagcaaggagaagacagacagcaagagccaggtggccgtggacctggtgacagatgacaccaccctgagagaaaatggcagcaagaccctgagccccagcaagattgagctgaagcctgtgcggagtgacagccccttccaggccgagggggacatgctggtgtctgagagctgccaggacaacaacgtgaacatcaagagcaagttcatgaacctgagccagaagggcacccccaaggagggccctggcatcctgcagccctttgagagctatggcacccccagccagggcagcaagaacatggactacagccaggacagcaagagccctggaaaaggaaatggagccagccccagcaacagcaactacagctacagcgtgctgaaggagagtgatgctgagaaccaggtgccctgcaacaccaacaacatcggcaacctgggggaggaggagcccaagttccacgcccacgaggagaacagaggccacagcgaggtgaactttgacagcagcacagtggtgaaggagcccggcctgaaggacaacatgaatgctgagaggaagagcaaggtgggcaacacctacatcctgaaggccagcctggagcctgagaacatcaagagcaccccaggagtggccaacaacggcagcccctggaagaagccagaggtgcagttccagcaggaggccggggaggtgcccaagaaccaggtgcagcgggagaagtacaagagggtgtctgaccgcatctccttctgggagggggagaaggccggggccaagatcacccatgagaagcccaccagcagctgcagccaggagcagcccagcgccaaggcctaccagcctgtgaagaagagccagggcgtgtcctccatggacagcctgagcacagaccagagcgagtacaaccaggccatccccaagagggtggtgctggatgaagatgaccaggccagccagctgagcaacagctacagcagcaacaagagcaaggagaccaagccccagattgctggccccagccgctactacctgtctgctgagcagagcgacaaggtgtccctcttccagaacaagaagaatgagcccatcaagaggagccaggtggccgacagcctgcccagcagaagaaacatcaccctgcctgccctgcagccccccagcaatgtgggcagcgagagacatgcccccctggagaaggaccggcccctggtgcgggagagcaatgccaacttcaaggtgatgagcctgaaggagaggatggatgagcccaatgctgagcaggtgtacaaccccagccagtttgagaacctgaggaagttctgggacctggaggccaacagcaacagcaaggacaatgacaagaacatcaccaccaccagccagaagaacagcgcccccttcaaccggcagaagcacaaggagttcagtgacatcaagctgagcggcaagaacacccatgaagctgaggtgctgctgagccccaagaaggtgatggcccgggaggagatggagaagctgaacagcaagggcatcctgcaggtgctgcctgatgagatcaccttccccctgagccccctgaggaagtacacctaccagctgcctggaaatgaaagcagcaaagaaaatgtggagaagaacacagagggcatcgtgacccctgtgttcaaggaggagaaggactacagcgagcaggagatccaggagagcatcatcaagaccaacgtgctgagcaaggactgcaaggacaccttcaatgacagcctgcagaagctgctgtctgagaccagcaccccagccatccagcccagcggcggcaaggtgcacggcaagcaggtgctggagcccagcgtgtctgagaacagaacctggccccagaagacagactttgctgacacagaggaggaggtgaagggccctgagaagatcatcaatgaacatgtggacaagacagtggtgcaccccaaggtgaagaggaacagcctgacagccagcctggacaagctgctgaaggaggccaccggcaccagccccagccccctgcaggccaagctggcccctgtgatcaccggcaccaacagcaagctggaggagggccgcttcttcggcaagggcatcgagcagagccacaacaccagcgctgacaagcgggagatcctggcccccttccctgtgagagatgagaccttcggcaacacagccctgctgaagaaggccgagagcggggagtgccagctgagcacccagaacctgatccagatggctgctgaggacagccaccccctggaccccaccagccagctgagcaggaagggcagctttggagatgtggccagccccccccaggacatgctgttcccccaggatgcccacctggtgccccaggcccgggtgcaccccagccagacagagatcagcgagaccgtggagaaggtgatcctgccccccaggcctgtgctgaatgatgtgtctgctgccctgcagaagctgtgtggggaggtgtggctgagctacccagctggccgggaggtgggccctggagaggtgaaccctgagttccctgaggccgtgcagcctgtgtgcagccccctgaaccccccaggagtcatcagcccctgggccaccatggacaccatcgtgcctgacaggaaggacttctacagcagcaatgtggtgcctgacaagacccatgaggtgggcagctacctggccgcccagatgagccccagcgaccagaccctgagcagctttgccagcatcgtggcccagtatggcaagggcctgccccaggaggtggaggagatcgtgcgggagaccatcgtgcagcccaagtctgagttcctggagttctctgctggcctggagaagctgctgaaggaggagacagagaccttccccagcaaatatgaaagtgacaccggcaacctgagccccagcaagctgattggcagcacagaggagccccggcgggccaccagcgagtgccaccctgaggagctgaaggagaccgtggagaaggccgaggcccccctcatcacagaaagtgcctttgatgctggctttgagaagctgctgaaggagatcacagaggccccaccctaccagccccaggtgtctgtgcgggaggagacccatgagaaggagagcagccagagcgagcagacccgcttcctgggcaccgtgccccacttctacagagctgccagccagaccagcgagatgaaggacaagagcaatggcctggagagccaggtgaaccagtgtgacaagatgctgggcggagatgccctggtgacagacctgctggtggacttctgtggcagccgcagcggcgtggagatccccaggaccccccagctgtatgtggcccacgagatcggcaccatcaagacagtgaccccacctgaggaccgggacagcgagagcggcgtggccggcggccagggcaccctgcaggagcccggctttggagaggccagcgaggccatctctgtgtccaggaaccggcagcccatccccctgctgatgaacaaggagaacagcaccaagaccagcaaggtggagctgaccctggccagcccctacatgaagcaggagaaggaggaggagaaggagggcttcagcgagagtgacttcagtgatggcaacaccagcagcaatgctgagagctggaggaaccccagcagcagcgaggaggagcccagccctgtgctgaagaccctggagaggtctgctgccaggaagatgcccagcaagagcctggaggacatcagcagtgacagcagcaaccaggccaaggtggacaaccagcctgaggagctggtgcgctctgcagaagatgtgtccacagtgcccacccagcctgacaaccccttcagccacccagacaagctgaagaggatgagcaagtctgtgcctgccttcctgcaggatgaaagtgatgaccgggagacagacacagccagcgagagcagctaccagctgagccgccacaagaagagccccagcagcctgaccaacctgagcagcagcagcggcatgaccagcctgagctctgtgtctggctctgtgatgtctgtgtacagcggggactttggaaacctggaggtgaagggcaacatccagtttgccatcgagtatgtggagagcctgaaggagctgcacgtgtttgtggcccagtgcaaggacctggccgctgctgatgtgaagaagcagaggagtgacccctacgtgaaggcctacctgctgcctgacaagggcaagatgggcaagaagaagaccctggtggtgaagaagaccctgaaccctgtgtacaatgagatcctgcgctacaagattgagaagcagatcctgaagacccagaagctgaacctgagcatctggcaccgggacaccttcaagaggaacagcttcctgggggaggtggagctggacctggagacctgggactgggacaacaagcagaacaagcagctgcgctggtaccccctgaagaggaagacagcccctgtggccctggaggctgaaaatagaggagagatgaagctggccctgcagtatgtgcctgagcctgtgcctgggaagaagctgcccaccactggagaggtgcacatctgggtgaaggagtgcctggacctgcccctgctgcggggcagccacctgaacagctttgtgaagtgcaccatcctgcctgacaccagcaggaagagccggcagaagaccagggctgtgggcaagaccaccaaccccatcttcaaccacaccatggtgtatgatggcttccggcctgaggacctgatggaggcctgtgtggagctgactgtgtgggaccactacaagctgaccaaccagttcctgggcggcctgcgcatcggcttcggcaccgggaagagctatggaacagaggtggactggatggacagcaccagcgaggaggtggccctgtgggagaagatggtgaacagccccaacacctggattgaggccaccctgcccctgaggatgctgctgattgccaagatcagcaagtag

SEQ ID NO: 172321 - DNA, 1098 bp, synthetic construct
  misc_feature 1..1098: note = Description of Artificial Sequence: Synthetic coding sequence
  source 1..1098: mol_type = other DNA
atgtctgatgaccgggagacagacacagccagcgagagcagctaccagctgagccgccacaagaagagccccagcagcctgaccaacctgagcagcagcagcggcatgaccagcctgagctctgtgtctggctctgtgatgtctgtgtacagcggggactttggaaacctggaggtgaagggcaacatccagtttgccattgaatatgtggagagcctgaaggagctgcacgtgtttgtggcccagtgcaaggacctggccgctgctgatgtgaagaagcagaggagtgacccctacgtgaaggcctacctgctgcctgacaagggcaagatgggcaagaagaagaccctggtggtgaagaagaccctgaaccctgtgtacaatgagatcctgcgctacaagattgagaagcagatcctgaagacccagaagctgaacctgagcatctggcaccgggacaccttcaagagaaattccttcctgggggaggtggagctggacctggagacctgggactgggacaacaagcagaacaagcagctgcgctggtaccccctgaagaggaagacagcccctgtggccctggaggccgagaacagaggagagatgaagctggccctgcagtatgtgcctgagcctgtgcctgggaagaagctgcccaccaccggggaggtgcacatctgggtgaaggaatgtctggacctgcccctgctgcggggcagccacctgaacagctttgtgaagtgcaccatcctgcctgacaccagcaggaagagccggcagaagaccagggctgtgggcaagaccaccaaccccatcttcaaccacaccatggtgtatgatggcttccggcctgaggacctgatggaggcctgtgtggagctgactgtgtgggaccactacaagctgaccaaccagttcctgggcggcctgagaattggatttggaacaggcaagagctatggaacagaggtggactggatggacagcaccagcgaggaggtggccctgtgggagaagatggtgaacagccccaacacctggattgaggccaccctgcccctgaggatgctgctgattgccaagatcagcaagtag

SEQ ID NO: 172322 - DNA, 2733 bp, synthetic construct
  misc_feature 1..2733: note = Description of Artificial Sequence: Synthetic coding sequence
  source 1..2733: mol_type = other DNA
atgattgacctgtccttcctgacagaggaggagcaggaggccatcatgaaggtgctgcagagagatgctgccctgaagagagctgaggaggagcgggtgcgccacctgcctgagaagatcaaggatgaccagcagctgaagaacatgagcggccagtggttctatgaggccaaggccaagaggcaccgggacaagatccatggagctgacatcatccgggcctccatgaggaagaagaggccccagattgctgctgagcagagcaaggaccgggagaatggagccaaggagagctgggtgaacaacgtgaacaaggatgccttcctgcccccagagctggccggcgtggtggaggagcctgaggaggatgctgccccagccagccccagcagctctgtggtgaacccagccagctctgtgattgacatgagccaggagaacaccaggaagcccaacgtgtccccagagaagaggaagaaccccttcaacagcagcaagctgcctgagggccacagcagccagcagaccaagaatgagcagagcaagaatggaagaacaggcctcttccagaccagcaaggaggatgagctgtctgagagcaaggagaagagcacagtggccgacaccagcatccagaagctggagaagagcaagcagaccctgcccggcctgagcaatggcagccagatcaaggcccccatccccaaggccaggaagatgatctacaagagcacagacctgaacaaggatgacaaccagagcttcccccggcagaggacagacagcctgaaggcccggggggccccccggggcatcctgaagaggaacagcagcagcagcagcacagacagcgagaccctgcgctacaaccacaactttgagcccaagagcaagatcgtgtccccaggcctgaccatccacgagcgcatcagcgagaaggagcacagcctggaggacaacagcagccccaacagcctggagcccctgaagcacgtgcgcttctctgctgtgaaggatgagctgccccagagccctggcctcatccacggccgggaggtgggggagttctctgtgctggagagtgaccggctgaagaatggcatggaggatgctggggacacagaggagttccagagcgaccccaagcccagccagtacaggaagcccagcctcttccaccagagcaccagcagcccctacgtgtccaagtctgagacccaccagcccatgaccagcggcagcttccccatcaatggcctgcacagccacagcgaggtgctgacagcccggccccagagcatggagaacagccccaccatcaatgagcccaaggacaagagcagcgagctgacccggctggagagcgtgctgcccaggagccctgcagatgagctgagccactgtgtggagcctgagcccagccaggtgcctgggggcagcagccgggaccggcagcagggcagcgaggaggagcccagccctgtgctgaagaccctggagaggtctgctgccaggaagatgcccagcaagagcctggaggacatcagcagtgacagcagcaaccaggccaaggtggacaaccagcctgaggagctggtgcgctctgcagaagatgatgagaagccagaccagaagcctgtgaccaatgaatgtgtgccccgcatcagcacagtgcccacccagcctgacaaccccttcagccacccagacaagctgaagaggatgagcaagtctgtgcctgccttcctgcaggatgaggtgtctggctctgtgatgtctgtgtacagcggggactttggaaacctggaggtgaagggcaacatccagtttgccatcgagtatgtggagagcctgaaggagctgcacgtgtttgtggcccagtgcaaggacctggccgctgctgatgtgaagaagcagaggagtgacccctacgtgaaggcctacctgctgcctgacaagggcaagatgggcaagaagaagaccctggtggtgaagaagaccctgaaccctgtgtacaatgagatcctgcgctacaagattgagaagcagatcctgaagacccagaagctgaacctgagcatctggcaccgggacaccttcaagaggaacagcttcctgggggaggtggagctggacctggagacctgggactgggacaacaagcagaacaagcagctgcgctggtaccccctgaagaggaagacagcccctgtggccctggaggctgaaaatagaggagagatgaagctggccctgcagtatgtgcctgagcctgtgcctgggaagaagctgcccaccactggagaggtgcacatctgggtgaaggagtgcctggacctgcccctgctgcggggcagccacctgaacagctttgtgaagtgcaccatcctgcctgacaccagcaggaagagccggcagaagaccagggctgtgggcaagaccaccaaccccatcttcaaccacaccatggtgtatgatggcttccggcctgaggacctgatggaggcctgtgtggagctgactgtgtgggaccactacaagctgaccaaccagttcctgggcggcctgcgcatcggcttcggcaccgggaagagctatggaacagaggtggactggatggacagcaccagcgaggaggtggccctgtgggagaagatggtgaacagccccaacacctggattgaggccaccctgcccctgaggatgctgctgattgccaagatcagcaagtag

SEQ ID NO: 172323 - DNA, 2733 bp, synthetic construct; identical to SEQ ID NO: 172322
  misc_feature 1..2733: note = Description of Artificial Sequence: Synthetic coding sequence
  source 1..2733: mol_type = other DNA

SEQ ID NO: 172324 - DNA, 192 bp, synthetic construct
  misc_feature 1..192: note = Description of Artificial Sequence: Synthetic coding sequence
  source 1..192: mol_type = other DNA
atgagcaagtctgtgcctgccttcctgcaggatgaaagtgatgaccgggagacagacacagccagcgagagcagctaccagctgagccgccacaagaagagccccagcagcctgaccaacctgagcagcagcagcggcatgaccagcctgagctctgtgtctggctctgtgatgtctgtgtacagcggctag

SEQ ID NO: 172325 - DNA, 3771 bp, synthetic construct
  misc_feature 1..3771: note = Description of Artificial Sequence: Synthetic coding sequence
  source 1..3771: mol_type = other DNA
atggatgagcccaatgctgagcaggtgtacaaccccagccagtttgagaacctgaggaagttctgggacctggaggccaacagcaacagcaaggacaatgacaagaacatcaccaccaccagccagaagaacagcgcccccttcaaccggcagaagcacaaggagttcagtgacatcaagctgagcggcaagaacacccatgaagctgaggtgctgctgagccccaagaaggtgatggcccgggaggagatggagaagctgaacagcaagggcatcctgcaggtgctgcctgatgagatcaccttccccctgagccccctgaggaagtacacctaccagctgcctggaaatgaaagcagcaaagaaaatgtggagaagaacacagagggcatcgtgacccctgtgttcaaggaggagaaggactacagcgagcaggagatccaggagagcatcatcaagaccaacgtgctgagcaaggactgcaaggacaccttcaatgacagcctgcagaagctgctgtctgagaccagcaccccagccatccagcccagcggcggcaaggtgcacggcaagcaggtgctggagcccagcgtgtctgagaacagaacctggccccagaagacagactttgctgacacagaggaggaggtgaagggccctgagaagatcatcaatgaacatgtggacaagacagtggtgcaccccaaggtgaagaggaacagcctgacagccagcctggacaagctgctgaaggaggccaccggcaccagccccagccccctgcaggccaagctggcccctgtgatcaccggcaccaacagcaagctggaggagggccgcttcttcggcaagggcatcgagcagagccacaacaccagcgctgacaagcgggagatcctggcccccttccctgtgagagatgagaccttcggcaacacagccctgctgaagaaggccgagagcggggagtgccagctgagcacccagaacctgatccagatggctgctgaggacagccaccccctggaccccaccagccagctgagcaggaagggcagctttggagatgtggccagccccccccaggacatgctgttcccccaggatgcccacctggtgccccaggcccgggtgcaccccagccagacagagatcagcgagaccgtggagaaggtgatcctgccccccaggcctgtgctgaatgatgtgtctgctgccctgcagaagctgtgtggggaggtgtggctgagctacccagctggccgggaggtgggccctggagaggtgaaccctgagttccctgaggccgtgcagcctgtgtgcagccccctgaaccccccaggagtcatcagcccctgggccaccatggacaccatcgtgcctgacaggaaggacttctacagcagcaatgtggtgcctgacaagacccatgaggtgggcagctacctggccgcccagatgagccccagcgaccagaccctgagcagctttgccagcatcgtggcccagtatggcaagggcctgccccaggaggtggaggagatcgtgcgggagaccatcgtgcagcccaagtctgagttcctggagttctctgctggcctggagaagctgctgaaggaggagacagagaccttccccagcaaatatgaaagtgacaccggcaacctgagccccagcaagctgattggcagcacagaggagccccggcgggccaccagcgagtgccaccctgaggagctgaaggagaccgtggagaaggccgaggcccccctcatcacagaaagtgcctttgatgctggctttgagaagctgctgaaggagatcacagaggccccaccctaccagccccaggtgtctgtgcgggaggagacccatgagaaggagagcagccagagcgagcagacccgcttcctgggcaccgtgccccacttctacagagctgccagccagaccagcgagatgaaggacaagagcaatggcctggagagccaggtgaaccagtgtgacaagatgctgggcggagatgccctggtgacagacctgctggtggacttctgtggcagccgcagcggcgtggagatccccaggaccccccagctgtatgtggcccacgagatcggcaccatcaagacagtgaccccacctgaggaccgggacagcgagagcggcgtggccggcggccagggcaccctgcaggagcccggctttggagaggccagcgaggccatctctgtgtccaggaaccggcagcccatccccctgctgatgaacaaggagaacagcaccaagaccagcaaggtggagctgaccctggccagcccctacatgaagcaggagaaggaggaggagaaggagggcttcagcgagagtgacttcagtgatggcaacaccagcagcaatgctgagagctggaggaaccccagcagcagcgaggaggagcccagccctgtgctgaagaccctggagaggtctgctgccaggaagatgcccagcaagagcctggaggacatcagcagtgacagcagcaaccaggccaaggtggacaaccagcctgaggagctggtgcgctctgcagaagatgtgtccacagtgcccacccagcctgacaaccccttcagccacccagacaagctgaagaggatgagcaagtctgtgcctgccttcctgcaggatgaaagtgatgaccgggagacagacacagccagcgagagcagctaccagctgagccgccacaagaagagccccagcagcctgaccaacctgagcagcagcagcggcatgaccagcctgagctctgtgtctggctctgtgatgtctgtgtacagcggggactttggaaacctggaggtgaagggcaacatccagtttgccatcgagtatgtggagagcctgaaggagctgcacgtgtttgtggcccagtgcaaggacctggccgctgctgatgtgaagaagcagaggagtgacccctacgtgaaggcctacctgctgcctgacaagggcaagatgggcaagaagaagaccctggtggtgaagaagaccctgaaccctgtgtacaatgagatcctgcgctacaagattgagaagcagatcctgaagacccagaagctgaacctgagcatctggcaccgggacaccttcaagaggaacagcttcctgggggaggtggagctggacctggagacctgggactgggacaacaagcagaacaagcagctgcgctggtaccccctgaagaggaagacagcccctgtggccctggaggctgaaaatagaggagagatgaagctggccctgcagtatgtgcctgagcctgtgcctgggaagaagctgcccaccactggagaggtgcacatctgggtgaaggagtgcctggacctgcccctgctgcggggcagccacctgaacagctttgtgaagtgcaccatcctgcctgacaccagcaggaagagccggcagaagaccagggctgtgggcaagaccaccaaccccatcttcaaccacaccatggtgtatgatggcttccggcctgaggacctgatggaggcctgtgtggagctgactgtgtgggaccactacaagctgaccaaccagttcctgggcggcctgcgcatcggcttcggcaccgggaagagctatggaacagaggtggactggatggacagcaccagcgaggaggtggccctgtgggagaagatggtgaacagccccaacacctggattgaggccaccctgcccctgaggatgctgctgattgccaagatcagcaagtag

SEQ ID NO: 172326 - DNA, 1131 bp, synthetic construct
  misc_feature 1..1131: note = Description of Artificial Sequence: Synthetic coding sequence
  source 1..1131: mol_type = other DNA
atgagcaagtctgtgcctgccttcctgcaggatgaaagtgatgaccgggagacagacacagccagcgagagcagctaccagctgagccgccacaagaagagccccagcagcctgaccaacctgagcagcagcagcggcatgaccagcctgagctctgtgtctggctctgtgatgtctgtgtacagcggggactttggaaacctggaggtgaagggcaacatccagtttgccatcgagtatgtggagagcctgaaggagctgcacgtgtttgtggcccagtgcaaggacctggccgctgctgatgtgaagaagcagaggagtgacccctacgtgaaggcctacctgctgcctgacaagggcaagatgggcaagaagaagaccctggtggtgaagaagaccctgaaccctgtgtacaatgagatcctgcgctacaagattgagaagcagatcctgaagacccagaagctgaacctgagcatctggcaccgggacaccttcaagaggaacagcttcctgggggaggtggagctggacctggagacctgggactgggacaacaagcagaacaagcagctgcgctggtaccccctgaagaggaagacagcccctgtggccctggaggctgaaaatagaggagagatgaagctggccctgcagtatgtgcctgagcctgtgcctgggaagaagctgcccaccactggagaggtgcacatctgggtgaaggagtgcctggacctgcccctgctgcggggcagccacctgaacagctttgtgaagtgcaccatcctgcctgacaccagcaggaagagccggcagaagaccagggctgtgggcaagaccaccaaccccatcttcaaccacaccatggtgtatgatggcttccggcctgaggacctgatggaggcctgtgtggagctgactgtgtgggaccactacaagctgaccaaccagttcctgggcggcctgcgcatcggcttcggcaccgggaagagctatggaacagaggtggactggatggacagcaccagcgaggaggtggccctgtgggagaagatggtgaacagccccaacacctggattgaggccaccctgcccctgaggatgctgctgattgccaagatcagcaagtag

SEQ ID NO: 172327 - DNA, 312 bp, synthetic construct
  misc_feature 1..312: note = Description of Artificial Sequence: Synthetic coding sequence
  source 1..312: mol_type = other DNA
atgagcaagtctgtgcctgccttcctgcaggatgaaagtgatgaccgggagacagacacagccagcgagagcagctaccagctgagccgccacaagaagagccccagcagcctgaccaacctgagcagcagcagcggcatgaccagcctgagctctgtgtctggctctgtgatgtctgtgtacagcggggactttggaaacctggaggtgaagggcaacatccagtttgccatcgagtatgtggagagcctgaaggagctgcacgtgtttgtggcccagtgcaaggacctggccgctgctgatgtgaagtag

SEQ ID NO: 172328 - DNA, 2709 bp, synthetic construct
  misc_feature 1..2709: note = Description of Artificial Sequence: Synthetic coding sequence
  source 1..2709: mol_type = other DNA
atgagcggccagtggttctatgaggccaaggccaagaggcaccgggacaagatccatggagctgacatcatccgggcctccatgaggaagaagaggccccagattgctgctgagcagagcaaggaccgggagaatggagccaaggagagctgggtgaacaacgtgaacaaggatgccttcctgcccccagagctggccggcgtggtggaggagcctgaggaggatgctgccccagccagccccagcagctctgtggtgaacccagccagctctgtgattgacatgagccaggagaacaccaggaagcccaacgtgtccccagagaagaggaagaaccccttcaacagcagcaagctgcctgagggccacagcagccagcagaccaagaatgagcagagcaagaatggaagaacaggcctcttccagaccagcaaggaggatgagctgtctgagagcaaggagaagagcacagtggccgacaccagcatccagaagctggagaagagcaagcagaccctgcccggcctgagcaatggcagccagatcaaggcccccatccccaaggccaggaagatgatctacaagagcacagacctgaacaaggatgacaaccagagcttcccccggcagaggacagacagcctgaaggcccggggggccccccggggcatcctgaagaggaacagcagcagcagcagcacagacagcgagaccctgcgctacaaccacaactttgagcccaagagcaagatcgtgtccccaggcctgaccatccacgagcgcatcagcgagaaggagcacagcctggaggacaacagcagccccaacagcctggagcccctgaagcacgtgcgcttctctgctgtgaaggatgagctgccccagagccctggcctcatccacggccgggaggtgggggagttctctgtgctggagagtgaccggctgaagaatggcatggaggatgctggggacacagaggagttccagagcgaccccaagcccagccagtacaggaagcccagcctcttccaccagagcaccagcagcccctacgtgtccaagtctgagacccaccagcccatgaccagcggcagcttccccatcaatggcctgcacagccacagcgaggtgctgacagcccggccccagagcatggagaacagccccaccatcaatgagcccaaggacaagagcagcgagctgacccggctggagagcgtgctgcccaggagccctgcagatgagctgagccactgtgtggagcctgagcccagccaggtgcctgggggcagcagccgggaccggcagcagggcagcgaggaggagcccagccctgtgctgaagaccctggagaggtctgctgccaggaagatgcccagcaagagcctggaggacatcagcagtgacagcagcaaccaggccaaggtggacaaccagcctgaggagctggtgcgctctgcagaagatgatgagaagccagaccagaagcctgtgaccaatgaatgtgtgccccgcatcagcacagtgcccacccagcctgacaaccccttcagccacccagacaagctgaagaggatgagcaagtctgtgcctgccttcctgcaggatgaaagtgatgaccgggagacagacacagccagcgagagcagctaccagctgagccgccacaagaagagccccagcagcctgaccaacctgagcagcagcagcggcatgaccagcctgagctctgtgtctggctctgtgatgtctgtgtacagcggggactttggaaacctggaggtgaagggcaacatccagtttgccatcgagtatgtggagagcctgaaggagctgcacgtgtttgtggcccagtgcaaggacctggccgctgctgatgtgaagaagcagaggagtgacccctacgtgaaggcctacctgctgcctgacaagggcaagatgggcaagaagaagaccctggtggtgaagaagaccctgaaccctgtgtacaatgagatcctgcgctacaagattgagaagcagatcctgaagacccagaagctgaacctgagcatctggcaccgggacaccttcaagaggaacagcttcctgggggaggtggagctggacctggagacctgggactgggacaacaagcagaacaagcagctgcgctggtaccccctgaagaggaagacagcccctgtggccctggaggctgaaaatagaggagagatgaagctggccctgcagtatgtgcctgagcctgtgcctgggaagaagctgcccaccactggagaggtgcacatctgggtgaaggagtgcctggacctgcccctgctgcggggcagccacctgaacagctttgtgaagtgcaccatcctgcctgacaccagcaggaagagccggcagaagaccagggctgtgggcaagaccaccaaccccatcttcaaccacaccatggtgtatgatggcttccggcctgaggacctgatggaggcctgtgtggagctgactgtgtgggaccactacaagctgaccaaccagttcctgggcggcctgcgcatcggcttcggcaccgggaagagctatggaacagaggtggactggatggacagcaccagcgaggaggtggccctgtgggagaagatggtgaacagccccaacacctggattgaggccaccctgcccctgaggatgctgctgattgccaagatcagcaagtag

SEQ ID NO: 172329 - DNA, 483 bp, synthetic construct
  misc_feature 1..483: note = Description of Artificial Sequence: Synthetic coding sequence
  source 1..483: mol_type = other DNA
atgagcaagtctgtgcctgccttcctgcaggatgaggtgtctggctctgtgatgtctgtgtacagcggggactttggaaacctggaggtgaagggcaacatccagtttgccatcgagtatgtggagagcctgaaggagctgcacgtgtttgtggcccagtgcaaggacctggccgctgctgatgtgaagaagcagaggagtgacccctacgtgaaggcctacctgctgcctgacaagggcaagatgggcaagaagaagaccctggtggtgaagaagaccctgaaccctgtgtacaatgagatcctgcgctacaagattgagaagcagatcctgaagacccagaagctgaacctgagcatctggcaccgggacaccttcaagaggaacagcttcctgggggaggtggagctggacctggagacctgggactgggacaacaagcagaacaagcagctgcgctggtaccccctgaagaggaagtag

SEQ ID NO: 172330 - DNA, 2805 bp, synthetic construct
  misc_feature 1..2805: note = Description of Artificial Sequence: Synthetic coding sequence
  source 1..2805: mol_type = other DNA
atgattgacctgtccttcctgacagaggaggagcaggaggccatcatgaaggtgctgcagagagatgctgccctgaagagagctgaggaggagcgggtgcgccacctgcctgagaagatcaaggatgaccagcagctgaagaacatgagcggccagtggttctatgaggccaaggccaagaggcaccgggacaagatccatggagctgacatcatccgggcctccatgaggaagaagaggccccagattgctgctgagcagagcaaggaccgggagaatggagccaaggagagctgggtgaacaacgtgaacaaggatgccttcctgcccccagagctggccggcgtggtggaggagcctgaggaggatgctgccccagccagccccagcagctctgtggtgaacccagccagctctgtgattgacatgagccaggagaacaccaggaagcccaacgtgtccccagagaagaggaagaaccccttcaacagcagcaagctgcctgagggccacagcagccagcagaccaagaatgagcagagcaagaatggaagaacaggcctcttccagaccagcaaggaggatgagctgtctgagagcaaggagaagagcacagtggccgacaccagcatccagaagctggagaagagcaagcagaccctgcccggcctgagcaatggcagccagatcaaggcccccatccccaaggccaggaagatgatctacaagagcacagacctgaacaaggatgacaaccagagcttcccccggcagaggacagacagcctgaaggcccggggggccccccggggcatcctgaagaggaacagcagcagcagcagcacagacagcgagaccctgcgctacaaccacaactttgagcccaagagcaagatcgtgtccccaggcctgaccatccacgagcgcatcagcgagaaggagcacagcctggaggacaacagcagccccaacagcctggagcccctgaagcacgtgcgcttctctgctgtgaaggatgagctgccccagagccctggcctcatccacggccgggaggtgggggagttctctgtgctggagagtgaccggctgaagaatggcatggaggatgctggggacacagaggagttccagagcgaccccaagcccagccagtacaggaagcccagcctcttccaccagagcaccagcagcccctacgtgtccaagtctgagacccaccagcccatgaccagcggcagcttccccatcaatggcctgcacagccacagcgaggtgctgacagcccggccccagagcatggagaacagccccaccatcaatgagcccaaggacaagagcagcgagctgacccggctggagagcgtgctgcccaggagccctgcagatgagctgagccactgtgtggagcctgagcccagccaggtgcctgggggcagcagccgggaccggcagcagggcagcgaggaggagcccagccctgtgctgaagaccctggagaggtctgctgccaggaagatgcccagcaagagcctggaggacatcagcagtgacagcagcaaccaggccaaggtggacaaccagcctgaggagctggtgcgctctgcagaagatgtgtccacagtgcccacccagcctgacaaccccttcagccacccagacaagctgaagaggatgagcaagtctgtgcctgccttcctgcaggatgaaagtgatgaccgggagacagacacagccagcgagagcagctaccagctgagccgccacaagaagagccccagcagcctgaccaacctgagcagcagcagcggcatgaccagcctgagctctgtgtctggctctgtgatgtctgtgtacagcggggactttggaaacctggaggtgaagggcaacatccagtttgccatcgagtatgtggagagcctgaaggagctgcacgtgtttgtggcccagtgcaaggacctggccgctgctgatgtgaagaagcagaggagtgacccctacgtgaaggcctacctgctgcctgacaagggcaagatgggcaagaagaagaccctggtggtgaagaagaccctgaaccctgtgtacaatgagatcctgcgctacaagattgagaagcagatcctgaagacccagaagctgaacctgagcatctggcaccgggacaccttcaagaggaacagcttcctgggggaggtggagctggacctggagacctgggactgggacaacaagcagaacaagcagctgcgctggtaccccctgaagaggaagacagcccctgtggccctggaggctgaaaatagaggagagatgaagctggccctgcagtatgtgcctgagcctgtgcctgggaagaagctgcccaccactggagaggtgcacatctgggtgaaggagtgcctggacctgcccctgctgcggggcagccacctgaacagctttgtgaagtgcaccatcctgcctgacaccagcaggaagagccggcagaagaccagggctgtgggcaagaccaccaaccccatcttcaaccacaccatggtgtatgatggcttccggcctgaggacctgatggaggcctgtgtggagctgactgtgtgggaccactacaagctgaccaaccagttcctgggcggcctgcgcatcggcttcggcaccgggaagagctatggaacagaggtggactggatggacagcaccagcgaggaggtggccctgtgggagaagatggtgaacagccccaacacctggattgaggccaccctgcccctgaggatgctgctgattgccaagatcagcaagtag

SEQ ID NO: 172331 - DNA, 468 bp, synthetic construct
  misc_feature 1..468: note = Description of Artificial Sequence: Synthetic coding sequence
  source 1..468: mol_type = other DNA
atgagcaagtctgtgcctgccttcctgcaggatgaaagtgatgaccgggagacagacacagccagcgagagcagctaccagctgagccgccacaagaagagccccagcagcctgaccaacctgagcagcagcagcggcatgaccagcctgagctctgtgtctggctctgtgatgtctgtgtacagcggggactttggaaacctggaggtgaagggcaacatccagtttgccatcgagtatgtggagagcctgaaggagctgcacgtgtttgtggcccagtgcaaggacctggccgctgctgatgtgaagaagcagaggagtgacccctacgtgaaggcctacctgctgcctgacaagggcaagatgggcaagaagaagaccctggtggtgaagaagaccctgaaccctgtgtacaatgagatcctgcgctacaagattgagaagcagatcctgaagacccagaagtag

SEQ ID NO: 172332 - DNA, 1131 bp, synthetic construct; identical to SEQ ID NO: 172326
  misc_feature 1..1131: note = Description of Artificial Sequence: Synthetic coding sequence
  source 1..1131: mol_type = other DNA

SEQ ID NO: 172333 - DNA, 1956 bp, synthetic construct
  misc_feature 1..1956: note = Description of Artificial Sequence: Synthetic coding sequence
  source 1..1956: mol_type = other DNA
gagaccgtggagaaggccgaggcccccctcatcacagagagcgcctttgatgctggctttgagaagctgctgaaggagatcacagaggccccaccctaccagccccaggtgtctgtgcgggaggagacccatgagaaggagagcagccagagcgagcagacccgcttcctgggcaccgtgccccacttctaccgggccgccagccagaccagcgagatgaaggacaagagcaatggcctggagagccaggtgaaccagtgtgacaagatgctgggcggagatgccctggtgacagacctgctggtggacttctgtggcagccgctctggagtggagatccccaggaccccccagctgtatgtggcccatgaaattggcaccatcaagacagtgaccccaccagaagatcgggacagcgagagcggcgtggccggcggccagggcaccctgcaggagcccggctttggagaggccagcgaggccatctctgtgtccaggaaccggcagcccatccccctgctgatgaacaaggagaacagcaccaagaccagcaaggtggagctgaccctggccagcccctacatgaagcaggagaaggaggaggagaaggagggcttcagcgagagtgacttcagtgatggcaacaccagcagcaatgctgagagctggaggaaccccagcagcagcgaggaggagcccagccctgtgctgaagaccctggagaggtctgctgccaggaagatgcccagcaagagcctggaggacatcagcagtgacagcagcaaccaggccaaggtggacaaccagcctgaggagctggtgcgctctgcagaagatgatgagaagccagaccagaagcctgtgaccaatgaatgtgtgccccgcatcagcacagtgcccacccagcctgacaaccccttcagccacccagacaagctgaagaggatgagcaagtctgtgcctgccttcctgcaggatgaggtgtctggctctgtgatgtctgtgtacagcggggactttggaaacctggaggtgaagggcaacatccagtttgccattgaatatgtggagagcctgaaggagctgcacgtgtttgtggcccagtgcaaggacctggccgctgctgatgtgaagaagcagaggagtgacccctacgtgaaggcctacctgctgcctgacaagggcaagatgggcaagaagaagaccctggtggtgaagaagaccctgaaccctgtgtacaatgagatcctgcgctacaagattgagaagcagatcctgaagacccagaagctgaacctgagcatctggcaccgggacaccttcaagagaaattccttcctgggggaggtggagctggacctggagacctgggactgggacaacaagcagaacaagcagctgcgctggtaccccctgaagaggaagacagcccctgtggccctggaggccgagaacagaggagagatgaagctggccctgcagtatgtgcctgagcctgtgcctgggaagaagctgcccaccaccggggaggtgcacatctgggtgaaggaatgtctggacctgcccctgctgcggggcagccacctgaacagctttgtgaagtgcaccatcctgcctgacaccagcaggaagagccggcagaagaccagggctgtgggcaagaccaccaaccccatcttcaaccacaccatggtgtatgatggcttccggcctgaggacctgatggaggcctgtgtggagctgactgtgtgggaccactacaagctgaccaaccagttcctgggcggcctgagaattggatttggaacaggcaagagctatggaacagaggtggactggatggacagcaccagcgaggaggtggccctgtgggagaagatggtgaacagccccaacacctggattgaggccaccctgcccctgaggatgctgctgattgccaagatcagcaagtag

SEQ ID NO: 172334 - DNA, 213 bp, synthetic construct
  misc_feature 1..213: note = Description of Artificial Sequence: Synthetic coding sequence
  source 1..213: mol_type = other DNA
atgagcaagtctgtgcctgccttcctgcaggatgaaagtgatgaccgggagacagacacagccagcgagagcagctaccagctgagccgccacaagaagagccccagcagcctgaccaacctgagcagcagcagcggcatgaccagcctgagctctgtgtctggctctgtgatgtctgtgtacagcggggactttggaaacctggaggtgtag

SEQ ID NO: 172335 - DNA, 1011 bp, synthetic construct
  misc_feature 1..1011: note = Description of Artificial Sequence: Synthetic coding sequence
  source 1..1011: mol_type = other DNA
atgagcaagtctgtgcctgccttcctgcaggatgaggtgtctggctctgtgatgtctgtgtacagcggggactttggaaacctggaggtgaagggcaacatccagtttgccatcgagtatgtggagagcctgaaggagctgcacgtgtttgtggcccagtgcaaggacctggccgctgctgatgtgaagaagcagaggagtgacccctacgtgaaggcctacctgctgcctgacaagggcaagatgggcaagaagaagaccctggtggtgaagaagaccctgaaccctgtgtacaatgagatcctgcgctacaagattgagaagcagatcctgaagacccagaagctgaacctgagcatctggcaccgggacaccttcaagaggaacagcttcctgggggaggtggagctggacctggagacctgggactgggacaacaagcagaacaagcagctgcgctggtaccccctgaagaggaagacagcccctgtggccctggaggctgaaaatagaggagagatgaagctggccctgcagtatgtgcctgagcctgtgcctgggaagaagctgcccaccactggagaggtgcacatctgggtgaaggagtgcctggacctgcccctgctgcggggcagccacctgaacagctttgtgaagtgcaccatcctgcctgacaccagcaggaagagccggcagaagaccagggctgtgggcaagaccaccaaccccatcttcaaccacaccatggtgtatgatggcttccggcctgaggacctgatggaggcctgtgtggagctgactgtgtgggaccactacaagctgaccaaccagttcctgggcggcctgcgcatcggcttcggcaccgggaagagctatggaacagaggtggactggatggacagcaccagcgaggaggtggccctgtgggagaagatggtgaacagccccaacacctggattgaggccaccctgcccctgaggatgctgctgattgccaagatcagcaagtag

SEQ ID NO: 172336 - DNA, 2016 bp, synthetic construct
  misc_feature 1..2016: note = Description of Artificial Sequence: Synthetic coding sequence
  source 1..2016: mol_type = other DNA
atgtctgagctgctggacctgtccttcctgtctgaggaggagaaggacctgatcctgtctgtgctgcagagagatgaggaggtgaggaaggcagatgagaagaggatccggcggctgaagaatgagctgctggagatcaagaggaaaggagccaagaggggcagccagcactacagcgacaggacctgtgcccgctgccaggagagcctgggccgcctgagccccaagaccaacacctgccggggctgcaaccacctggtgtgccgggactgccgcatccaggagagcaatggcacctggcgctgcaaggtgtgtgccaaggagattgagctgaagaaggccactggagactggttctatgaccagaaggtgaacagatttgcctacagaactggaagtgagatcatccgcatgagcctgcggcacaagccagctgtgtccaagcgggagaccgtgggccagagcctgctgcaccagacccagatgggagacatctggccaggcaggaagatcatccaggagcggcagaaggagcccagcgtgctgtttgaggtgcccaagctgaagagcggcaagagcgccctggaggccgagagcgagagcctggacagcttcaccgctgacagcgacagcaccagccggcgggacagcctggacaagagcggcctcttccctgagtggaagaagatgtctgcccccaagagccaggtggagaaggagacccagcccggcggccagaatgtggtgtttgtggatgaaggagagatgatcttcaagaagaacaccaggaagatcctgcggcccagcgagtacaccaagagcgtcatcgacctgcggccagaagatgtggtgcatgaaagtggcagcctgggggacaggagcaagtctgtgcccggcctgaatgtggacatggaggaggaggaggaggaggaggacatcgaccacctggtgaagctgcaccggcagaagctggcccggagctccatgcagagcggcagctccatgagcaccatcggctccatgatgagcatctacagcgaggccggggactttggaaacatctttgtgacaggccgcatcgccttcagcctgaagtatgagcagcagacccagagcctggtggtgcacgtgaaggagtgccaccagctggcctatgcagatgaggccaagaagaggagcaacccctacgtgaagacctacctgctgcctgacaagagccggcagggcaagaggaagaccagcatcaagagggacaccatcaaccccctgtatgatgagaccctgcgctatgagatccctgagagcctgctggcccagaggaccctgcagttctctgtgtggcaccacggccgcttcggcaggaacaccttcctgggggaggccgagatccagatggacagctggaagctggacaagaagctggaccactgcctgcccctgcacggcaagatctctgctgagagccccaccggcctgcccagccacaagggggagctggtggtgtccctgaagtacatcccagccagcaagacccctgtgggcggggacaggaagaagagcaaaggaggagagggcggggagctgcaggtgtggatcaaggaggccaagaacctgacagctgccaaggccggcggcaccagtgacagctttgtgaagggctacctgctgcccatgaggaacaaggccagcaagaggaagacccctgtgatgaagaagaccctgaacccccactacaaccacacctttgtgtacaatggagtgcggctggaggacctgcagcacatgtgcctggagctgactgtgtgggaccgggagcccctggccagcaatgacttcctgggcggcgtgcggctgggcgtgggcaccggcatcagcaatggagaggtggtggactggatggacagcactggagaggaggtgtccctgtggcagaagatgaggcagtacccaggctcctgggccgagggcaccctgcagctgcggagctccatggccaagcagaagctgggcctgtag

SEQ ID NO: 172337 - DNA, 2016 bp, synthetic construct; identical to SEQ ID NO: 172336
  misc_feature 1..2016: note = Description of Artificial Sequence: Synthetic coding sequence
  source 1..2016: mol_type = other DNA

SEQ ID NO: 172338 - DNA, 1050 bp, synthetic construct
  misc_feature 1..1050: note = Description of Artificial Sequence: Synthetic coding sequence
  source 1..1050: mol_type = other DNA
atgtctgagctgctggacctgtccttcctgtctgaggaggagaaggacctgatcctgtctgtgctgcagagagatgaggaggtgaggaaggcagatgagaagaggatccggcggctgaagaatgagctgctggagatcaagaggaaaggagccaagaggggcagccagcactacagcgacaggacctgtgcccgctgccaggagagcctgggccgcctgagccccaagaccaacacctgccggggctgcaaccacctggtgtgccgggactgccgcatccaggagagcaatggcacctggcgctgcaaggtgtgtgccaaggagattgagctgaagaaggccactggagactggttctatgaccagaaggtgaacagatttgcctacagaactggaagtgagatcatccgcatgagcctgcggcacaagccagctgtgtccaagcgggagaccgtgggccagagcctgctgcaccagacccagatgggagacatctggccaggcaggaagatcatccaggagcggcagaaggagcccagcgtgctgtttgaggtgcccaagctgaagagcggcaagagcgccctggaggccgagagcgagagcctggacagcttcaccgctgacagcgacagcaccagccggcgggacagcctggacaagagcggcctcttccctgagtggaagaagatgtctgcccccaagagccaggtggagaaggagacccagcccggcggccagaatgtggtgtttgtggatgaaggagagatgatcttcaagaagaacaccaggaagatcctgcggcccagcgagtacaccaagagcgtcatcgacctgcggccagaagatgtggtgcatgaaagtggcagcctgggggacaggagcaagtctgtgcccggcctgaatgtggacatggaggaggaggaggaggaggaggacatcgaccacctggtgaagctgcaccggcagaagctggcccggagctccatgcagagcggcagctccatggtgagcagcatccgctctgtggtgacaggcatgctgggctactag

SEQ ID NO: 172339 - DNA, 2016 bp, synthetic construct; identical to SEQ ID NO: 172336
  misc_feature 1..2016: note = Description of Artificial Sequence: Synthetic coding sequence
  source 1..2016: mol_type = other DNA

SEQ ID NO: 172340 - DNA, 2022 bp, synthetic construct
  misc_feature 1..2022: note = Description of Artificial Sequence: Synthetic coding sequence
  source 1..2022: mol_type = other DNA
atgtctgagctgctggacctgtccttcctgtctgaggaggagaaggacctgatcctgtctgtgctgcagagagatgaggaggtgaggaaggcagatgagaagaggatccggcggctgaagaatgagctgctggagatcaagaggaaaggagccaagaggggcagccagcactacagcgacaggacctgtgcccgctgccaggagagcctgggccgcctgagccccaagaccaacacctgccggggctgcaaccacctggtgtgccgggactgccgcatccaggagagcaatggcacctggcgctgcaaggtgtgtgccaaggagattgagctgaagaaggccactggagactggttctatgaccagaaggtgaacagatttgcctacagaactggaagtgagatcatccgcatgagcctgcggcacaagccagctgtgtccaagcgggagaccgtgggccagagcctgctgcaccagacccagatgggagacatctggccaggcaggaagatcatccaggagcggcagaaggagcccagctctgtgctgtttgaggtgcccaagctgaagagcggcaagagcgccctggaggccgagagcgagagcctggacagcttcaccgctgacagcgacagcaccagcagaagagacagcctggacaagagcggcctcttccctgagtggaagaagatgtctgcccccaagagccaggtggagaaggagacccagcccggcggccagaatgtggtgtttgtggatgaaggagagatgatcttcaagaagaacaccaggaagatcctgcggcccagcgagtacaccaagtctgtgattgacctgcggccagaagatgtggtgcatgagagcggcagcctgggggacaggagcaagtctgtgcccggcctgaatgtggacatggtggaggaggaggaggaggaggaggacatcgaccacctggtgaagctgcaccggcagaagctggcccggagctccatgcagagcggcagctccatgagcaccatcggctccatgatgagcatctacagcgaggccggggactttggaaacatctttgtgacaggccgcatcgccttcagcctgaagtatgagcagcagacccagagcctggtggtgcacgtgaaggagtgccaccagctggcctatgcagatgaggccaagaagaggagcaacccctacgtgaagacctacctgctgcctgacaagagccggcagggcaagaggaagaccagcatcaagagggacaccatcaaccccctgtatgatgagaccctgcgctatgagatccctgagagcctgctggcccagaggaccctgcagttctctgtgtggcaccacggccgcttcggcaggaacaccttcctgggggaggccgagatccagatggacagctggaagctggacaagaagctggaccactgcctgcccctgcacggcaagatctctgctgagagccccaccggcctgcccagccacaagggggagctggtggtgtccctgaagtacatcccagccagcaagacccctgtgggcggggacaggaagaagagcaaaggaggagagggcggggagctgcaggtgtggatcaaggaggccaagaacctgacagctgccaaggccggcggcaccagtgacagctttgtgaagggctacctgctgcccatgaggaacaaggccagcaagaggaagacccctgtgatgaagaagaccctgaacccccactacaaccacacctttgtgtacaatggagtgcggctggaggacctgcagcacatgtgcctggagctgactgtgtgggaccgggagcccctggccagcaatgacttcctgggcggcgtgcggctgggcgtgggcaccggcatcagcaatggagaggtggtggactggatggacagcactggagaggaggtgtccctgtggcagaagatgaggcagtacccaggctcctgggccgagggcaccctgcagctgcggagctccatggccaagcagaagctgggcctgtag

SEQ ID NO: 172341 - DNA, 2016 bp, synthetic construct; identical to SEQ ID NO: 172336
  misc_feature 1..2016: note = Description of Artificial Sequence: Synthetic coding sequence
  source 1..2016: mol_type = other DNA

SEQ ID NO: 172342 - DNA, 933 bp, synthetic construct
  misc_feature 1..933: note = Description of Artificial Sequence: Synthetic coding sequence
  source 1..933: mol_type = other DNA
atgaggcgggccgccctgtggctgtggctgtgtgccctggccctgagcctgcagcctgccctgccccagatcgtggccaccaacctgcccccagaggaccaggacggcagcggagatgacagcgacaacttcagcggcagcggggccggggccctgcaggacatcaccctgagccagcagacccccagcacctggaaggacacccagctgctgacagccatccccaccagccctgagcccaccggcctggaggccacagctgccagcaccagcaccctgcctgctggggagggccccaaggagggggaggccgtggtgctgcctgaggtggagcccggcctgacagcccgggagcaggaggccaccccccggccccgggagaccacccagctgcccaccacccacctggccagcaccaccacagccaccacagcccaggagcccgccaccagccacccccaccgggacatgcagcccggccaccacgagaccagcaccccagctggccccagccaggccgacctgcacaccccccacacagaagatggcggccccagcgccacagaaagagctgctgaagatggagccagcagccagctgcctgctgctgagggcagcggggagcaggacttcacctttgagaccagcggggagaacacagctgtggtggccgtggagccagacagaagaaaccagagccctgtggaccagggcgccaccggggccagccagggcctgctggacaggaaggaggtgctgggcggcgtgattgctgggggcctggtgggcctcatctttgctgtgtgcctggtgggcttcatgctgtacaggatgaagaagaaggatgagggcagctacagcctggaggagcccaagcaggccaatggaggagcctaccagaagcccaccaagcaggaggagttctacgcctag

SEQ ID NO: 172343 - DNA, 933 bp, synthetic construct; identical to SEQ ID NO: 172342
  misc_feature 1..933: note = Description of Artificial Sequence: Synthetic coding sequence
  source 1..933: mol_type = other DNA

SEQ ID NO: 172344 - DNA, 606 bp, synthetic construct
  misc_feature 1..606: note = Description of Artificial Sequence: Synthetic coding sequence
  source 1..606: mol_type = other DNA
atgaggcgggcctggatcctgctgaccctgggcctggtggcctgtgtgtctgctgagagcagagctgagctgaccagtgacaaggacatgtacctggacaacagcagcattgaggaggccagcggcgtgtaccccattgatgatgatgattatgccagcgccagcggcagcggggctgatgaagatgtggagagccctgagctgaccaccagccggcccctgcccaagatcctgctgaccagcgctgcccccaaggtggagaccaccaccctgaacatccagaacaagatcccagcccagaccaagagccctgaggagacagacaaggagaaggtgcacctgagtgacagcgagaggaagatggaccctgctgaggaggacaccaacgtgtacacagagaagcacagcgacagcctcttcaagaggacagaggtgctggccgctgtgattgctggaggagtgattggcttcctgtttgccatcttcctgatcctgctgctggtgtacaggatgaggaagaaggatgagggcagctatgacctgggggagaggaagcccagcagcgctgcctaccagaaggcccccaccaaggagttctacgcctag

SEQ ID NO: 172345 - DNA, 498 bp, synthetic construct
  misc_feature 1..498: note = Description of Artificial Sequence: Synthetic coding sequence
  source 1..498: mol_type = other DNA
atgaggcgggcctggatcctgctgaccctgggcctggtggcctgtgtgtctgctgagagcgtgcgggcagatgaagatgtggagagccctgagctgaccaccagccggcccctgcccaagatcctgctgaccagcgctgcccccaaggtggagaccaccaccctgaacatccagaacaagatcccagcccagaccaagagccctgaggagacagacaaggagaaggtgcacctgagtgacagcgagaggaagatggaccctgctgaggaggacaccaacgtgtacacagagaagcacagcgacagcctcttcaagaggacagaggtgctggccgctgtgattgctggaggagtgattggcttcctgtttgccatcttcctgatcctgctgctggtgtacaggatgaggaagaaggatgagggcagctatgacctgggggagaggaagcccagcagcgctgcctaccagaaggcccccaccaaggagttctacgcctag

SEQ ID NO: 172346 - DNA, 519 bp, synthetic construct
  misc_feature 1..519: note = Description of Artificial Sequence: Synthetic coding sequence
  source 1..519: mol_type = other DNA
atgtacctggacaacagcagcattgaggaggccagcggcgtgtaccccattgatgatgatgattatgccagcgccagcggcagcggggctgatgaagatgtggagagccctgagctgaccaccagccggcccctgcccaagatcctgctgaccagcgctgcccccaaggtggagaccaccaccctgaacatccagaacaagatcccagcccagaccaagagccctgaggagacagacaaggagaaggtgcacctgagtgacagcgagaggaagatggaccctgctgaggaggacaccaacgtgtacacagagaagcacagcgacagcctcttcaagaggacagaggtgctggccgctgtgattgctgggggcgtcatcggcttcctgtttgccatcttcctgatcctgctgctggtgtacaggatgaggaagaaggatgagggcagctatgacctgggggagaggaagcccagcagcgctgcctaccagaaggcccccaccaaggagttctacgcctag

SEQ ID NO: 172347 - DNA, 519 bp, synthetic construct; identical to SEQ ID NO: 172346
  misc_feature 1..519: note = Description of Artificial Sequence: Synthetic coding sequence
  source 1..519: mol_type = other DNA

SEQ ID NO: 172348 - DNA, 606 bp, synthetic construct; identical to SEQ ID NO: 172344
  misc_feature 1..606: note = Description of Artificial Sequence: Synthetic coding sequence
  source 1..606: mol_type = other DNA

SEQ ID NO: 172349 - DNA, 576 bp, synthetic construct
  misc_feature 1..576: note = Description of Artificial Sequence: Synthetic coding sequence
  source 1..576: mol_type = other DNA
atgagggtggcctgtgtgtctgctgagagcagagctgagctgaccagtgacaaggacatgtacctggacaacagcagcattgaggaggccagcggcgtgtaccccattgatgatgatgattatgccagcgccagcggcagcggggctgatgaagatgtggagagccctgagctgaccaccagccggcccctgcccaagatcctgctgaccagcgctgcccccaaggtggagaccaccaccctgaacatccagaacaagatcccagcccagaccaagagccctgaggagacagacaaggagaaggtgcacctgagtgacagcgagaggaagatggaccctgctgaggaggacaccaacgtgtacacagagaagcacagcgacagcctcttcaagaggacagaggtgctggccgctgtgattgctggaggagtgattggcttcctgtttgccatcttcctgatcctgctgctggtgtacaggatgaggaagaaggatgagggcagctatgacctgggggagaggaagcccagcagcgctgcctaccagaaggcccccaccaaggagttctacgcctag

SEQ ID NO: 172350 - DNA, 1155 bp, synthetic construct
  misc_feature 1..1155: note = Description of Artificial Sequence: Synthetic coding sequence
  source 1..1155: mol_type = other DNA
atggccatcgcctacctgggcagcagctgccccagccagccccccagcagcctggccctgagcctgagccccacccccagcgactttgagcaggagagcggcattgaaacagccatgaggttctccccagatgtggccctggccgtgtccaccaccccagctgtgctgcccaccaccaacatccagcctgtgggcaccccatttgaggagctgcccagcgagcggcccaccctggagcccgccaccagccccctggtggtgacagaggtgcctgaggagcccagccagagggccaccaccgtgtccaccaccatggccaccacagctgccaccagcactggagaccccaccgtggccaccgtgcctgccaccgtggccacagccacccccagcaccccagctgccccacccttcaccgccaccacagctgtgatccgcaccaccggggtgcggcggctgctgcccctgcccctgaccaccgtggccacagcccgggccaccaccccagaggcccccagcccccccaccacagctgctgtgctggacacagaggcccccaccccccggctggtgtccacagccaccagccggccccgggccctgcccaggcctgccaccacccaggagccagacatccctgagaggagcaccctgcccctgggcaccacagcccctggccccacagaggtggcccagacccccaccccagagaccttcctgaccaccatcagagatgagcctgaggtgcctgtgtctgggggccccagcggggactttgagctgcctgaggaggagaccacccagcctgacacagccaatgaggtggtggccgtgggcggggccgccgccaaggccagcagccccccaggcaccctgcccaagggggcccggcccggccctggcctgctggacaatgccattgattctggcagcagcgctgcccagctgccccagaagagcatcctggagaggaaggaggtgctggtggccgtcatcgtgggcggcgtggtgggcgccctgtttgctgccttcctggtgaccctgctgatctacaggatgaagaagaaggatgagggcagctacaccctggaggagcccaagcaggcctctgtgacctaccagaagccagacaagcaggaggagttctacgcctag

SEQ ID NO: 172351 - DNA, 1329 bp, synthetic construct
  misc_feature 1..1329: note = Description of Artificial Sequence: Synthetic coding sequence
  source 1..1329: mol_type = other DNA
atgaagccaggccccccccacagagctggagctgcccatggagctggagctggagctggagctgctgctggccctggggcccggggcctgctgctgccccccctgctgctgctgctgctggccggccgggctgctggggcccagcgctggaggagtgaaaattttgagaggcctgtggacctggagggcagcggagatgatgacagcttcccagatgatgagctggatgacctgtacagcggcagcggcagcggctactttgagcaggagagcggcattgaaacagccatgaggttctccccagatgtggccctggccgtgtccaccaccccagctgtgctgcccaccaccaacatccagcctgtgggcaccccatttgaggagctgcccagcgagcggcccaccctggagcccgccaccagccccctggtggtgacagaggtgcctgaggagcccagccagagggccaccaccgtgtccaccaccatggccaccacagctgccaccagcactggagaccccaccgtggccaccgtgcctgccaccgtggccacagccacccccagcaccccagctgccccacccttcaccgccaccacagctgtgatccgcaccaccggggtgcggcggctgctgcccctgcccctgaccaccgtggccacagcccgggccaccaccccagaggcccccagcccccccaccacagctgctgtgctggacacagaggcccccaccccccggctggtgtccacagccaccagccggccccgggccctgcccaggcctgccaccacccaggagccagacatccctgagaggagcaccctgcccctgggcaccacagcccctggccccacagaggtggcccagacccccaccccagagaccttcctgaccaccatcagagatgagcctgaggtgcctgtgtctgggggccccagcggggactttgagctgcctgaggaggagaccacccagcctgacacagccaatgaggtggtggccgtgggcggggccgccgccaaggccagcagccccccaggcaccctgcccaagggggcccggcccggccctggcctgctggacaatgccattgattctggcagcagcgctgcccagctgccccagaagagcatcctggagaggaaggaggtgctggtggccgtcatcgtgggcggcgtggtgggcgccctgtttgctgccttcctggtgaccctgctgatctacaggatgaagaagaaggatgagggcagctacaccctggaggagcccaagcaggcctctgtgacctaccagaagccagacaagcaggaggagttctacgcctag

SEQ ID NO: 172352 - DNA, 597 bp, synthetic construct
  misc_feature 1..597: note = Description of Artificial Sequence: Synthetic coding sequence
  source 1..597: mol_type = other DNA
atggccccagcccggctgtttgccctgctgctcttctttgtgggcggcgtggccgagagcatccgggagacagaggtgattgacccccaggacctgctggagggccgctacttcagcggggccctgcctgatgatgaagatgtggtgggccctggccaggagagtgatgactttgagctgagcggcagcggggacctggatgacctggaggacagcatgattggccctgaggtggtgcaccccctggtgcccctggacaaccacatccctgagagagctggcagcggcagccaggtgcccacagagcccaagaagctggaggagaatgaagtcatccccaagaggatcagccctgtggaggagagtgaagatgtgagcaacaaggtgtccatgagcagcacagtgcagggcagcaacatctttgagaggacagaggtgctggccgccctgattgtgggcggcatcgtgggcatcctgtttgctgtgttcctgatcctgctgctgatgtacaggatgaagaagaaggatgagggcagctatgacctgggcaagaagcccatctacaagaaggcccccaccaatgagttctacgcctag

SEQ ID NO: 172353 - DNA, 381 bp, synthetic construct
  misc_feature 1..381: note = Description of Artificial Sequence: Synthetic coding sequence
  source 1..381: mol_type = other DNA
atgattggccctgaggtggtgcaccccctggtgcccctggacaaccacatccctgagagagctggcagcggcagccaggtgcccacagagcccaagaagctggaggagaatgaagtcatccccaagaggatcagccctgtggaggagagtgaagatgtgagcaacaaggtgtccatgagcagcacagtgcagggcagcaacatctttgagaggacagaggtgctggccgccctgattgtgggcggcatcgtgggcatcctgtttgctgtgttcctgatcctgctgctgatgtacaggatgaagaagaaggatgagggcagctatgacctgggcaagaagcccatctacaagaaggcccccaccaatgagttctacgcctag

SEQ ID NO: 172354 - DNA, 1851 bp, synthetic construct
  misc_feature 1..1851: note = Description of Artificial Sequence: Synthetic coding sequence
  source 1..1851: mol_type = other DNA
atgttcagaacagctgtgatgatggccgccagcctggccctgactggagctgtggtggcccacgcctactacctgaagcaccagttctaccccaccgtggtgtacctgaccaagagcagccccagcatggctgtgctgtacatccaggcctttgtgctggtgttcctgctgggcaaggtgatgggcaaggtgttcttcggccagctgcgggctgctgagatggagcacctgctggagaggtcctggtatgctgtgacagagacctgcctggccttcaccgtcttcagagatgacttcagccccaggtttgtggccctcttcaccctgctgctcttcctgaagtgcttccactggctggctgaagatagagtggacttcatggagaggagccccaacatctcctggctgttccactgcagaattgtgtccctgatgttcctgctgggcatcctggacttcctgtttgtgagccacgcctaccacagcatcctgaccaggggggcctctgtgcagctggtgtttggatttgaatatgccatcctgatgaccatggtgctgaccatcttcatcaagtatgtgctgcacagcgtggacctgcagagcgagaacccctgggacaacaaggctgtgtacatgctgtacacagagctgttcaccggcttcatcaaggtgctgctgtacatggccttcatgaccatcatgatcaaggtgcacaccttccccctgtttgccatccggcccatgtacctggccatgaggcagttcaagaaggctgtgacagatgccatcatgagccggcgggccatccggaacatgaacaccctgtacccagatgccaccccagaggagctgcaggccatggacaacgtgtgcatcatctgccgggaggagatggtgactggagccaagaggctgccctgcaaccacatcttccacaccagctgcctgcgctcctggttccagaggcagcagacctgccccacctgcaggatggatgtgctgcgggccagcctgcctgcccagagccccccacctcctgagcctgctgaccagggccccccaccagccccccaccccccacccctgctgccccagccccccaacttcccccagggcctgctgccccccttccccccaggcatgttccccctgtggccacccatgggccccttcccccctgtgcccccaccacccagcagcggggaggccgtggccccacccagcaccagcgctgccctgagccggcccagcggggccgccaccaccacagctgctggcaccagcgccacagctgccagcgccacagccagcggccctggcagcggcagcgcccctgaggccggccctgcccctggcttccccttccccccaccctggatgggcatgcccctgcccccaccatttgccttcccccccatgcctgtgcccccagctggctttgctggcctgaccccagaggagctgcgggccctggagggccacgagcggcagcacctggaggcccggctgcagagcctgaggaacatccacaccctgctggatgctgccatgctgcagatcaaccagtacctgactgtgctggccagcctgggcccccccaggcctgccacctctgtgaacagcacagaggagacagccaccaccgtggtggccgccgccagcagcaccagcatccccagcagcgaggccaccacccccacccctggggccagccccccagcccctgagatggagcggcccccagcccctgagagcgtgggcacagaggagatgccagaagatggagagccagatgctgctgagctgcggcggcggcggctgcagaagctggagagccctgtggcccactag

SEQ ID NO: 172355 - DNA, 1698 bp, synthetic construct
  misc_feature 1..1698: note = Description of Artificial Sequence: Synthetic coding sequence
  source 1..1698: mol_type = other DNA
atgttcagaacagctgtgatgatggccgccagcctggccctgactggagctgtggtggcccacgcctactacctgaagcaccagttctaccccaccgtggtgtacctgaccaagagcagccccagcatggctgtgctgtacatccaggcctttgtgctggtgttcctgctgggcaaggtgatgggcaaggtgttcttcggccagctgcgggctgctgagatggagcacctgctggagaggtcctggtatgctgtgacagagacctgcctggccttcaccgtcttcagagatgacttcagccccaggtttgtggccctcttcaccctgctgctcttcctgaagtgcttccactggctggctgaagatagagtggacttctacgccatcctgatgaccatggtgctgaccatcttcatcaagtatgtgctgcacagcgtggacctgcagagcgagaacccctgggacaacaaggctgtgtacatgctgtacacagagctgttcaccggcttcatcaaggtgctgctgtacatggccttcatgaccatcatgatcaaggtgcacaccttccccctgtttgccatccggcccatgtacctggccatgaggcagttcaagaaggctgtgacagatgccatcatgagcagaagagccatccggaacatgaacaccctgtacccagatgccaccccagaggagctgcaggccatggacaacgtgtgcatcatctgccgggaggagatggtgactggagccaagaggctgccctgcaaccacatcttccacaccagctgcctgcgctcctggttccagaggcagcagacctgccccacctgcaggatggatgtgctgcgggccagcctgcctgcccagagccccccacctcctgagcctgctgaccagggccccccaccagccccccaccccccacccctgctgccccagccccccaacttcccccagggcctgctgccccccttccccccaggcatgttccccctgtggccacccatgggccccttcccccctgtgcccccaccacccagcagtggagaggccgtggccccacccagcaccagcgctgccctgagccggcccagcggggccgccaccaccacagctgctggcaccagcgccacagctgccagcgccacagccagcggccctggcagcggcagcgcccctgaggccggccctgcccctggcttccccttccccccaccctggatgggcatgcccctgcccccaccatttgccttcccccccatgcctgtgcccccagctggctttgctggcctgaccccagaggagctgcgggccctggagggccacgagcggcagcacctggaggcccggctgcagagcctgaggaacatccacaccctgctggatgctgccatgctgcagatcaaccagtacctgactgtgctggccagcctgggcccccccaggcctgccacctctgtgaacagcacagaggagacagccaccaccgtggtggccgccgccagcagcaccagcatccccagcagcgaggccaccacccccacccctggggccagccccccagcccctgagatggagcggcccccagcccctgagagcgtgggcacagaggagatgccagaagatggagagccagatgctgctgagctgcggcggcggcggctgcagaagctggagagccctgtggcccactag

SEQ ID NO: 172356 - DNA, 1854 bp, synthetic construct
  misc_feature 1..1854: note = Description of Artificial Sequence: Synthetic coding sequence
  source 1..1854: mol_type = other DNA
atgttcagaacagctgtgatgatggccgccagcctggccctgactggagctgtggtggcccacgcctactacctgaagcaccagttctaccccaccgtggtgtacctgaccaagagcagccccagcatggctgtgctgtacatccaggcctttgtgctggtgttcctgctgggcaaggtgatgggcaaggtgttcttcggccagctgcgggctgctgagatggagcacctgctggagaggtcctggtatgctgtgacagagacctgcctggccttcaccgtcttcagagatgacttcagccccaggtttgtggccctcttcaccctgctgctcttcctgaagtgcttccactggctggctgaagatagagtggacttcatggagaggagccccaacatctcctggctgttccactgcagaattgtgtccctgatgttcctgctgggcatcctggacttcctgtttgtgagccacgcctaccacagcatcctgaccaggggggcctctgtgcagctggtgtttggatttgaatatgccatcctgatgaccatggtgctgaccatcttcatcaagtatgtgctgcacagcgtggacctgcagagcgagaacccctgggacaacaaggctgtgtacatgctgtacacagagctgttcaccggcttcatcaaggtgctgctgtacatggccttcatgaccatcatgatcaaggtgcacaccttccccctgtttgccatccggcccatgtacctggccatgaggcagttcaagaaggctgtgacagatgccatcatgagccggcgggccatccggaacatgaacaccctgtacccagatgccaccccagaggagctgcaggccatggacaacgtgtgcatcatctgccgggaggagatggtgactggagccaagaggctgccctgcaaccacatcttccacaccagctgcctgcgctcctggttccagaggcagcagacctgccccacctgcaggatggatgtgctgcgggccagcctgcctgcccagagccccccacctcctgagcctgctgaccagggccccccaccagccccccaccccccacccctgctgccccagccccccaacttcccccagggcctgctgccccccttccccccaggcatgttccccctgtggccacccatgggccccttcccccctgtgcccccaccacccagcagcggggaggccgtggccccacccagcaccagcgctgctgccctgagccggcccagcggggccgccaccaccacagctgctggcaccagcgccacagctgccagcgccacagccagcggccctggcagcggcagcgcccctgaggccggccctgcccctggcttccccttccccccaccctggatgggcatgcccctgcccccaccatttgccttcccccccatgcctgtgcccccagctggctttgctggcctgaccccagaggagctgcgggccctggagggccacgagcggcagcacctggaggcccggctgcagagcctgaggaacatccacaccctgctggatgctgccatgctgcagatcaaccagtacctgactgtgctggccagcctgggcccccccaggcctgccacctctgtgaacagcacagaggagacagccaccaccgtggtggccgccgccagcagcaccagcatccccagcagcgaggccaccacccccacccctggggccagccccccagcccctgagatggagcggcccccagcccctgagagcgtgggcacagaggagatgccagaagatggagagccagatgctgctgagctgcggcggcggcggctgcagaagctggagagccctgtggcccactag

SEQ ID NO: 172357 - DNA, 1890 bp, synthetic construct
  misc_feature 1..1890: note = Description of Artificial Sequence: Synthetic coding sequence
  source 1..1890: mol_type = other DNA
atgttcagaacagctgtgatgatggccgccagcctggccctgactggagctgtggtggcccacgcctactacctgaagcaccagttctaccccaccgtggtgtacctgaccaagagcagccccagcatggctgtgctgtacatccaggcctttgtgctggtgttcctgctgggcaaggtgatgggcaaggtgttcttcggccagctgcgggctgctgagatggagcacctgctggagaggtcctggtatgctgtgacagagacctgcctggccttcaccgtcttcagagatgacttcagccccaggtttgtggccctcttcaccctgctgctcttcctgaagtgcttccactggctggctgaagatagagtggacttcatggagaggagccccaacatctcctggctgttccactgcagaattgtgtccctgatgttcctgctgggcatcctggacttcctgtttgtgagccacgcctaccacagcatcctgaccaggggggcctctgtgcagctggtgtttggatttgaatatgccatcctgatgaccatggtgctgaccatcttcatcaagtatgtgctgcacagcgtggacctgcagagcgagaacccctgggacaacaaggctgtgtacatgctgtacacagagctgttcaccggcttcatcaaggtgctgctgtacatggccttcatgaccatcatgatcaaggtgcacaccttccccctgtttgccatccggcccatgtacctggccatgaggcagttcaagaaggctgtgacagatgccatcatgagccggcgggccatccggaacatgaacaccctgtacccagatgccaccccagaggagctgcaggccatggacaacgtgtgcatcatctgccgggaggagatggtgactggagccaagaggctgccctgcaaccacatcttccacaccagctgcctgcgctcctggttccagaggcagcagacctgccccacctgcaggatggatgtgctgcgggccagcctgcctgcccagagccccccacctcctgagcctgctgaccagggccccccaccagccccccaccccccacccctgctgccccagccccccaacttcccccagggcctgctgccccccttccccccaggcatgttccccctgtggccacccatgggccccttcccccctgtgcccccaccacccagcagcggggaggccgtggccccacccagcaccagcgctgctgccctgagccggcccagcggggccgccaccaccacagctgctggcaccagcgccacagctgccagcgccacagccagcggccctggcagcggcagcgcccctgaggccggccctgcccctggcttccccttccccccaccctggatgggcatgcccctgcccccaccatttgccttcccccccatgcctgtgcccccagctggctttgctggcctgaccccagaggagctgcgggccctggagggccacgagcggcagcacctggaggcccggctgcagagcctgaggaacatccacaccctgctggatgctgccatgctgcagatcaaccagtacctgactgtgctggccagcctgggccccccaggcctgcccctgcagagcacccccctgcggcggctgcccctgcagctgctgctgctgcccccacctccagccagcctggcccagaggccccggccccagccccaggagcccccccaccagcccctgaagtggaagggcctgcagctgctgagccagtgggcccagaggcgctgcctgaggatggagagccccatgcagcagagcagcgctggggccgcctgccgctcctggagcctgctgctgcccacagacacagccccagcccagccccagcccctgctcttctag

SEQ ID NO: 172358 - DNA, 1851 bp, synthetic construct; identical to SEQ ID NO: 172354
  misc_feature 1..1851: note = Description of Artificial Sequence: Synthetic coding sequence
  source 1..1851: mol_type = other DNA

SEQ ID NO: 172359 - DNA, 1191 bp, synthetic construct
  misc_feature 1..1191: note = Description of Artificial Sequence: Synthetic coding sequence
  source 1..1191: mol_type = other DNA
atgtctgtggcctttgccagcgcccggccccggggcaaaggagaggtgacccagcagaccatccagaagatgctggatgagaaccaccacctgatccagtgcatcctggagtaccagagcaagggcaagacagctgagtgcacccagtaccagcagatcctgcacaggaacctggtgtacctggccaccatcgctgacagcaaccagaacatgcagagcctgctgcctgccccacccacccagaacatgaacctgggccctggggccctgacccagagcggcagcagccagggcctgcacagccagggcagcctgagtgatgccatcagcacaggcctgccccccagcagcctgctgcagggccagattggaaatggccccagccacgtgtccatgcagcagacagcccccaacaccctgcccaccacctccatgagcatcagcggccctggctacagccatgctggccctgccagccagggcgtgcccatgcagggccagggcaccatcggcaactacgtgtccaggaccaacatcaacatgcagagcaaccctgtgtccatgatgcagcagcaggccgccaccagccactacagcagcgcccagggcggcagccagcactaccagggccagagcagcatcgccatgatgggccagggcagccagggcagctccatgatgggccagaggcccatggccccctaccggcccagccagcagggcagcagccagcagtacctgggccaggaggagtactatggagagcagtacagccacagccagggcgctgctgagcccatgggccagcagtactacccagatggccacggggactatgcctaccagcagagcagctacacagagcagagctatgacaggagctttgaggagagcacccagcactactatgaaggaggcaacagccagtacagccagcagcaggccggctaccagcagggcgccgcccagcagcagacctacagccagcagcagtaccccagccagcagagctacccaggccagcagcagggctacggcagcgcccagggcgcccccagccagtacccaggctaccagcagggccagggccagcagtatggcagctaccgggccccccagacagcccccagcgcccagcagcagaggccctacggctatgagcagggccagtatggcaactaccagcagtag

SEQ ID NO: 172360 - DNA, 1200 bp, synthetic construct
  misc_feature 1..1200: note = Description of Artificial Sequence: Synthetic coding sequence
  source 1..1200: mol_type = other DNA
atgcagagcctgagcacagaggcccgctacgtgccccgggtgccccagcaccgggaccagatcagccccaggagcccccagcacggcggccagatctgccccaggagccccctgcaccggggccagatctgccccaggagccccccagcccggcgctaccagcagatcctgcacaggaacctggtgtacctggccaccatcgctgacagcaaccagaacatgcagagcctgctgcctgccccacccacccagaacatgaacctgggccctggggccctgacccagagcggcagcagccagggcctgcacagccagggcagcctgagtgatgccatcagcacaggcctgccccccagcagcctgctgcagggccagattggaaatggccccagccacgtgtccatgcagcagacagcccccaacaccctgcccaccacctccatgagcatcagcggccctggctacagccacgccggccctgccagccagggcgtgcccatgcagggccagggcaccatcggcaactacgtgtccaggaccaacatcaacatgcagagcaaccctgtgtccatgatgcagcagcaggccgccaccagccactacagcagcgcccagggcggcagccagcactaccagggccagagcagcatcgccatgatgggccagggcagccagggcagctccatgatgggccagaggcccatggccccctaccggcccagccagcagggcagcagccagcagtacctgggccaggaggagtactacggggagcagtacagccacagccagggcgctgctgagcccatgggccagcagtactacccagatggccatggagactatgcctaccagcagagcagctacacagagcagagctatgacaggagctttgaggagagcacccagcactactatgagggcggcaacagccagtacagccagcagcaggccggctaccagcagggcgccgcccagcagcagacctacagccagcagcagtaccccagccagcagagctacccaggccagcagcagggctacggcagcgcccagggcgcccccagccagtacccaggctaccagcagggccagggccagcagtatggcagctaccgggccccccagacagcccccagcgcccagcagcagaggccctacggctatgagcagggccagtatggcaactaccagcagtag

SEQ ID NO: 172361 - DNA, 1191 bp, synthetic construct; identical to SEQ ID NO: 172359
  misc_feature 1..1191: note = Description of Artificial Sequence: Synthetic coding sequence
  source 1..1191: mol_type = other DNA

SEQ ID NO: 172362 - DNA, 387 bp, synthetic construct
  misc_feature 1..387: note = Description of Artificial Sequence: Synthetic coding sequence
  source 1..387: mol_type = other DNA
atgcagagcctgagcacagaggcccgctacgtgccccgggtgccccagcaccgggaccagatcagccccaggagcccccagcacggcggccagatctgccccaggagccccctgcaccggggccagatctgccccaggagccccccagcccggcgctaccagcagatcctgcacaggaacctggtgtacctggccaccatcgctgacagcaaccagaacatgcagagcctgctgcctgccccacccacccagaacatgaacctgggccctggggccctgacccagagcggcagcagccagggcctgcacagccagggcagcctgagtgatgccatcagcacaggcctgccccccagcagcctgctgcagggccagatcggcaactag

SEQ ID NO: 172363 - DNA, 234 bp, synthetic construct
  misc_feature 1..234: note = Description of Artificial Sequence: Synthetic coding sequence
  source 1..234: mol_type = other DNA
atgtctgtggcctttgtgcctgactggctgcggggcaaggccgaggtgaaccaggagaccatccagaggctgctggaggagaatgaccagctgatccgctgcatcgtggagtaccagaacaagggcagaggaaatgaatgtgtgcagtaccagcacgtgctgcacaggaacctgatctacctggccaccatcgcagatgccagccccaccagcaccagcaaggccatggagtag

SEQ ID NO: 172364 - DNA, 234 bp, synthetic construct; identical to SEQ ID NO: 172363
  misc_feature 1..234: note = Description of Artificial Sequence: Synthetic coding sequence
  source 1..234: mol_type = other DNA

SEQ ID NO: 172365 - DNA, 1164 bp, synthetic construct
  misc_feature 1..1164: note = Description of Artificial Sequence: Synthetic coding sequence
  source 1..1164: mol_type = other DNA
atgtctgtggcctttgctgccccccggcagagaggaaaaggagagatcaccccagctgccatccagaagatgctggatgacaacaaccacctgatccagtgcatcatggacagccagaacaagggcaagaccagcgagtgcagccagtaccagcagatgctgcacaccaacctggtgtacctggccaccatcgctgacagcaaccagaacatgcagagcctgctgcctgccccacccacccagaacatgcccatgggccctgggggcatgaaccagagcggccccccacctccacccaggagccacaacatgcccagtgatggcatggtgggcggcggccccccagccccccacatgcagaaccagatgaatggccagatgcctggccccaaccacatgcccatgcagggccctggccccaaccagctgaacatgaccaacagctccatgaacatgcccagcagcagccacggctccatgggcggctacaaccacagcgtgcccagcagccagagcatgcctgtgcagaaccagatgaccatgagccagggccagcccatgggcaactacggcccccggcccaacatgtccatgcagcccaaccagggccccatgatgcaccagcagccccccagccagcagtacaacatgccccagggcggcggccagcactaccagggccagcagccccccatgggcatgatgggccaggtgaaccagggcaaccacatgatgggccagaggcagatccccccctacagaccaccccagcagggccccccccagcagtacagcggccaggaggactactatggagaccagtacagccatggaggccagggccccccagagggcatgaaccagcagtactacccagatggcaacagccagtatggccagcagcaggatgcctaccagggccccccaccccagcagggctacccaccccagcagcagcagtacccaggccagcagggctacccaggccagcagcagggctacggccccagccagggcggccctggcccccagtaccccaactacccccagggccagggccagcagtatggaggctaccggcccacccagcccggccccccccagcccccccagcagaggccctacggctatgaccagggccagtatggcaactaccagcagtag

SEQ ID NO: 172366 - DNA, 1257 bp, synthetic construct
  misc_feature 1..1257: note = Description of Artificial Sequence: Synthetic coding sequence
  source 1..1257: mol_type = other DNA
atgtctgtggcctttgctgccccccggcagagaggaaaaggagagatcaccccagctgccatccagaagatgctggatgacaacaaccacctgatccagtgcatcatggacagccagaacaagggcaagaccagcgagtgcagccagtaccagcagatgctgcacaccaacctggtgtacctggccaccatcgctgacagcaaccagaacatgcagagcctgctgcctgccccacccacccagaacatgcccatgggccctgggggcatgaaccagagcggccccccacctccacccaggagccacaacatgcccagtgatggcatggtgggcggcggccccccagccccccacatgcagaaccagatgaatggccagatgcctggccccaaccacatgcccatgcagggccctggccccaaccagctgaacatgaccaacagctccatgaacatgcccagcagcagccacggctccatgggcggctacaaccacagcgtgcccagcagccagagcatgcctgtgcagaaccagatgaccatgagccagggccagcccatgggcaactacggcccccggcccaacatgtccatgcagcccaaccagggccccatgatgcaccagcagccccccagccagcagtacaacatgccccagggcggcggccagcactaccagggccagcagccccccatgggcatgatgggccaggtgaaccagggcaaccacatgatgggccagaggcagatccccccctacagaccaccccagcagggccccccccagcagtacagcggccaggaggactactatggagaccagtacagccatggaggccagggccccccagagggcatgaaccagcagtactacccagatggccacaatgactatggctaccagcagcccagctacccagagcagggctatgaccggccctatgaggacagcagccagcactactatgagggcggcaacagccagtatggccagcagcaggatgcctaccagggccccccaccccagcagggctacccaccccagcagcagcagtacccaggccagcagggctacccaggccagcagcagggctacggccccagccagggcggccctggcccccagtaccccaactacccccagggccagggccagcagtatggaggctaccggcccacccagcccggccccccccagcccccccagcagaggccctacggctatgaccagggccagtatggcaactaccagcagtag

SEQ ID NO: 172367 - DNA, 1266 bp, synthetic construct
  misc_feature 1..1266: note = Description of Artificial Sequence: Synthetic coding sequence
  source 1..1266: mol_type = other DNA
gggggcaacatgtctgtggcctttgctgccccccggcagaggggcaagggggagatcaccccagctgccatccagaagatgctggatgacaacaaccacctgatccagtgcatcatggacagccagaacaagggcaagaccagtgaatgttcccagtaccagcagatgctgcacaccaacctggtgtacctggccaccatcgctgacagcaaccagaacatgcagagcctgctgcctgccccacccacccagaacatgcccatgggccctgggggcatgaaccagagcggccccccacctccacccaggagccacaacatgcccagtgatggcatggtgggcggcggccccccagccccccacatgcagaaccagatgaatggccagatgcctggccccaaccacatgcccatgcagggccctggccccaaccagctgaacatgaccaacagctccatgaacatgcccagcagcagccacggctccatgggcggctacaaccacagcgtgcccagcagccagagcatgcctgtgcagaaccagatgaccatgagccagggccagcccatgggcaactacggcccccggcccaacatgtccatgcagcccaaccagggccccatgatgcaccagcagccccccagccagcagtacaacatgccccagggcggcggccagcactaccagggccagcagccccccatgggcatgatgggccaggtgaaccagggcaaccacatgatgggccagaggcagatccccccctaccggcccccccagcagggccccccccagcagtacagcggccaggaggactactacggggaccagtacagccacggcggccagggccccccagagggcatgaaccagcagtactacccagatggccacaatgactatggctaccagcagcccagctacccagagcagggctatgaccggccctatgaggacagcagccagcactactatgaaggaggcaacagccagtatggccagcagcaggatgcctaccagggccccccaccccagcagggctacccaccccagcagcagcagtacccaggccagcagggctacccaggccagcagcagggctacggccccagccagggcggccctggcccccagtaccccaactacccccagggccagggccagcagtatggaggctaccggcccacccagcccggccccccccagcccccccagcagaggccctacggctatgaccagggccagtatggcaactaccagcagtag

SEQ ID NO: 172368 - DNA, 399 bp, synthetic construct
  misc_feature 1..399: note = Description of Artificial Sequence: Synthetic coding sequence
  source 1..399: mol_type = other DNA
atgaaccagcagtactacccagatggccacaatgactatggctaccagcagcccagctacccagagcagggctatgaccggccctatgaggacagcagccagcactactatgaaggaggcaacagccagtatggccagcagcaggatgcctaccagggccccccaccccagcagggctacccaccccagcagcagcagtacccaggccagcagggctacccaggccagcagcagggctacggccccagccagggcggccctggcccccagtaccccaactacccccagggccagggccagcagtatggaggctaccggcccacccagcccggccccccccagcccccccagcagaggccctacggctatgaccagaacagccgctggacagtgtgctag

SEQ ID NO: 172369 - DNA, 1011 bp, synthetic construct
  misc_feature 1..1011: note = Description of Artificial Sequence: Synthetic coding sequence
  source 1..1011: mol_type = other DNA
atgcccatgggccctgggggcatgaaccagagcggccccccacctccacccaggagccacaacatgcccagtgatggcatggtgggcggcggccccccagccccccacatgcagaaccagatgaatggccagatgcctggccccaaccacatgcccatgcagggccctggccccaaccagctgaacatgaccaacagctccatgaacatgcccagcagcagccacggctccatgggcggctacaaccacagcgtgcccagcagccagagcatgcctgtgcagaaccagatgaccatgagccagggccagcccatgggcaactacggcccccggcccaacatgtccatgcagcccaaccagggccccatgatgcaccagcagccccccagccagcagtacaacatgccccagggcggcggccagcactaccagggccagcagccccccatgggcatgatgggccaggtgaaccagggcaaccacatgatgggccagaggcagatccccccctacagaccaccccagcagggccccccccagcagtacagcggccaggaggactactatggagaccagtacagccatggaggccagggccccccagagggcatgaaccagcagtactacccagatggccacaatgactatggctaccagcagcccagctacccagagcagggctatgaccggccctatgaggacagcagccagcactactatgagggcggcaacagccagtatggccagcagcaggatgcctaccagggccccccaccccagcagggctacccaccccagcagcagcagtacccaggccagcagggctacccaggccagcagcagggctacggccccagccagggcggccctggcccccagtaccccaactacccccagggccagggccagcagtatggaggctaccggcccacccagcccggccccccccagcccccccagcagaggccctacggctatgaccagggccagtatggcaactaccagcagtag

SEQ ID NO: 172370 - DNA, 1188 bp, synthetic construct
  misc_feature 1..1188: note = Description of Artificial Sequence: Synthetic coding sequence
  source 1..1188: mol_type = other DNA
atgctggatgacaacaaccacctgatccagtgcatcatggacagccagaacaagggcaagaccagtgaatgttcccagtaccagcagatgctgcacaccaacctggtgtacctggccaccatcgctgacagcaaccagaacatgcagagcctgctgcctgccccacccacccagaacatgcccatgggccctgggggcatgaaccagagcggccccccacctccacccaggagccacaacatgcccagtgatggcatggtgggcggcggccccccagccccccacatgcagaaccagatgaatggccagatgcctggccccaaccacatgcccatgcagggccctggccccaaccagctgaacatgaccaacagctccatgaacatgcccagcagcagccacggctccatgggcggctacaaccacagcgtgcccagcagccagagcatgcctgtgcagaaccagatgaccatgagccagggccagcccatgggcaactacggcccccggcccaacatgtccatgcagcccaaccagggccccatgatgcaccagcagccccccagccagcagtacaacatgccccagggcggcggccagcactaccagggccagcagccccccatgggcatgatgggccaggtgaaccagggcaaccacatgatgggccagaggcagatccccccctaccggcccccccagcagggccccccccagcagtacagcggccaggaggactactacggggaccagtacagccacggcggccagggccccccagagggcatgaaccagcagtactacccagatggccacaatgactatggctaccagcagcccagctacccagagcagggctatgaccggccctatgaggacagcagccagcactactatgaaggaggcaacagccagtatggccagcagcaggatgcctaccagggccccccaccccagcagggctacccaccccagcagcagcagtacccaggccagcagggctacccaggccagcagcagggctacggccccagccagggcggccctggcccccagtaccccaactacccccagggccagggccagcagtatggaggctaccggcccacccagcccggccccccccagcccccccagcagaggccctacggctatgaccagggccagtatggcaactaccagcagtag

SEQ ID NO: 172371 - DNA, 1008 bp, synthetic construct
  misc_feature 1..1008: note = Description of Artificial Sequence: Synthetic coding sequence
  source 1..1008: mol_type = other DNA
atgctgcacaccaacctggtgtacctggccaccatcgctgacagcaaccagaacatgcagagcctgctgcctgccccacccacccagaacatgcccatgggccctgggggcatgaaccagagcggccccccacctccacccaggagccacaacatgcccagtgatggcatggtgggcggcggccccccagccccccacatgcagaaccagatgaatggccagatgcctggccccaaccacatgcccatgcagggccctggccccaaccagctgaacatgaccaacagctccatgaacatgcccagcagcagccacggctccatgggcggctacaaccacagcgtgcccagcagccagagcatgcctgtgcagaaccagatgaccatgagccagggccagcccatgggcaactacggcccccggcccaacatgtccatgcagcccaaccagggccccatgatgcaccagcagccccccagccagcagtacaacatgccccagggcggcggccagcactaccagggccagcagccccccatgggcatgatgggccaggtgaaccagggcaaccacatgatgggccagaggcagatccccccctacagaccaccccagcagggccccccccagcagtacagcggccaggaggactactatggagaccagtacagccatggaggccagggccccccagagggcatgaaccagcagtactacccagatggcaacagccagtatggccagcagcaggatgcctaccagggccccccaccccagcagggctacccaccccagcagcagcagtacccaggccagcagggctacccaggccagcagcagggctacggccccagccagggcggccctggcccccagtaccccaactacccccagggccagggccagcagtatggaggctaccggcccacccagcccggccccccccagcccccccagcagaggccctacggctatgaccagggccagtatggcaactaccagcagtag

SEQ ID NO: 172372 - DNA, 1008 bp, synthetic construct; identical to SEQ ID NO: 172371
  misc_feature 1..1008: note = Description of Artificial Sequence: Synthetic coding sequence
  source 1..1008: mol_type = other DNA

SEQ ID NO: 172373 - DNA, 567 bp, synthetic construct
  misc_feature 1..567: note = Description of Artificial Sequence: Synthetic coding sequence
  source 1..567: mol_type = other DNA
atgaatggagatgacacctttgccaagaggcccagagatgatgccaaggccagcgagaagaggagcaaggcctttgatgacatcgccacctacttcagcaagaaggagtggaagaagatgaagtacagcgagaagatctcctatgtgtacatgaagaggaactacaaggccatgaccaagctgggcttcaaggtgaccctgccccccttcatgtgcaacaagcaggccacagacttccagggcaatgactttgacaatgaccacaacagacgcatccaggtggagcacccccagatgaccttcggccgcctgcaccgcatcatccccaagatcatgcccaagaagccagcagaagatgaaaatgacagcaagggcgtgtctgaggccagcggcccccagaatgatggcaagcagctgcaccccccaggcaaggccaacatcagcgagaagatcaacaagaggagcggccccaagaggggcaagcacgcctggacccaccggctgcgggagaggaagcagctggtgatctatgaggagatcagtgaccctgaagaagatgatgaatag

SEQ ID NO: 172374 - DNA, 672 bp, synthetic construct
  misc_feature 1..672: note = Description of Artificial Sequence: Synthetic coding sequence
  source 1..672: mol_type = other DNA
atgaatggagatgatgcctttgcccggcggcccaccgtgggcgcccagatccctgagaagatccagaaggcctttgatgacatcgccaagtacttcagcaaggaggagtgggagaagatgaaggccagcgagaagatcttctacgtgtacatgaagaggaaatatgaggccatgaccaagctgggcttcaaggccaccctgccccccttcatgtgcaacaagagagctgaggacttccagggcaatgacctggacaatgaccccaacagaggcaaccaggtggagcggccccagatgaccttcggccgcctgcagggcatcagccccaagatcatgcccaagaagccagctgaggagggcaatgattctgaggaggtgcctgaggccagcggcccccagaatgatggcaaggagctgtgccccccaggcaagcccaccaccagcgagaagatccacgagaggagcggcaaccgggaggcccaggagaaggaggagcggcggggcacagcccaccgctggagcagccagaacacccacaacatcggccgcttcagcctgagcacctccatgggcgctgtgcacggcacccccaagaccatcacccacaacagagaccccaagggcggcaacatgcctggccccacagactgtgtgcgggagaacagctggtag

SEQ ID NO: 172375 - DNA, 567 bp, synthetic construct
  misc_feature 1..567: note = Description of Artificial Sequence: Synthetic coding sequence
  source 1..567: mol_type = other DNA
atgaatggagatgatgcctttgcccggcggcccaccgtgggcgcccagatccctgagaagatccagaaggcctttgatgacatcgccaagtacttcagcaaggaggagtgggagaagatgaaggccagcgagaagatcttctacgtgtacatgaagaggaaatatgaggccatgaccaagctgggcttcaaggccaccctgccccccttcatgtgcaacaagagagctgaggacttccagggcaatgacctggacaatgaccccaacagaggcaaccaggtggagcggccccagatgaccttcggccgcctgcagggcatcagccccaagatcatgcccaagaagccagctgaggagggcaatgattctgaggaggtgcctgaggccagcggcccccagaatgatggcaaggagctgtgccccccaggcaagcccaccaccagcgagaagatccacgagaggagcggccccaagagaggagagcacgcctggacccaccggctgcgggagaggaagcagctggtgatctatgaggagatcagtgaccctgaagaagatgatgaatag

SEQ ID NO: 172376 - DNA, 567 bp, synthetic construct
  misc_feature 1..567: note = Description of Artificial Sequence: Synthetic coding sequence
  source 1..567: mol_type = other DNA
atgaatggagatgacacctttgcccggcggcccaccgtgggcgcccagatccctgagaagatccagaaggcctttgatgacatcgccaagtacttcagcaaggaggagtgggagaagatgaaggtgtctgagaagatcgtgtatgtgtacatgaagaggaaatatgaggccatgaccaagctgggcttcaaggccatcctgcccagcttcatgaggaacaagagggtgacagacttccagggcaatgactttgacaatgaccccaacagaggcaaccaggtgcagaggccccagatgaccttcggccgcctgcagggcatcttccccaagatcatgcccaagaagccagctgaggagggcaatgtgtccaaggaggtgcctgaggccagcggcccccagaatgatggcaagcagctgtgccccccaggcaagcccaccaccagcgagaagatcaacatgatcagcggccccaagagaggagagcacgcctggacccaccggctgcgggagaggaagcagctggtgatctatgaggagatcagtgaccctgaagaagatgatgaatag

SEQ ID NO: 172377 - DNA, 513 bp, synthetic construct
  misc_feature 1..513: note = Description of Artificial Sequence: Synthetic coding sequence
  source 1..513: mol_type = other DNA
atgaatggagatgacacctttgcccggcggcccaccgtgggcgcccagatccctgagaagatccagaaggcctttgatgacatcgccaagtacttcagcaaggaggagtgggagaagatgaaggtgtctgagaagatcgtgtatgtgtacatgaagaggaaatatgaggccatgaccaagctgggcttcaaggccatcctgcccagcttcatgaggaacaagagggtgacagacttccagggcaatgactttgacaatgaccccaacagaggcaaccaggtgcagaggccccagatgaccttcggccgcctgcagggcatcttccccaagatcatgcccaagaagccagctgaggagggcaatgtgtccaaggaggtgcctgaggccagcggcccccagaatgatggcaagcagctgtgccccccaggcaagcccaccaccagcgagaagatcaacatgatctctggagtgctgcagcgctactgccgcttcggcagccggcccctgcagtag

SEQ ID NO: 172378 - DNA, 303 bp, synthetic construct
  misc_feature 1..303: note = Description of Artificial Sequence: Synthetic coding sequence
  source 1..303: mol_type = other DNA
atgtacagcctgtctgtgcagaggccccagatgaccttcggccgcctgcagggcatcttccccaagatcatgcccaagaagccagctgaggagggcaatgtgtccaaggaggtgcctgaggccagcggcccccagaatgatggcaagcagctgtgccccccaggcaagcccaccaccagcgagaagatcaacatgatcagcggccccaagagaggagagcacgcctggacccaccggctgcgggagaggaagcagctggtgatctatgaggagatcagtgaccctgaagaagatgatgaatag

SEQ ID NO: 172379 - DNA, 462 bp, synthetic construct
  misc_feature 1..462: note = Description of Artificial Sequence: Synthetic coding sequence
  source 1..462: mol_type = other DNA
atgaatggagatgatgcctttgcccggcggcccagagatgatgcccagatcagcgagaagctgaggaaggcctttgatgacatcgccaagtacttcagcaagaaggagtgggagaagatgaagagcagcgagaagatcgtgtatgtgtacatgaagctgaactatgaggtgatgaccaagctgggcttcaaggtgaccctgccccccttcatgaggagcaagagagctgctgacttccacggcaatgactttggaaatgacaggaaccacaggaaccaggtggagcggccccagatgaccttcggcagcctgcagaggatcttccccaaggaccccaagggcggcaacatgcctggccccacagactgtgtgcgggagagctcctggtggttcatgaagaggtctgccaccctgaggaagatgaccagcaacagcccccggggctatgacacctgcccctag

SEQ ID NO: 172380 - DNA, 567 bp, synthetic construct
  misc_feature 1..567: note = Description of Artificial Sequence: Synthetic coding sequence
  source 1..567: mol_type = other DNA
atgaatggagatgatgcctttgcccggcggcccagagatgatgcccagatcagcgagaagctgaggaaggcctttgatgacatcgccaagtacttcagcaagaaggagtgggagaagatgaagagcagcgagaagatcgtgtatgtgtacatgaagctgaactatgaggtgatgaccaagctgggcttcaaggtgaccctgccccccttcatgaggagcaagagagctgctgacttccacggcaatgactttggaaatgacaggaaccacaggaaccaggtggagcggccccagatgaccttcggcagcctgcagaggatcttccccaagatcatgcccaagaagccagctgaggaggagaatggcctgaaggaggtgcctgaggccagcggcccccagaatgatggcaagcagctgtgccccccaggcaaccccagcaccctggagaagatcaacaagaccagcggccccaagaggggcaagcacgcctggacccaccggctgcgggagaggaagcagctggtggtgtatgaggagatcagtgaccctgaagaagatgatgaatag

SEQ ID NO: 172381 - DNA, 1992 bp, synthetic construct
  misc_feature 1..1992: note = Description of Artificial Sequence: Synthetic coding sequence
  source 1..1992: mol_type = other DNA
atgggccccctgcgggagagcaagaaggagcaccgggtgcagcaccacgacaaggagatcagccgcagccgcatccccaggctcatcctgcggccccacatgccccagcagcagcacaaggtgtccccagccagcgagagccccttcagcgaggaggagagccgggagttcaaccccagcagcagcggccgcagcgccaggacagtgagcagcaacagcttctgcagtgatgacaccggctgccccagcagccagagcgtgtcccctgtgaagacccccagtgatgctggcaacagccccatcggcttctgccccggcagtgatgagggcttcaccaggaagaagtgcaccatcggcatggtgggggagggcagcatccagagcagccgctacaagaaggagagcaagagcggcctggtgaagccaggcagcgaggccgacttcagcagcagcagcagcacaggcagcatcagcgcccctgaggtgcacatgagcacagctggcagcaagaggagcagcagcagcaggaacagaggcccccacggccgcagcaatggagccagcagccacaagccaggcagcagccccagcagcccccgggagaaggacctgctgtccatgctgtgcaggaaccagctgagccctgtgaacatccaccccagctatgcccccagcagccccagcagcagcaacagcggcagctacaagggcagtgactgcagccccatcatgagaagaagtggccgctacatgagctgtggagaaaatcatggagtgcggccccccaaccctgagcagtacctgacccccctgcagcagaaggaggtgacagtgcgccacctgaagaccaagctgaaggagagcgagcggcggctgcacgagcgggagagcgagatcgtggagctgaagagccagctggccaggatgagggaggactggattgaggaggagtgccaccgggtggaggcccagctggccctgaaggaggccaggaaggagatcaagcagctgaagcaggtgattgagaccatgaggagcagcctggccgacaaggacaagggcatccagaagtactttgtggacatcaacatccagaacaagaagctggagagcctgctgcagagcatggagatggcccacagcggcagcctgagagatgagctgtgcctggacttcccctgtgacagccctgagaagagcctgaccctgaacccccccctggacaccatggctgatggcctgagcctggaggagcaggtgactggagagggcgctgaccgggagctgctggtgggggacagcatcgccaacagcacagacctgtttgatgaaattgtgacagccaccaccacagaaagtggggacctggagctggtgcacagcacccctggggccaacgtgctggagctgctgcccatcgtgatgggccaggaggagggctctgtggtggtggagagagctgtgcagacagatgtggtgccctacagccctgccatcagcgagctgatccagagcgtgctgcagaagctgcaggacccctgccccagcagcctggccagcccagatgagagcgagccagacagcatggagagcttccctgagagcctgagcgccctggtggtggacctgacccccaggaaccccaacagcgccatcctgctgagccctgtggagaccccctatgccaacgtggatgctgaggtgcacgccaaccggctgatgagggagctggactttgctgcctgtgtggaggagcggctggatggagtcatccccctggcccggggcggcgtggtgcggcagtactggagcagcagcttcctggtggacctgctggccgtggccgcccctgtggtgcccaccgtgctgtgggccttcagcacccagagaggaggaacagatcctgtgtacaacattggagccctgctgcggggctgctgcgtggtggccctgcacagcctgcggaggacagccttccgcatcaagacctag

SEQ ID NO: 172382 - DNA, 1983 bp, synthetic construct
  misc_feature 1..1983: note = Description of Artificial Sequence: Synthetic coding sequence
  source 1..1983: mol_type = other DNA
atgagcaactttgagaaggagcaccgggtgcagcaccacgacaaggagatcagccgcagccgcatccccaggctcatcctgcggccccacatgccccagcagcagcacaaggtgtccccagccagcgagagccccttcagcgaggaggagagccgggagttcaaccccagcagcagcggccgcagcgccaggacagtgagcagcaacagcttctgcagtgatgacaccggctgccccagcagccagagcgtgtcccctgtgaagacccccagtgatgctggcaacagccccatcggcttctgccccggcagtgatgagggcttcaccaggaagaagtgcaccatcggcatggtgggggagggcagcatccagagcagccgctacaagaaggagagcaagagcggcctggtgaagccaggcagcgaggccgacttcagcagcagcagcagcacaggcagcatcagcgcccctgaggtgcacatgagcacagctggcagcaagaggagcagcagcagcaggaacagaggcccccacggccgcagcaatggagccagcagccacaagccaggcagcagccccagcagcccccgggagaaggacctgctgtccatgctgtgcaggaaccagctgagccctgtgaacatccaccccagctatgcccccagcagccccagcagcagcaacagcggcagctacaagggcagtgactgcagccccatcatgaggaggagcggccgctacatgagctgtggggagaaccacggcgtgcggccccccaaccctgagcagtacctgacccccctgcagcagaaggaggtgacagtgcgccacctgaagaccaagctgaaggagagcgagcggcggctgcacgagcgggagagcgagatcgtggagctgaagagccagctggccaggatgagggaggactggattgaggaggagtgccaccgggtggaggcccagctggccctgaaggaggccaggaaggagatcaagcagctgaagcaggtgattgagaccatgaggagcagcctggccgacaaggacaagggcatccagaagtactttgtggacatcaacatccagaacaagaagctggagagcctgctgcagagcatggagatggcccacagcggcagcctgagagatgagctgtgcctggacttcccctgtgacagccctgagaagagcctgaccctgaacccccccctggacaccatggctgatggcctgagcctggaggagcaggtgactggagagggcgctgaccgggagctgctggtgggggacagcatcgccaacagcacagacctgtttgatgagatcgtgacagccaccaccacagagagcggggacctggagctggtgcacagcacccctggggccaacgtgctggagctgctgcccatcgtgatgggccaggaggagggctctgtggtggtggagagagctgtgcagacagatgtggtgccctacagccctgccatcagcgagctgatccagagcgtgctgcagaagctgcaggacccctgccccagcagcctggccagcccagatgaaagtgagccagacagcatggagagcttccctgagagcctgagcgccctggtggtggacctgaccccaagaaaccccaacagcgccatcctgctgagccctgtggagaccccctatgccaacgtggatgctgaggtgcacgccaaccggctgatgagggagctggactttgctgcctgtgtggaggagcggctggatggagtcatccccctggcccggggcggcgtggtgcggcagtactggagcagcagcttcctggtggacctgctggccgtggccgcccctgtggtgcccaccgtgctgtgggccttcagcacccagaggggcggcacagatcctgtgtacaacatcggggccctgctgcggggctgctgcgtggtggccctgcacagcctgcggaggacagccttccgcatcaagacctag

SEQ ID NO: 172383 - DNA, 1635 bp, synthetic construct
  misc_feature 1..1635: note = Description of Artificial Sequence: Synthetic coding sequence
  source 1..1635: mol_type = other DNA
atggtgggggagggcagcatccagagcagccgctacaagaaggagagcaagagcggcctggtgaagccaggcagcgaggccgacttcagcagcagcagcagcacaggcagcatcagcgcccctgaggtgcacatgagcacagctggcagcaagaggagcagcagcagcaggaacagaggcccccacggccgcagcaatggagccagcagccacaagccaggcagcagccccagcagcccccgggagaaggacctgctgtccatgctgtgcaggaaccagctgagccctgtgaacatccaccccagctatgcccccagcagccccagcagcagcaacagcggcagctacaagggcagtgactgcagccccatcatgaggaggagcggccgctacatgagctgtggggagaaccacggcgtgcggccccccaaccctgagcagtacctgacccccctgcagcagaaggaggtgacagtgcgccacctgaagaccaagctgaaggagagcgagcggcggctgcacgagcgggagagcgagatcgtggagctgaagagccagctggccaggatgagggaggactggattgaggaggagtgccaccgggtggaggcccagctggccctgaaggaggccaggaaggagatcaagcagctgaagcaggtgattgagaccatgaggagcagcctggccgacaaggacaagggcatccagaagtactttgtggacatcaacatccagaacaagaagctggagagcctgctgcagagcatggagatggcccacagcggcagcctgagagatgagctgtgcctggacttcccctgtgacagccctgagaagagcctgaccctgaacccccccctggacaccatggctgatggcctgagcctggaggagcaggtgactggagagggcgctgaccgggagctgctggtgggggacagcatcgccaacagcacagacctgtttgatgagatcgtgacagccaccaccacagagagcggggacctggagctggtgcacagcacccctggggccaacgtgctggagctgctgcccatcgtgatgggccaggaggagggctctgtggtggtggagagagctgtgcagacagatgtggtgccctacagccctgccatcagcgagctgatccagagcgtgctgcagaagctgcaggacccctgccccagcagcctggccagcccagatgaaagtgagccagacagcatggagagcttccctgagagcctgagcgccctggtggtggacctgaccccaagaaaccccaacagcgccatcctgctgagccctgtggagaccccctatgccaacgtggatgctgaggtgcacgccaaccggctgatgagggagctggactttgctgcctgtgtggaggagcggctggatggagtcatccccctggcccggggcggcgtggtgcggcagtactggagcagcagcttcctggtggacctgctggccgtggccgcccctgtggtgcccaccgtgctgtgggccttcagcacccagaggggcggcacagatcctgtgtacaacatcggggccctgctgcggggctgctgcgtggtggccctgcacagcctgcggaggacagccttccgcatcaagacctag

SEQ ID NO: 172384 - DNA, 1992 bp, synthetic construct; identical to SEQ ID NO: 172381
  misc_feature 1..1992: note = Description of Artificial Sequence: Synthetic coding sequence
  source 1..1992: mol_type = other DNA

SEQ ID NO: 172385 - DNA, 1989 bp, synthetic construct
  misc_feature 1..1989: note = Description of Artificial Sequence: Synthetic coding sequence
  source 1..1989: mol_type = other DNA
atgggccccctgcgggagagcaaggagcaccgggtgcagcaccacgacaaggagatcagccgcagccgcatccccaggctcatcctgcggccccacatgccccagcagcagcacaaggtgtccccagccagcgagagccccttcagcgaggaggagagccgggagttcaaccccagcagcagcggccgcagcgccaggacagtgagcagcaacagcttctgcagtgatgacaccggctgccccagcagccagagcgtgtcccctgtgaagacccccagtgatgctggcaacagccccatcggcttctgccccggcagtgatgagggcttcaccaggaagaagtgcaccatcggcatggtgggggagggcagcatccagagcagccgctacaagaaggagagcaagagcggcctggtgaagccaggcagcgaggccgacttcagcagcagcagcagcacaggcagcatcagcgcccctgaggtgcacatgagcacagctggcagcaagaggagcagcagcagcaggaacagaggcccccacggccgcagcaatggagccagcagccacaagccaggcagcagccccagcagcccccgggagaaggacctgctgtccatgctgtgcaggaaccagctgagccctgtgaacatccaccccagctatgcccccagcagccccagcagcagcaacagcggcagctacaagggcagtgactgcagccccatcatgaggaggagcggccgctacatgagctgtggggagaaccacggcgtgcggccccccaaccctgagcagtacctgacccccctgcagcagaaggaggtgacagtgcgccacctgaagaccaagctgaaggagagcgagcggcggctgcacgagcgggagagcgagatcgtggagctgaagagccagctggccaggatgagggaggactggattgaggaggagtgccaccgggtggaggcccagctggccctgaaggaggccaggaaggagatcaagcagctgaagcaggtgattgagaccatgaggagcagcctggccgacaaggacaagggcatccagaagtactttgtggacatcaacatccagaacaagaagctggagagcctgctgcagagcatggagatggcccacagcggcagcctgagagatgagctgtgcctggacttcccctgtgacagccctgagaagagcctgaccctgaacccccccctggacaccatggctgatggcctgagcctggaggagcaggtgactggagagggcgctgaccgggagctgctggtgggggacagcatcgccaacagcacagacctgtttgatgagatcgtgacagccaccaccacagagagcggggacctggagctggtgcacagcacccctggggccaacgtgctggagctgctgcccatcgtgatgggccaggaggagggctctgtggtggtggagagagctgtgcagacagatgtggtgccctacagccctgccatcagcgagctgatccagagcgtgctgcagaagctgcaggacccctgccccagcagcctggccagcccagatgaaagtgagccagacagcatggagagcttccctgagagcctgagcgccctggtggtggacctgaccccaagaaaccccaacagcgccatcctgctgagccctgtggagaccccctatgccaacgtggatgctgaggtgcacgccaaccggctgatgagggagctggactttgctgcctgtgtggaggagcggctggatggagtcatccccctggcccggggcggcgtggtgcggcagtactggagcagcagcttcctggtggacctgctggccgtggccgcccctgtggtgcccaccgtgctgtgggccttcagcacccagaggggcggcacagatcctgtgtacaacatcggggccctgctgcggggctgctgcgtggtggccctgcacagcctgcggaggacagccttccgcatcaagacctag

SEQ ID NO: 172386 - DNA, 1992 bp, synthetic construct; identical to SEQ ID NO: 172381
  misc_feature 1..1992: note = Description of Artificial Sequence: Synthetic coding sequence
  source 1..1992: mol_type = other DNA

SEQ ID NO: 172387 - DNA, 1992 bp, synthetic construct; identical to SEQ ID NO: 172381
  misc_feature 1..1992: note = Description of Artificial Sequence: Synthetic coding sequence
  source 1..1992: mol_type = other DNA

SEQ ID NO: 172388 - DNA, 1992 bp, synthetic construct; identical to SEQ ID NO: 172381
  misc_feature 1..1992: note = Description of Artificial Sequence: Synthetic coding sequence
  source 1..1992: mol_type = other DNA

SEQ ID NO: 172389 - DNA, 1989 bp, synthetic construct; identical to SEQ ID NO: 172385
  misc_feature 1..1989: note = Description of Artificial Sequence: Synthetic coding sequence
  source 1..1989: mol_type = other DNA

SEQ ID NO: 172390 - DNA, 414 bp, synthetic construct
  misc_feature 1..414: note = Description of Artificial Sequence: Synthetic coding sequence
  source 1..414: mol_type = other DNA
atgggccccctgcgggagagcaagaaggagcaccgggtgcagcaccacgacaaggagatcagccgcagccgcatccccaggctcatcctgcggccccacatgccccagcagcagcacaaggtgtccccagccagcgagagccccttcagcgaggaggagagccgggagttcaaccccagcagcagcggccgcagcgccaggacagtgagcagcaacagcttctgcagtgatgacaccggctgccccagcagccagagcgtgtcccctgtgaagacccccagtgatgctggcaacagccccatcggcttctgccccggcagtgatgagggcttcaccaggaagaagtgcaccatcggcatggtgggggagggcagcatccagagcagccgctacaagaaggagagcaagagctag

SEQ ID NO: 172391 - DNA, 231 bp, synthetic construct
  misc_feature 1..231: note = Description of Artificial Sequence: Synthetic coding sequence
  source 1..231: mol_type = other DNA
atgggccccctgcgggagagcaagaaggagcaccgggtgcagcaccacgacaaggagatcagccgcagccgcatccccaggctcatcctgcggccccacatgccccagcagcagcacaaggtgtccccagccagcgagagccccttcagcgaggaggagagccgggagttcaaccccagcagcagcggccgcagcgccaggacagtgagcagcaacagcttctgcagctag

SEQ ID NO: 172392 - DNA, 222 bp, synthetic construct
  misc_feature 1..222: note = Description of Artificial Sequence: Synthetic coding sequence
  source 1..222: mol_type = other DNA
atgggccccctgcgggagagcaagaaggagcaccgggtgcagcaccacgacaaggagatcagccgcagccgcatccccaggctcatcctgcggccccacatgccccagcagcagcacaaggtgtccccagccagcgagagccccttcagcgaggaggagagccgggagttcaaccccagcagcagcggccgcagcgccaggacagtgagcagcaacagctag

SEQ ID NO: 172393 - DNA, 378 bp, synthetic construct
  misc_feature 1..378: note = Description of Artificial Sequence: Synthetic coding sequence
  source 1..378: mol_type = other DNA
atggtgggggagggcagcatccagagcagccgctacaagaaggagagcaagagcggcctggtgaagccaggcagcgaggccgacttcagcagcagcagcagcacaggcagcatcagcgcccctgaggtgcacatgagcacagctggcagcaagaggagcagcagcagcaggaacagaggcccccacggccgcagcaatggagccagcagccacaagccaggcagcagccccagcagcccccgggagaaggacctgctgtccatgctgtgcaggaaccagctgagccctgtgaacatccaccccagctatgcccccagcagccccagcagcagcaacagcggcagctacaagggcagtgactgcagccccatcatgtag

SEQ ID NO: 172394 - DNA, 1635 bp, synthetic construct; identical to SEQ ID NO: 172383
  misc_feature 1..1635: note = Description of Artificial Sequence: Synthetic coding sequence
  source 1..1635: mol_type = other DNA

SEQ ID NO: 172395 - DNA, 243 bp, synthetic construct
  misc_feature 1..243: note = Description of Artificial Sequence: Synthetic coding sequence
  source 1..243: mol_type = other DNA
atggtgggggagggcagcatccagagcagccgctacaagaaggagagcaagagcggcctggtgaagccaggcagcgaggccgacttcagcagcagcagcagcacaggcagcatcagcgcccctgaggtgcacatgagcacagctggcagcaagaggagcagcagcagcaggaacagaggcccccacggccgcagcaatggagccagcagccacaagccaggcagcagccccagcagcccctag

SEQ ID NO: 172396 - DNA, 1989 bp, synthetic construct; identical to SEQ ID NO: 172385
  misc_feature 1..1989: note = Description of Artificial Sequence: Synthetic coding sequence
  source 1..1989: mol_type = other DNA

SEQ ID NO: 172397 - DNA, 288 bp, synthetic construct
  misc_feature 1..288: note = Description of Artificial Sequence: Synthetic coding sequence
  source 1..288: mol_type = other DNA
atgggccccctgcgggagagcaagaaggagcaccgggtgcagcaccacgacaaggagatcagccgcagccgcatccccaggctcatcctgcggccccacatgccccagcagcagcacaaggtgtccccagccagcgagagccccttcagcgaggaggagagccgggagttcaaccccagcagcagcggccgcagcgccaggacagtgagcagcaacagcttctgcagtgatgacaccggctgccccagcagccagagcgtgtcccctgtgaagacccccagcgactag

SEQ ID NO: 172398 - DNA, 615 bp, synthetic construct
  misc_feature 1..615: note = Description of Artificial Sequence: Synthetic coding sequence
  source 1..615: mol_type = other DNA
atgggccccctgcgggagagcaaggagcaccgggtgcagcaccacgacaaggagatcagccgcagccgcatccccaggctcatcctgcggccccacatgccccagcagcagcacaaggtgtccccagccagcgagagccccttcagcgaggaggagagccgggagttcaaccccagcagcagcggccgcagcgccaggacagtgagcagcaacagcttctgcagtgatgacaccggctgccccagcagccagagcgtgtcccctgtgaagacccccagtgatgctggcaacagccccatcggcttctgccccggcagtgatgagggcttcaccaggaagaagtgcaccatcggcatggtgggggagggcagcatccagagcagccgctacaagaaggagagcaagagcggcctggtgaagccaggcagcgaggccgacttcagcagcagcagcagcacaggcagcatcagcgcccctgaggtgcacatgagcacagctggcagcaagaggagcagcagcagcaggaacagaggcccccacggccgcagcaatggagccagcagccacaagccaggcagcagccccagcagcccccgggagaaggacctgctgtag

SEQ ID NO: 172399 - DNA, 108 bp, synthetic construct
  misc_feature 1..108: note = Description of Artificial Sequence: Synthetic coding sequence
  source 1..108: mol_type = other DNA
atggtgggggagggcagcatccagagcagccgctacaagaaggagagcaagagcggcctggtgaagccaggcagcgaggccgacttcagcagcagcagcagcacctag

SEQ ID NO: 172400 - DNA, 105 bp, synthetic construct
  misc_feature 1..105: note = Description of Artificial Sequence: Synthetic coding sequence
  source 1..105: mol_type = other DNA
atggtgggggagggcagcatccagagcagccgctacaagaaggagagcaagagcggcctggtgaagccaggcagcgaggccgacttcagcagcagcagcagctag

SEQ ID NO: 172401 - DNA, 243 bp, synthetic construct; identical to SEQ ID NO: 172395
  misc_feature 1..243: note = Description of Artificial Sequence: Synthetic coding sequence
  source 1..243: mol_type = other DNA

SEQ ID NO: 172402 - DNA, 1788 bp, synthetic construct
  misc_feature 1..1788: note = Description of Artificial Sequence: Synthetic coding sequence
  source 1..1788: mol_type = other DNA
atgggccccttctgggccaggaaggatgacaccggctgccccagcagccagagcgtgtcccctgtgaagacccccagtgatgctggcaacagccccatcggcttctgccccggcagtgatgagggcttcaccaggaagaagtgcaccatcggcatggtgggggagggcagcatccagagcagccgctacaagaaggagagcaagagcggcctggtgaagccaggcagcgaggccgacttcagcagcagcagcagcacaggcagcatcagcgcccctgaggtgcacatgagcacagctggcagcaagaggagcagcagcagcaggaacagaggcccccacggccgcagcaatggagccagcagccacaagccaggcagcagccccagcagcccccgggagaaggacctgctgtccatgctgtgcaggaaccagctgagccctgtgaacatccaccccagctatgcccccagcagccccagcagcagcaacagcggcagctacaagggcagtgactgcagccccatcatgagaagaagtggccgctacatgagctgtggagaaaatcatggagtgcggccccccaaccctgagcagtacctgacccccctgcagcagaaggaggtgacagtgcgccacctgaagaccaagctgaaggagagcgagcggcggctgcacgagcgggagagcgagatcgtggagctgaagagccagctggccaggatgagggaggactggattgaggaggagtgccaccgggtggaggcccagctggccctgaaggaggccaggaaggagatcaagcagctgaagcaggtgattgagaccatgaggagcagcctggccgacaaggacaagggcatccagaagtactttgtggacatcaacatccagaacaagaagctggagagcctgctgcagagcatggagatggcccacagcggcagcctgagagatgagctgtgcctggacttcccctgtgacagccctgagaagagcctgaccctgaacccccccctggacaccatggctgatggcctgagcctggaggagcaggtgactggagagggcgctgaccgggagctgctggtgggggacagcatcgccaacagcacagacctgtttgatgaaattgtgacagccaccaccacagaaagtggggacctggagctggtgcacagcacccctggggccaacgtgctggagctgctgcccatcgtgatgggccaggaggagggctctgtggtggtggagagagctgtgcagacagatgtggtgccctacagccctgccatcagcgagctgatccagagcgtgctgcagaagctgcaggacccctgccccagcagcctggccagcccagatgagagcgagccagacagcatggagagcttccctgagagcctgagcgccctggtggtggacctgacccccaggaaccccaacagcgccatcctgctgagccctgtggagaccccctatgccaacgtggatgctgaggtgcacgccaaccggctgatgagggagctggactttgctgcctgtgtggaggagcggctggatggagtcatccccctggcccggggcggcgtggtgcggcagtactggagcagcagcttcctggtggacctgctggccgtggccgcccctgtggtgcccaccgtgctgtgggccttcagcacccagagaggaggaacagatcctgtgtacaacattggagccctgctgcggggctgctgcgtggtggccctgcacagcctgcggaggacagccttccgcatcaagacctag

SEQ ID NO: 172403 - DNA, 1635 bp, synthetic construct; identical to SEQ ID NO: 172383
  misc_feature 1..1635: note = Description of Artificial Sequence: Synthetic coding sequence
  source 1..1635: mol_type = other DNA

SEQ ID NO: 172404 - DNA, 1992 bp, synthetic construct; identical to SEQ ID NO: 172381
  misc_feature 1..1992: note = Description of Artificial Sequence: Synthetic coding sequence
  source 1..1992: mol_type = other DNA

SEQ ID NO: 172405 - DNA, 489 bp, synthetic construct
  misc_feature 1..489: note = Description of Artificial Sequence: Synthetic coding sequence
  source 1..489: mol_type = other DNA
atgggccccctgcgggagagcaaggagcaccgggtgcagcaccacgacaaggagatcagccgcagccgcatccccaggctcatcctgcggccccacatgccccagcagcagcacaaggtgtccccagccagcgagagccccttcagcgaggaggagagccgggagttcaaccccagcagcagcggccgcagcgccaggacagtgagcagcaacagcttctgcagtgatgacaccggctgccccagcagccagagcgtgtcccctgtgaagacccccagtgatgctggcaacagccccatcggcttctgccccggcagtgatgagggcttcaccaggaagaagtgcaccatcggcatggtgggggagggcagcatccagagcagccgctacaagaaggagagcaagagcggcctggtgaagccaggcagcgaggccgacttcagcagcagcagcagcacaggcagcatcagcgcccctgaggtgcactag

SEQ ID NO: 172406 - DNA, 1989 bp, synthetic construct; identical to SEQ ID NO: 172385
  misc_feature 1..1989: note = Description of Artificial Sequence: Synthetic coding sequence
  source 1..1989: mol_type = other DNA

SEQ ID NO: 172407 - DNA, 315 bp, synthetic construct
  misc_feature 1..315: note = Description of Artificial Sequence: Synthetic coding sequence
  source 1..315: mol_type = other DNA
atgggccccctgcgggagagcaaggagcaccgggtgcagcaccacgacaaggagatcagccgcagccgcatccccaggctcatcctgcggccccacatgccccagcagcagcacaaggtgtccccagccagcgagagccccttcagcgaggaggagagccgggagttcaaccccagcagcagcggccgcagcgccaggacagtgagcagcaacagcttctgcagtgatgacaccggctgccccagcagccagagcgtgtcccctgtgaagacccccagtgatgctggcaacagccccatcggcttctgcccctag

SEQ ID NO: 172408 - DNA, 456 bp, synthetic construct
  misc_feature 1..456: note = Description of Artificial Sequence: Synthetic coding sequence
  source 1..456: mol_type = other DNA
atgggccccctgcgggagagcaagaaggagcaccgggtgcagcaccacgacaaggagatcagccgcagccgcatccccaggctcatcctgcggccccacatgccccagcagcagcacaaggtgtccccagccagcgagagccccttcagcgaggaggagagccgggagttcaaccccagcagcagcggccgcagcgccaggacagtgagcagcaacagcttctgcagtgatgacaccggctgccccagcagccagagcgtgtcccctgtgaagacccccagtgatgctggcaacagccccatcggcttctgccccggcagtgatgagggcttcaccaggaagaagtgcaccatcggcatggtgggggagggcagcatccagagcagccgctacaagaaggagagcaagagcggcctggtgaagccaggcagcgaggccgacttcagcagcagctag

SEQ ID NO: 172409 - DNA, 231 bp, synthetic construct; identical to SEQ ID NO: 172391
  misc_feature 1..231: note = Description of Artificial Sequence: Synthetic coding sequence
  source 1..231: mol_type = other DNA

SEQ ID NO: 172410 - DNA, 1617 bp, synthetic construct
  misc_feature 1..1617: note = Description of Artificial Sequence: Synthetic coding sequence
  source 1..1617: mol_type = other DNA
atgcctggcagcggccccagcgagaggatgacctggccaggccctgccctgtctgctggcccccccacccggcccctgagcagcgcccctggcatcccccccatcccccccctgaccaggacccacagcctgatggccatgagcctgcccggcagcaggaggaccagcgctggcagcagaagaaggaccagcccccctgtgtctgtgagagatgcctacggcaccagcagcctgagcagcagcagcaacagcggcagctacaagggcagtgacagcagccccaccccaagaagatccatgaagtacaccctgtgcagcgacaaccacggcatcaagccacccaccccagagcagtacctgacccccctgcagcagaaggaggtgtgcatccgccacctgaaggcccggctgaaggacacccaggaccggctgcaggaccgggacacagaaattgatgacctgaagacccagctgagcaggatgcaggaggactggattgaggaggagtgccaccgggtggaggcccagctggccctgaaggaggccaggaaggagatcaagcagctgaagcaggtgattgacacagtgaagaacaacctgattgacaaggacaagggcctgcagaagtactttgtggacatcaacatccagaacaagaagctggagaccctgctgcacagcatggaggtggcccagaatggcatggccaaggaggatggcactggagagagcgctgggggcagccctgcccggagcctgaccaggagcagcacctacaccaagctgagtgaccctgctgtgtgtggggaccggcagcccggggaccccagcagcggcagcgcagaagatggagctgacagcggctttgctgctgctgatgacaccctgagcaggacagatgccctggaggccagcagcctgctgagcagcggcgtggactgtggcacagaggagaccagcctgcacagcagctttggcctgggcccccgcttccctgccagcaacacctatgagaagctgctgtgtggcatggaggccggcgtgcaggccagctgcatgcaggagcgggccatccagacagactttgtgcagtaccagcctgacctggacaccatcctggagaaggtgacccaggcccaggtgtgtggcacagatcctgagagcggggaccgctgcccagagctggatgcccaccccagcggcccccgggaccccaacagcgctgtggtggtgacagtgggagatgagctggaggcccctgagcccatcacccggggccccaccccccagaggcctggggccaaccccaaccctggccagagcgtgtctgtggtgtgccccatggaggaggaggaggaggccgctgtggccgagaaggagcccaagagctactggagccgccactacatcgtggacctgctggccgtggtggtgcctgctgtgcccaccgtggcctggctgtgccgcagccagaggcggcagggccagcccatctacaacatcagcagcctgctgcggggctgctgcaccgtggccctgcacagcatccgccgcatcagctgccgcagcctgagccagcccagccccagccctgctgggggcggcagccagctgtag

SEQ ID NO: 172411 - DNA, 1485 bp, synthetic construct
  misc_feature 1..1485: note = Description of Artificial Sequence: Synthetic coding sequence
  source 1..1485: mol_type = other DNA
atggccatgagcctgcccggcagcaggaggaccagcgctggcagcagaagaaggaccagcccccctgtgtctgtgagagatgcctacggcaccagcagcctgagcagcagcagcaacagcggcagctacaagggcagtgacagcagccccaccccaagaagatccatgaagtacaccctgtgcagcgacaaccacggcatcaagccacccaccccagagcagtacctgacccccctgcagcagaaggaggtgtgcatccgccacctgaaggcccggctgaaggacacccaggaccggctgcaggaccgggacacagaaattgatgacctgaagacccagctgagcaggatgcaggaggactggattgaggaggagtgccaccgggtggaggcccagctggccctgaaggaggccaggaaggagatcaagcagctgaagcaggtgattgacacagtgaagaacaacctgattgacaaggacaagggcctgcagaagtactttgtggacatcaacatccagaacaagaagctggagaccctgctgcacagcatggaggtggcccagaatggcatggccaaggaggatggcactggagagagcgctgggggcagccctgcccggagcctgaccaggagcagcacctacaccaagctgagtgaccctgctgtgtgtggggaccggcagcccggggaccccagcagcggcagcgcagaagatggagctgacagcggctttgctgctgctgatgacaccctgagcaggacagatgccctggaggccagcagcctgctgagcagcggcgtggactgtggcacagaggagaccagcctgcacagcagctttggcctgggcccccgcttccctgccagcaacacctatgagaagctgctgtgtggcatggaggccggcgtgcaggccagctgcatgcaggagcgggccatccagacagactttgtgcagtaccagcctgacctggacaccatcctggagaaggtgacccaggcccaggtgtgtggcacagatcctgagagcggggaccgctgcccagagctggatgcccaccccagcggcccccgggaccccaacagcgctgtggtggtgacagtgggagatgagctggaggcccctgagcccatcacccggggccccaccccccagaggcctggggccaaccccaaccctggccagagcgtgtctgtggtgtgccccatggaggaggaggaggaggccgctgtggccgagaaggagcccaagagctactggagccgccactacatcgtggacctgctggccgtggtggtgcctgctgtgcccaccgtggcctggctgtgccgcagccagaggcggcagggccagcccatctacaacatcagcagcctgctgcggggctgctgcaccgtggccctgcacagcatccgccgcatcagctgccgcagcctgagccagcccagccccagccctgctgggggcggcagccagctgtag

SEQ ID NO: 172412 - DNA, 864 bp, synthetic construct
  misc_feature 1..864: note = Description of Artificial Sequence: Synthetic coding sequence
  source 1..864: mol_type = other DNA
atgaaggaccggctggccgagctgctggacctgagcaagcagtatgaccagcagttcccagatggagatgatgaatttgacagcccccatgaagatattgtgtttgaaacagaccacatcctggagagcctgtacagagacatccgggacatccaggatgagaaccagctgctggtggctgatgtgaagaggctgggcaagcagaatgcccgcttcctgacctccatgaggcggctgagcagcatcaagagggacaccaacagcatcgccaaggccatcaaggcccggggggaggtgatccactgcaagctgcgggccatgaaggagctgtctgaggccgctgaggcccagcacggcccccacagcgctgtggcccgcatcagccgggcccagtacaatgccctgaccctgaccttccagagggccatgcatgactacaaccaggccgagatgaagcagagggacaactgcaagatccgcatccagaggcagctggagatcatgggcaaggaggtgtctggggaccagatcgaggacatgtttgagcagggcaagtgggatgtgttttctgagaacctgctggctgatgtgaagggggcccgggccgccctgaatgaaattgagagccgccaccgggagctgctgcggctggagagccgcatcagagatgtgcatgagctgttcctgcagatggctgtgctggtggagaagcaggccgacaccctgaatgtgattgagctgaatgtgcagaagacagtggactacacaggccaggccaaggcccaggtgaggaaggctgtgcagtatgaggagaagaacccctgcaggaccctgtgctgcttctgctgcccctgcctgaagtag

SEQ ID NO: 172413 - DNA, 615 bp, synthetic construct
  misc_feature 1..615: note = Description of Artificial Sequence: Synthetic coding sequence
  source 1..615: mol_type = other DNA
atggccctggtgtctggcatcagcctggaccctgaggccgccatcggcgtgaccaagaggcccccacccaagtgggtggatggagtggatgagatccagtatgatgtgggccgcatcaagcagaagatgaaggagctggccagcctgcatgacaagcacctgaaccggcccaccctggatgacagcagcgaggaggagcacgccatcgagatcaccacccaggagatcacccagctgttccaccgctgccagagagctgtgcaggccctgcccagccgggcccgggcctgcagcgagcaggagggccgcctgctgggcaatgtggtggccagcctggcccaggccctgcaggagctgagcaccagcttcagacatgcccagagcggctacctgaagaggatgaagaaccgggaggagaggagccagcacttctttgacacctctgtgcccctgatggatgatggagatgacaacaccctgtaccaccggggcttcacagaggaccagctggtgctggtggagcagaacaccctgatggtggaggagcgggagcgggagatccggcagatcgtgcagagcatcagtgacctgaatgagatcttccgggacctgtag

SEQ ID NO: 172414 - DNA, 927 bp, synthetic construct
  misc_feature 1..927: note = Description of Artificial Sequence: Synthetic coding sequence
  source 1..927: mol_type = other DNA
atggccacccggcggctgacagatgccttcctgctgctgaggaacaacagcatccagaaccggcagctgctggccgagcaggagctggatgagctggctgatgacaggatggccctggtgtctggcatcagcctggaccctgaggccgccatcggcgtgaccaagaggcccccacccaagtgggtggatggagtggatgagatccagtatgatgtgggccgcatcaagcagaagatgaaggagctggccagcctgcatgacaagcacctgaaccggcccaccctggatgacagcagcgaggaggagcacgccatcgagatcaccacccaggagatcacccagctgttccaccgctgccagagagctgtgcaggccctgcccagccgggcccgggcctgcagcgagcaggagggccgcctgctgggcaatgtggtggccagcctggcccaggccctgcaggagctgagcaccagcttcagacatgcccagagcggctacctgaagaggatgaagaaccgggaggagaggagccagcacttctttgacacctctgtgcccctgatggatgatggagatgacaacaccctgtaccaccggggcttcacagaggaccagctggtgctggtggagcagaacaccctgatggtggaggagcgggagcgggagatccggcagatcgtgcagagcatcagtgacctgaatgagatcttccgggacctgggcgccatgattgtggagcagggcaccgtgctggacagaattgactacaacgtggagcagagctgcatcaagacagaagatggcctgaagcagctgcacaaggccgagcagtaccagaagaagaacaggaagatgctggtgatcctgatcctcttcgtcatcatcatcgtgctgattgtggtgctggtgggcgtgaagagcaggtag

SEQ ID NO: 172415 - DNA, 966 bp, synthetic construct
  misc_feature 1..966: note = Description of Artificial Sequence: Synthetic coding sequence
  source 1..966: mol_type = other DNA
atggccacccggcggctgacagatgccttcctgctgctgaggaacaacagcatccagaaccggcagctgctggccgagcaggtgagcagccacatcaccagcagccccctgcacagccgcagcattgctgccctggctgatgacaggatggccctggtgtctggcatcagcctggaccctgaggccgccatcggcgtgaccaagaggcccccacccaagtgggtggatggagtggatgagatccagtatgatgtgggccgcatcaagcagaagatgaaggagctggccagcctgcatgacaagcacctgaaccggcccaccctggatgacagcagcgaggaggagcacgccatcgagatcaccacccaggagatcacccagctgttccaccgctgccagagagctgtgcaggccctgcccagccgggcccgggcctgcagcgagcaggagggccgcctgctgggcaatgtggtggccagcctggcccaggccctgcaggagctgagcaccagcttcagacatgcccagagcggctacctgaagaggatgaagaaccgggaggagaggagccagcacttctttgacacctctgtgcccctgatggatgatggagatgacaacaccctgtaccaccggggcttcacagaggaccagctggtgctggtggagcagaacaccctgatggtggaggagcgggagcgggagatccggcagatcgtgcagagcatcagtgacctgaatgagatcttccgggacctgggcgccatgattgtggagcagggcaccgtgctggacagaattgactacaacgtggagcagagctgcatcaagacagaagatggcctgaagcagctgcacaaggccgagcagtaccagaagaagaacaggaagatgctggtgatcctgatcctgtttgtgatcatcatcgtgctgattgtggtgctggtgggcgtgaagagcaggtag

SEQ ID NO: 172416 - DNA, 756 bp, synthetic construct
  misc_feature 1..756: note = Description of Artificial Sequence: Synthetic coding sequence
  source 1..756: mol_type = other DNA
atggccctggtgtctggcatcagcctggaccctgaggccgccatcggcgtgaccaagaggcccccacccaagtgggtggatggagtggatgagatccagtatgatgtgggccgcatcaagcagaagatgaaggagctggccagcctgcatgacaagcacctgaaccggcccaccctggatgacagcagcgaggaggagcacgccatcgagatcaccacccaggagatcacccagctgttccaccgctgccagagagctgtgcaggccctgcccagccgggcccgggcctgcagcgagcaggagggccgcctgctgggcaatgtggtggccagcctggcccaggccctgcaggagctgagcaccagcttcagacatgcccagagcggctacctgaagaggatgaagaaccgggaggagaggagccagcacttctttgacacctctgtgcccctgatggatgatggagatgacaacaccctgtaccaccggggcttcacagaggaccagctggtgctggtggagcagaacaccctgatggtggaggagcgggagcgggagatccggcagatcgtgcagagcatcagtgacctgaatgagatcttccgggacctgggcgccatgattgtggagcagggcaccgtgctggacagaattgactacaacgtggagcagagctgcatcaagacagaagatggcctgaagcagctgcacaaggccgagcagtaccagaagaagaacaggaagatgctggtgtag

SEQ ID NO: 172417 - DNA, 927 bp, synthetic construct
  misc_feature 1..927: note = Description of Artificial Sequence: Synthetic coding sequence
  source 1..927: mol_type = other DNA
atggccacccggcggctgacagatgccttcctgctgctgaggaacaacagcatccagaaccggcagctgctggccgagcagcagctgagcaagctggctgatgacaggatggccctggtgtctggcatcagcctggaccctgaggccgccatcggcgtgaccaagaggcccccacccaagtgggtggatggagtggatgagatccagtatgatgtgggccgcatcaagcagaagatgaaggagctggccagcctgcatgacaagcacctgaaccggcccaccctggatgacagcagcgaggaggagcacgccatcgagatcaccacccaggagatcacccagctgttccaccgctgccagagagctgtgcaggccctgcccagccgggcccgggcctgcagcgagcaggagggccgcctgctgggcaatgtggtggccagcctggcccaggccctgcaggagctgagcaccagcttcagacatgcccagagcggctacctgaagaggatgaagaaccgggaggagaggagccagcacttctttgacacctctgtgcccctgatggatgatggagatgacaacaccctgtaccaccggggcttcacagaggaccagctggtgctggtggagcagaacaccctgatggtggaggagcgggagcgggagatccggcagatcgtgcagagcatcagtgacctgaatgagatcttccgggacctgggcgccatgattgtggagcagggcaccgtgctggacagaattgactacaacgtggagcagagctgcatcaagacagaagatggcctgaagcagctgcacaaggccgagcagtaccagaagaagaacaggaagatgctggtgatcctgatcctcttcgtcatcatcatcgtgctgattgtggtgctggtgggcgtgaagagcaggtag

SEQ ID NO: 172418 - DNA, 978 bp, synthetic construct
  misc_feature 1..978: note = Description of Artificial Sequence: Synthetic coding sequence
  source 1..978: mol_type = other DNA
atggccacccggcggctgacagatgccttcctgctgctgaggaacaacagcatccagaaccggcagctgctggccgagcaggtgagcagccacatcaccagcagccccctgcacagccgcagcattgctgctgccctggatgagctggctgatgacaggatggccctggtgtctggcatcagcctggaccctgaggccgccatcggcgtgaccaagaggcccccacccaagtgggtggatggagtggatgagatccagtatgatgtgggccgcatcaagcagaagatgaaggagctggccagcctgcatgacaagcacctgaaccggcccaccctggatgacagcagcgaggaggagcacgccatcgagatcaccacccaggagatcacccagctgttccaccgctgccagagagctgtgcaggccctgcccagccgggcccgggcctgcagcgagcaggagggccgcctgctgggcaatgtggtggccagcctggcccaggccctgcaggagctgagcaccagcttcagacatgcccagagcggctacctgaagaggatgaagaaccgggaggagaggagccagcacttctttgacacctctgtgcccctgatggatgatggagatgacaacaccctgtaccaccggggcttcacagaggaccagctggtgctggtggagcagaacaccctgatggtggaggagcgggagcgggagatccggcagatcgtgcagagcatcagtgacctgaatgagatcttccgggacctgggcgccatgattgtggagcagggcaccgtgctggacagaattgactacaacgtggagcagagctgcatcaagacagaagatggcctgaagcagctgcacaaggccgagcagtaccagaagaagaacaggaagatgctggtgatcctgatcctgtttgtgatcatcatcgtgctgattgtggtgctggtgggcgtgaagagcaggtag

SEQ ID NO: 172419 - DNA, 915 bp, synthetic construct
  misc_feature 1..915: note = Description of Artificial Sequence: Synthetic coding sequence
  source 1..915: mol_type = other DNA
atggccacccggcggctgacagatgccttcctgctgctgaggaacaacagcatccagaaccggcagctgctggccgagcagctggctgatgacaggatggccctggtgtctggcatcagcctggaccctgaggccgccatcggcgtgaccaagaggcccccacccaagtgggtggatggagtggatgagatccagtatgatgtgggccgcatcaagcagaagatgaaggagctggccagcctgcatgacaagcacctgaaccggcccaccctggatgacagcagcgaggaggagcacgccatcgagatcaccacccaggagatcacccagctgttccaccgctgccagagagctgtgcaggccctgcccagccgggcccgggcctgcagcgagcaggagggccgcctgctgggcaatgtggtggccagcctggcccaggccctgcaggagctgagcaccagcttcagacatgcccagagcggctacctgaagaggatgaagaaccgggaggagaggagccagcacttctttgacacctctgtgcccctgatggatgatggagatgacaacaccctgtaccaccggggcttcacagaggaccagctggtgctggtggagcagaacaccctgatggtggaggagcgggagcgggagatccggcagatcgtgcagagcatcagtgacctgaatgagatcttccgggacctgggcgccatgattgtggagcagggcaccgtgctggacagaattgactacaacgtggagcagagctgcatcaagacagaagatggcctgaagcagctgcacaaggccgagcagtaccagaagaagaacaggaagatgctggtgatcctgatcctcttcgtcatcatcatcgtgctgattgtggtgctggtgggcgtgaagagcaggtag

SEQ ID NO: 172420 - DNA, 819 bp, synthetic construct
  misc_feature 1..819: note = Description of Artificial Sequence: Synthetic coding sequence
  source 1..819: mol_type = other DNA
atggccctggtgtctggcatcagcctggaccctgaggccgccatcggcgtgaccaagaggcccccacccaagtgggtggatggagtggatgagatccagtatgatgtgggccgcatcaagcagaagatgaaggagctggccagcctgcatgacaagcacctgaaccggcccaccctggatgacagcagcgaggaggagcacgccatcgagatcaccacccaggagatcacccagctgttccaccgctgccagagagctgtgcaggccctgcccagccgggcccgggcctgcagcgagcaggagggccgcctgctgggcaatgtggtggccagcctggcccaggccctgcaggagctgagcaccagcttcagacatgcccagagcggctacctgaagaggatgaagaaccgggaggagaggagccagcacttctttgacacctctgtgcccctgatggatgatggagatgacaacaccctgtaccaccggggcttcacagaggaccagctggtgctggtggagcagaacaccctgatggtggaggagcgggagcgggagatccggcagatcgtgcagagcatcagtgacctgaatgagatcttccgggacctgggcgccatgattgtggagcagggcaccgtgctggacagaattgactacaacgtggagcagagctgcatcaagacagaagatggcctgaagcagctgcacaaggccgagcagtaccagaagaagaacaggaagatgctggtgatcctgatcctcttcgtcatcatcatcgtgctgattgtggtgctggtgggcgtgaagagcaggtag

SEQ ID NO: 172421 - DNA, 978 bp, synthetic construct
  misc_feature 1..978: note = Description of Artificial Sequence: Synthetic coding sequence
  source 1..978: mol_type = other DNA
atggccacccggcggctgacagatgccttcctgctgctgaggaacaacagcatccagaaccggcagctgctggccgagcaggtgagcagccacatcaccagcagccccctgcacagccgcagcattgctgctgagctggatgagctggctgatgacaggatggccctggtgtctggcatcagcctggaccctgaggccgccatcggcgtgaccaagaggcccccacccaagtgggtggatggagtggatgagatccagtatgatgtgggccgcatcaagcagaagatgaaggagctggccagcctgcatgacaagcacctgaaccggcccaccctggatgacagcagcgaggaggagcacgccatcgagatcaccacccaggagatcacccagctgttccaccgctgccagagagctgtgcaggccctgcccagccgggcccgggcctgcagcgagcaggagggccgcctgctgggcaatgtggtggccagcctggcccaggccctgcaggagctgagcaccagcttcagacatgcccagagcggctacctgaagaggatgaagaaccgggaggagaggagccagcacttctttgacacctctgtgcccctgatggatgatggagatgacaacaccctgtaccaccggggcttcacagaggaccagctggtgctggtggagcagaacaccctgatggtggaggagcgggagcgggagatccggcagatcgtgcagagcatcagtgacctgaatgagatcttccgggacctgggcgccatgattgtggagcagggcaccgtgctggacagaattgactacaacgtggagcagagctgcatcaagacagaagatggcctgaagcagctgcacaaggccgagcagtaccagaagaagaacaggaagatgctggtgatcctgatcctgtttgtgatcatcatcgtgctgattgtggtgctggtgggcgtgaagagcaggtag

SEQ ID NO: 172422 - DNA, 366 bp, synthetic construct
  misc_feature 1..366: note = Description of Artificial Sequence: Synthetic coding sequence
  source 1..366: mol_type = other DNA
atggccctggtgtctggcatcagcctggaccctgaggccgccatcggcgtgaccaagaggcccccacccaagtgggtggatggagtggatgagatccagtatgatgtgggccgcatcaagcagaagatgaaggagctggccagcctgcatgacaagcacctgaaccggcccaccctggatgacagcagcgaggaggagcacgccatcgagatcaccacccaggagatcacccagctgttccaccgctgccagagagctgtgcaggccctgcccagccgggcccgggcctgcagcgagcaggagggccgcctgctgggcaatgtggtggccagcctggcccaggccctgcaggagctgagcacctag

SEQ ID NO: 172423 - DNA, 420 bp, synthetic construct
  misc_feature 1..420: note = Description of Artificial Sequence: Synthetic coding sequence
  source 1..420: mol_type = other DNA
atgaagaaccgggaggagaggagccagcacttctttgacacctctgtgcccctgatggatgatggagatgacaacaccctgtaccaccggggcttcacagaggaccagctggtgctggtggagcagaacaccctgatggtggaggagcgggagcgggagatccggcagatcgtgcagagcatcagtgacctgaatgagatcttccgggacctgggcgccatgattgtggagcagggcaccgtgctggacagaattgactacaacgtggagcagagctgcatcaagacagaagatggcctgaagcagctgcacaaggccgagcagtaccagaagaagaacaggaagatgctggtgatcctgatcctgtttgtgatcatcatcgtgctgattgtggtgctggtgggcgtgaagagcaggtag

SEQ ID NO: 172424 - DNA, 660 bp, synthetic construct
  misc_feature 1..660: note = Description of Artificial Sequence: Synthetic coding sequence
  source 1..660: mol_type = other DNA
ggcatcagcctggaccctgaggccgccatcggcgtgaccaagaggcccccacccaagtgggtggatggagtggatgagatccagtatgatgtgggccgcatcaagcagaagatgaaggagctggccagcctgcatgacaagcacctgaaccggcccaccctggatgacagcagcgaggaggagcacgccatcgagatcaccacccaggagatcacccagctgttccaccgctgccagagagctgtgcaggccctgcccagccgggcccgggcctgcagcgagcaggagggccgcctgctgggcaatgtggtggccagcctggcccaggccctgcaggagctgagcaccagcttcagacatgcccagagcggctacctgaagaggatgaagaaccgggaggagaggagccagcacttctttgacacctctgtgcccctgatggatgatggagatgacaacaccctgtaccaccggggcaccgtgctggacagaattgactacaacgtggagcagagctgcatcaagacagaagatggcctgaagcagctgcacaaggccgagcagtaccagaagaagaacaggaagatgctggtgatcctgatcctgtttgtgatcatcatcgtgctgattgtggtgctggtgggcgtgaagagcaggtag

SEQ ID NO: 172425 - DNA, 369 bp, synthetic construct
  misc_feature 1..369: note = Description of Artificial Sequence: Synthetic coding sequence
  source 1..369: mol_type = other DNA
atggccctggtgtctggcatcagcctggaccctgaggccgccatcggcgtgaccaagaggcccccacccaagtgggtggatggagtggatgagatccagtatgatgtgggccgcatcaagcagaagatgaaggagctggccagcctgcatgacaagcacctgaaccggcccaccctggatgacagcagcgaggaggagcacgccatcgagatcaccacccaggagatcacccagctgttccaccgctgccagagagctgtgcaggccctgcccagccgggcccgggcctgcagcgagcaggagggccgcctgctgggcaatgtggtggccagcctggcccaggccctgcaggagctgagcaccagctag

SEQ ID NO: 172426 - DNA, 609 bp, synthetic construct
  misc_feature 1..609: note = Description of Artificial Sequence: Synthetic coding sequence
  source 1..609: mol_type = other DNA
atggccacccggcggctgacagatgccttcctgctgctgaggaacaacagcatccagaaccggcagctgctggccgagcaggagctggatgagctggctgatgacaggatggccctggtgtctggcatcagcctggaccctgaggccgccatcggcgtgaccaagaggcccccacccaagtgggtggatggagtggatgagatccagtatgatgtgggccgcatcaagcagaagatgaaggagctggccagcctgcatgacaagcacctgaaccggcccaccctggatgacagcagcgaggaggagcacgccatcgagatcaccacccaggagatcacccagctgttccaccgctgccagagagctgtgcaggccctgcccagccgggcccgggcctgcagcgagcaggagggccgcctgctgggcaatgtggtggccagcctggcccaggccctgcaggagctgagcaccagcttcagacatgcccagagcggctacctgaagaggatgaagaaccgggaggagaggagccagcacttctttgacacctctgtgcccctgatggatgatggagatgacaacaccctgtaccacaggaggaccagctag

SEQ ID NO: 172427 - DNA, 909 bp, synthetic construct
  misc_feature 1..909: note = Description of Artificial Sequence: Synthetic coding sequence
  source 1..909: mol_type = other DNA
atgtctgaagatgaggagaaggtgaagctgcggcggctggagcccgccatccagaagttcatcaagatcgtcatccccacagacctggagcggctgaggaagcaccagatcaacatcgagaagtaccagcgctgccgcatctgggacaagctgcacgaggagcacatcaatgccggccgcacagtgcagcagctgcggagcaacatccgggagattgagaagctgtgcctgaaggtgaggaaggatgacctggtgctgctgaagaggatgattgatcctgtgaaggaggaggccagcgctgccacagctgagttcctgcagctgcacctggagagcgtggaggagctgaagaagcagttcaatgatgaggagaccctgctgcagccccccctgaccaggtccatgacagtgggcggggccttccacaccacagaggccgaggccagcagccagagcctgacccagatctatgccctgcctgagatcccccaggaccagaatgctgctgagagctgggagaccctggaggccgacctgattgagctgagccagctggtgacagacttcagcctgctggtgaacagccagcaggagaagattgacagcattgctgaccacgtgaacagcgctgctgtgaatgtggaggagggcaccaagaacctgggcaaggccgccaagtacaagctggccgccctgcctgtggccggggccctgattggaggcatggtgggcggccccatcggcctgctggccggcttcaaggtggccggcattgctgctgccctgggcggcggcgtgctgggcttcaccggcggcaagctgatccagaggaagaagcagaagatgatggagaagctgaccagcagctgcccagacctgcccagccagacagacaagaagtgcagctag

SEQ ID NO: 172428 - DNA, 909 bp, synthetic construct; identical to SEQ ID NO: 172427
  misc_feature 1..909: note = Description of Artificial Sequence: Synthetic coding sequence
  source 1..909: mol_type = other DNA

SEQ ID NO: 172429 - DNA, 126 bp, synthetic construct
  misc_feature 1..126: note = Description of Artificial Sequence: Synthetic coding sequence
  source 1..126: mol_type = other DNA
atgtctgaagatgaggagaaggtgaagctgcggcggctggagcccgccatccagaagttcatcaagatcgtcatccccacagacctggagcggctgaggaagcaccagatcaacatcgagaagtag

SEQ ID NO: 172430 - DNA, 126 bp, synthetic construct; identical to SEQ ID NO: 172429
  misc_feature 1..126: note = Description of Artificial Sequence: Synthetic coding sequence
  source 1..126: mol_type = other DNA

SEQ ID NO: 172431 - DNA, 909 bp, synthetic construct; identical to SEQ ID NO: 172427
  misc_feature 1..909: note = Description of Artificial Sequence: Synthetic coding sequence
  source 1..909: mol_type = other DNA

SEQ ID NO: 172432 - DNA, 636 bp, synthetic construct
  misc_feature 1..636: note = Description of Artificial Sequence: Synthetic coding sequence
  source 1..636: mol_type = other DNA
atgaggctcttcctgtggaatgctgtgctgaccctgtttgtgaccagcctcatcggggccctgatccctgagcctgaggtgaagattgaggtgctgcagaagcccttcatctgccacaggaagaccaagggcggggacctgatgctggtgcactatgagggctacctggagaaggatggcagcctcttccacagcacccacaagcacaacaacggccagcccatctggttcaccctgggcatcctggaggccctgaagggctgggaccagggcctgaagggcatgtgtgtgggggagaagaggaagctgatcatccccccagccctgggctacggcaaggagggcaagggcaagatccccccagagagcaccctcatcttcaacatcgacctgctggagatcagaaatggccccaggagccatgagagcttccaggagatggacctgaatgatgactggaagctgagcaaggatgaggtgaaggcctacctgaagaaggagtttgagaagcatggagctgtggtgaatgaaagccaccatgatgccctggtggaggacatctttgacaaggaggatgaggacaaggatggcttcatcagcgcccgggagttcacctacaagcatgatgagctgtag

SEQ ID NO: 172433 - DNA, 783 bp, synthetic construct
  misc_feature 1..783: note = Description of Artificial Sequence: Synthetic coding sequence
  source 1..783: mol_type = other DNA
atgaaggacaggacccaggagctgaggacagccaaggacagtgatgatgatgatgatgtggccgtgacagtggaccgggaccgcttcatggatgagttctttgagcaggtggaggagatccggggcttcatcgacaagattgctgaaaatgtggaggaggtgaagaggaagcacagcgccatcctggccagccccaacccagatgagaagaccaaggaggagctggaggagctgatgtctgacatcaagaagacagccaacaaggtgcgcagcaagctgaagagcattgagcagagcattgagcaggaggagggcctgaacagaagcagcgctgacctgcgcatcaggaagacccagcacagcaccctgagcaggaagtttgtggaggtgatgtctgagtacaatgccacccagagcgactaccgggagcgctgcaagggccgcatccagaggcagctggagatcaccggccgcaccaccaccagcgaggagctggaggacatgctggagagcggcaacccagccatctttgccagcggcatcatcatggacagcagcatcagcaagcaggccctgtctgaaattgagaccaggcacagcgagatcatcaagctggagaacagcatccgggagctgcatgacatgttcatggacatggccatgctggtggagagccagccccagggcgccttcctgaagagctgcccagagccccagcccaaccctgaggagggcgccctgtggagcagcggggcccctggccctgctggaagagatgactag

SEQ ID NO: 172434 - DNA, 516 bp, synthetic construct
  misc_feature 1..516: note = Description of Artificial Sequence: Synthetic coding sequence
  source 1..516: mol_type = other DNA
atgaaggacaggacccaggagctgaggacagccaaggacagtgatgatgatgatgatgtggccgtgacagtggaccgggaccgcttcatggatgagttctttgagcaggtggaggtgatgtctgagtacaatgccacccagagcgactaccgggagcgctgcaagggccgcatccagaggcagctggagatcactggaagaaccaccaccagcgaggagctggaggacatgctggagagcggcaacccagccatctttgccagcggcatcatcatggacagcagcatcagcaagcaggccctgtctgaaattgagaccaggcacagcgagatcatcaagctggagattgagtacaacgtggagcacgctgtggactatgtggagagagctgtgtctgacaccaagaaggctgtgaagtaccagagcaaggcccggaggaagaagatcatgatcatcatctgctgcgtcatcctgggcatcgtcatcgccagcacagtgggcggcatctttgcctag

SEQ ID NO: 172435 - DNA, 756 bp, synthetic construct
  misc_feature 1..756: note = Description of Artificial Sequence: Synthetic coding sequence
  source 1..756: mol_type = other DNA
atgaaggacaggacccaggagctgaggacagccaaggacagtgatgatgatgatgatgtggccgtgacagtggaccgggaccgcttcatggatgagttctttgagcaggtggaggagatccggggcttcatcgacaagattgctgaaaatgtggaggaggtgaagaggaagcacagcgccatcctggccagccccaacccagatgagaagaccaaggaggagctggaggagctgatgtctgacatcaagaagacagccaacaaggtgcgcagcaagctgaagagcattgagcagagcattgagcaggaggagggcctgaacagaagcagcgctgacctgcgcatcaggaagacccagcacagcaccctgagcaggaagtttgtggaggtgatgtctgagtacaatgccacccagagcgactaccgggagcgctgcaagggccgcatccagaggcagctggagatcaccggccgcaccaccaccagcgaggagctggaggacatgctggagagcggcaacccagccatctttgccagcggcatcatcatggacagcagcatcagcaagcaggccctgtctgaaattgagaccaggcacagcgagatcatcaagctggagaacagcatccgggagctgcatgacatgttcatggacatggccatgctggtggagagccagaccatgtggaggggcccctgcctgaccccaagaagacccagcagcacccgggccaggagagctggcaggaagagctag

SEQ ID NO: 172436 - DNA, 1053 bp, synthetic construct
  misc_feature 1..1053: note = Description of Artificial Sequence: Synthetic coding sequence
  source 1..1053: mol_type = other DNA
atgttcatcaagggccgggccccccgggccccaccccgggagcggcggcgggccacccggggcggcctgcggcaggtggtggccccaccccgggccctgggcagcaccagccggccccacttccggcgggcctctgtgtgcagaagacgctgcaggaagagcggcggcctgctggccgccagcaggaagatggctgctgctgctgtgaatggagctgctggcttcagcagcagcggccctgctgccaccagcggggctgtgctgcaggccgccaccggcatgtatgagcagctgaagggggagtggaacaggaagagccccaacctgagcaaatgtggggaggagctgggccgcctgaagctggtgctgctggagctgaacttcctgcccaccaccggcaccaagctgaccaagcagcagctgatcctggcccgggacatcctggagatcggggcccagtggagcatcctgaggaaggacatccccagctttgagcgctacatggcccagctgaagtgctactactttgactacaaggagcagctgcctgagagcgcctacatgcaccagctgctgggcctgaacctgctcttcctgctgagccagaacagagtggccgagttccacacagagctggagcggctgcctgccaaggacatccagaccaacgtgtacatcaagcaccctgtgtccctggagcagtacctgatggagggcagctacaacaaggtgttcctggccaagggcaacatcccagctgagagctacaccttcttcatcgacatcctgctggacaccatcagagatgaaattgctggctgcatcgagaaggcctatgagaagatcctcttcacagaggccacccgcatcctcttcttcaacacccccaagaagatgacagattatgccaagaagaggggctgggtgctgggccccaacaactactacagctttgccagccagcagcagaagccagaggacaccaccatccccagcacagagctggccaagcaggtgattgaatatgcccggcagctggagatgattgtgtag

SEQ ID NO: 172437 - DNA, 864 bp, synthetic construct
  misc_feature 1..864: note = Description of Artificial Sequence: Synthetic coding sequence
  source 1..864: mol_type = other DNA
atgagggaccggctgcctgacctgacagcctgcaggaagaatgatgatggagacacagtggtggtggtggagaaggaccacttcatggatgacttcttccaccaggtggaggagatccggaacagcattgacaagatcacccagtatgtggaggaggtgaagaagaaccacagcatcatcctgagcgcccccaaccctgagggcaagatcaaggaggagctggaggacctgaacaaggagatcaagaagacagccaacaagatccgggccaagctgaaggccatcgagcagagctttgaccaggatgagagcggcaacagaacatctgtggacctgcgcatccggaggacccagcacagcgtgctgagcaggaagtttgtggaggccatggccgagtacaatgaggcccagaccctcttccgggagaggagcaagggccgcatccagaggcagctggagatcactggaagaaccaccacagatgatgagctggaggagatgctggagagcggcaagcccagcatcttcaccagtgacatcatcagtgacagccagatcacccggcaggccctgaatgaaattgagagccgccacaaggacatcatgaagctggagaccagcatccgggagctgcacgagatgttcatggacatggccatgtttgtggagacccagggcgagatgatcaacaacatcgagagaaatgtgatgaatgccacagattatgtggagcacgccaaggaggagaccaagaaggccatcaagtaccagagcaaggcccggaggaagctgatgttcatcatcatctgtgtgattgtgctgctggtgatcctgggcatcatcctggccaccaccctgtcctag

SEQ ID NO: 172438 - DNA, 867 bp, synthetic construct
  misc_feature 1..867: note = Description of Artificial Sequence: Synthetic coding sequence
  source 1..867: mol_type = other DNA
atgagggaccggctgcctgacctgacagcctgcaggaagaatgatgatggagacacagtggtggtggtggagaaggaccacttcatggatgacttcttccaccaggtggaggagatccggaacagcattgacaagatcacccagtatgtggaggaggtgaagaagaaccacagcatcatcctgagcgcccccaaccctgagggcaagatcaaggaggagctggaggacctgaacaaggagatcaagaagacagccaacaagatccgggccaagctgaaggccatcgagcagagctttgaccaggatgagagcggcaacagaacatctgtggacctgcgcatccggaggacccagcacagcgtgctgagcaggaagtttgtggaggccatggccgagtacaatgaggcccagaccctcttccgggagaggagcaagggccgcatccagaggcagctggagatcactggaagaaccaccacagatgatgagctggaggagatgctggagagcggcaagcccagcatcttcaccagtgacatcatcagtgacagccagatcacccggcaggccctgaatgaaattgagagccgccacaaggacatcatgaagctggagaccagcatccgggagctgcacgagatgttcatggacatggccatgtttgtggagacccagggcgagatgatcaacaacatcgagagaaatgtgatgaatgccacagattatgtggagcacgccaaggaggagaccaagaaggccatcaagtaccagagcaaggcccggaggaagaagtggatcatcatcgctgtgtctgtggtgctggtggccatcatcgccctgatcatcggcctgtctgtgggcaagtag

SEQ ID NO: 172439 - DNA, 777 bp, synthetic construct
  misc_feature 1..777: note = Description of Artificial Sequence: Synthetic coding sequence
  source 1..777: mol_type = other DNA
atggatgagttcttcagcgagattgaggagacccggctgaacatcgacaagatcagcgagcacgtggaggaggccaagaagctgtacagcatcatcctgagcgcccccatccctgagcccaagaccaaggatgacctggagcagctgaccacagagatcaagaagagggccaacaacgtgaggaacaagctgaagtccatggagaagcacattgaagaagatgaggtgcgcagcagcgctgacctgcgcatcaggaagagccagcacagcgtgctgagcaggaagtttgtggaggtgatgaccaagtacaatgaggcccaggtggacttccgggagaggagcaagggccgcatccagaggcagctggagatcaccgggaagaagaccacagatgaggagctggaggagatgctggagagcggcaacccagccatcttcaccagcggcatcatcgacagccagatcagcaagcaggccctgtctgaaattgagggccgccacaaggacatcgtgcggctggagagcagcatcaaggagctgcatgacatgttcatggacatcgccatgctggtggagaaccagggcgagatgctggacaacatcgagctgaatgtgatgcacacagtggaccacgtggagaaggccagagatgagaccaagaaggctgtgaagtaccagagccaggccaggaagaagctgatcatcatcatcgtgctggtggtggtgctgctgggcatcctggccctgatcatcggcctgtctgtgggcctgaactag

SEQ ID NO: 172440 - DNA, 870 bp, synthetic construct
  misc_feature 1..870: note = Description of Artificial Sequence: Synthetic coding sequence
  source 1..870: mol_type = other DNA
atgaaggaccggctggagcagctgaaggccaagcagctgacccaggatgatgacacagatgctgtggagatcgccatcgacaacacagccttcatggatgagttcttcagcgagattgaggagacccggctgaacatcgacaagatcagcgagcacgtggaggaggccaagaagctgtacagcatcatcctgagcgcccccatccctgagcccaagaccaaggatgacctggagcagctgaccacagagatcaagaagagggccaacaacgtgaggaacaagctgaagtccatggagaagcacatcgaggaggatgaggtgcgcagcagcgctgacctgcgcatcaggaagagccagcacagcgtgctgagcaggaagtttgtggaggtgatgaccaagtacaatgaggcccaggtggacttccgggagaggagcaagggccgcatccagaggcagctggagatcaccgggaagaagaccacagatgaggagctggaggagatgctggagagcggcaacccagccatcttcaccagcggcatcatcgacagccagatcagcaagcaggccctgtctgaaattgagggccgccacaaggacatcgtgcggctggagagcagcatcaaggagctgcatgacatgttcatggacatcgccatgctggtggagaaccagggcgagatgctggacaacatcgagctgaatgtgatgcacacagtggaccacgtggagaaggccagagatgagaccaagaaggctgtgaagtaccagagccaggccaggaagaagctgatcatcatcatcgtgctggtggtggtgctgctgggcatcctggccctgatcatcggcctgtctgtgggcctgaactag

SEQ ID NO: 172441 - DNA, 543 bp, synthetic construct
  misc_feature 1..543: note = Description of Artificial Sequence: Synthetic coding sequence
  source 1..543: mol_type = other DNA
atggagaagcacattgaagaagatgaggtgcgcagcagcgctgacctgcgcatcaggaagagccagcacagcgtgctgagcaggaagtttgtggaggtgatgaccaagtacaatgaggcccaggtggacttccgggagaggagcaagggccgcatccagaggcagctggagatcaccgggaagaagaccacagatgaggagctggaggagatgctggagagcggcaacccagccatcttcaccagcggcatcatcgacagccagatcagcaagcaggccctgtctgaaattgagggccgccacaaggacatcgtgcggctggagagcagcatcaaggagctgcatgacatgttcatggacatcgccatgctggtggagaaccagggctccatgattgacagaattgagaacaacatggaccagagcgtgggctttgtggagagagctgtggccgacaccaagaaggctgtgaagtaccagagcgaggcccggaggaagctgatcagcctgcagacaggagtggccaccctggtgttcagatag

SEQ ID NO: 172442 - DNA, 834 bp, synthetic construct
  misc_feature 1..834: note = Description of Artificial Sequence: Synthetic coding sequence
  source 1..834: mol_type = other DNA
atgaaggaccggctggagcagctgaaggccaagcagctgacccaggatgatgacacagatgctgtggagatcgccatcgacaacacagccttcatggatgagttcttcagcgagattgaggagacccggctgaacatcgacaagatcagcgagcacgtggaggaggccaagaagctgtacagcatcatcctgagcgcccccatccctgagcccaagaccaaggatgacctggagcagctgaccacagagatcaagaagagggccaacaacgtgaggaacaagctgaagtccatggagaagcacatcgaggaggatgaggtgcgcagcagcgctgacctgcgcatcaggaagagccagcacagcgtgctgagcaggaagtttgtggaggtgatgaccaagtacaatgaggcccaggtggacttccgggagaggagcaagggccgcatccagaggcagctggagatcaccgggaagaagaccacagatgaggagctggaggagatgctggagagcggcaacccagccatcttcaccagcggcatcatcgacagccagatcagcaagcaggccctgtctgaaattgagggccgccacaaggacatcgtgcggctggagagcagcatcaaggagctgcatgacatgttcatggacatcgccatgctggtggagaaccagggcgagatgctggacaacatcgagctgaatgtgatgcacacagtggaccacgtggagaaggccagagatgagaccaagaaggctgtgaagtaccagagccaggccaggaagaagctgatcagcctgcagacaggagtggccaccctggtgttcagatag

SEQ ID NO: 172443 - DNA, 231 bp, synthetic construct
  misc_feature 1..231: note = Description of Artificial Sequence: Synthetic coding sequence
  source 1..231: mol_type = other DNA
atgttcatggacatcgccatgctggtggagaaccagggcgagatgctggacaacatcgagctgaatgtgatgcacacagtggaccacgtggagaaggccagagatgagaccaagaaggctgtgaagtaccagagccaggccaggaagaagctgatcatcatcatcgtgctggtggtggtgctgctgggcatcctggccctgatcatcggcctgtctgtgggcctgaactag

SEQ ID NO: 172444 - DNA, 759 bp, synthetic construct
  misc_feature 1..759: note = Description of Artificial Sequence: Synthetic coding sequence
  source 1..759: mol_type = other DNA
atgaaggaccggctggagcagctgaaggccaagcagctgacccaggatgatgacacagatgctgtggagatcgccatcgacaacacagccttcatggatgagttcttcagcgagattgaggagacccggctgaacatcgacaagatcagcgagcacgtggaggaggccaagaagctgtacagcatcatcctgagcgcccccatccctgagcccaagaccaaggatgacctggagcagctgaccacagagatcaagaagagggccaacaacgtgaggaacaagctgaagtccatggagaagcacatcgaggaggatgaggtgcgcagcagcgctgacctgcgcatcaggaagagccagcacagcgtgctgagcaggaagtttgtggaggtgatgaccaagtacaatgaggcccaggtggacttccgggagaggagcaagggccgcatccagaggcagctggagatcaccgggaagaagaccacagatgaggagctggaggagatgctggagagcggcaacccagccatcttcaccagcggcatcatcgacagccagatcagcaagcaggccctgtctgaaattgagggccgccacaaggacatcgtgcggctggagagcagcatcaaggagctgcatgacatgttcatggacatcgccatgctggtggagaaccagaagctgatcatcatcatcgtgctggtggtggtgctgctgggcatcctggccctgatcatcggcctgtctgtgggcctgaactag

SEQ ID NO: 172445 - DNA, 894 bp, synthetic construct
  misc_feature 1..894: note = Description of Artificial Sequence: Synthetic coding sequence
  source 1..894: mol_type = other DNA
atgagggacaggacccatgagctgcggcagggagatgacagcagtgatgaggaggacaaggagcgggtggccctggtggtgcaccctggaacagcccggctgggcagcccagatgaggagttcttccacaaggtgaggaccatccggcagaccatcgtgaagctgggcaacaaggtgcaggagctggagaagcagcaggtgaccatcctggccacccccctgcctgaggagagcatgaagcaggagctgcagaacctgagagatgagatcaagcagctgggccgggagatccggctgcagctgaaggccatcgagccccagaaggaggaggctgatgagaactacaacagcgtgaacaccaggatgaggaagacccagcacggcgtgctgagccagcagtttgtggagctgatcaacaagtgcaacagcatgcagagcgagtaccgggagaagaatgtggagcgcatccggcggcagctgaagatcaccaatgccggcatggtgtctgatgaggagctggagcagatgctggacagcggccagagcgaggtgtttgtgagcaacatcctgaaggacacccaggtgacccggcaggccctgaatgagatcagcgcccggcacagcgagatccagcagctggagaggagcatccgggagctgcatgacatcttcaccttcctggccacagaggtggagatgcagggcgagatgatcaacagaattgagaagaacatcctgagcagcgctgactatgtggagcggggccaggagcacgtgaagacagccctggagaaccagaagaaggccaggaagaagaaggtgctgattgccatctgtgtgtccatcaccgtggtgctgctggccgtcatcattggagtgacagtggtgggctag

SEQ ID NO: 172446 - DNA, 888 bp, synthetic construct
  misc_feature 1..888: note = Description of Artificial Sequence: Synthetic coding sequence
  source 1..888: mol_type = other DNA
atgggcatgacagcccggaccaagaggaccaggagcggcagccgctggtggtgcacccgggcccggcacggctggggcgcccggaccaggagcagcagcaccagccccctgggccaccccccccaggtgaggaccatccggcagaccatcgtgaagctgggcaacaaggtgcaggagctggagaagcagcaggtgaccatcctggccacccccctgcctgaggagagcatgaagcaggagctgcagaacctgagagatgagatcaagcagctgggccgggagatccggctgcagctgaaggccatcgagccccagaaggaggaggctgatgagaactacaacagcgtgaacaccaggatgaggaagacccagcacggcgtgctgagccagcagtttgtggagctgatcaacaagtgcaacagcatgcagagcgagtaccgggagaagaatgtggagcgcatccggcggcagctgaagatcaccaatgccggcatggtgtctgatgaggagctggagcagatgctggacagcggccagagcgaggtgtttgtgagcaacatcctgaaggacacccaggtgacccggcaggccctgaatgagatcagcgcccggcacagcgagatccagcagctggagaggagcatccgggagctgcatgacatcttcaccttcctggccacagaggtggagatgcagggcgagatgatcaacagaattgagaagaacatcctgagcagcgctgactatgtggagcggggccaggagcacgtgaagacagccctggagaaccagaagaaggccaggaagaagaaggtgctgattgccatctgtgtgtccatcaccgtggtgctgctggccgtcatcattggagtgacagtggtgggctag

SEQ ID NO: 172447 - DNA, 1068 bp, synthetic construct
  misc_feature 1..1068: note = Description of Artificial Sequence: Synthetic coding sequence
  source 1..1068: mol_type = other DNA
atgatccccaggaagagatatggcagcaagaacacagaccagggcgtgtacctgggcctgagcaagacccaggtgctgagccctgccacagctggcagcagcagcagtgacatcgcccccctgcccccacctgtgaccctggtgcccccacctccagacaccatgagctgccgggacaggacccaggagttcctgagcgcctgcaagagcctgcagacccggcagaatggcatccagaccaacaagccagccctgcgggctgtgcggcagaggtctgagttcaccctgatggccaagagaattggcaaggacctgagcaacacctttgccaagctggagaagctgaccatcctggccaagaggaagagcctgtttgatgacaaggctgtggagattgaggagctgacctacatcatcaagcaggacatcaacagcctgaacaagcagatcgcccagctgcaggactttgtgcgggccaagggcagccagagcggccgccacctgcagacccacagcaacaccatcgtggtgtccctgcagagcaagctggcctccatgagcaatgacttcaagtctgtgctggaggtgaggacagagaacctgaagcagcagaggagcagaagagagcagttcagccgggcccctgtgtctgccctgcccctggcccccaaccacctgggcggcggcgctgtggtgctgggcgctgagagccacgccagcaaggatgtggccatcgacatgatggacagcaggaccagccagcagctgcagctgattgatgagcaggacagctacatccagagcagagctgacaccatgcagaacatcgagagcaccatcgtggagctgggcagcatcttccagcagctggcccacatggtgaaggagcaggaggagaccatccagagaattgatgaaaatgtgctgggcgcccagctggatgtggaggccgcccacagcgagatcctgaagtacttccagagcgtgaccagcaaccgctggctgatggtgaagatcttcctgatcctgattgtgttcttcatcatctttgtggtgttcctggcctag

SEQ ID NO: 172448 - DNA, 966 bp, synthetic construct
  misc_feature 1..966: note = Description of Artificial Sequence: Synthetic coding sequence
  source 1..966: mol_type = other DNA
atgatccccaggaagagatatggcagcaagaacacagaccagggcgtgtacctgggcctgagcaagacccaggtgctgagccctgccacagctggcagcagcagcagtgacatcgcccccctgcccccacctgtgaccctggtgcccccacctccagacaccatgagctgccgggacaggacccaggagttcctgagcgcctgcaagagcctgcagacccggcagaatggcatccagaccaacaagccagccctgcgggctgtgcggcagaggtctgagttcaccctgatggccaagagaattggcaaggacctgagcaacacctttgccaagctggagaagctgaccatcctggccaagaggaagagcctgtttgatgacaaggctgtggagattgaggagctgacctacatcatcaagcaggacatcaacagcctgaacaagcagatcgcccagctgcaggactttgtgcgggccaagggcagccagagcggccgccacctgcagacccacagcaacaccatcgtggtgtccctgcagagcaagctggcctccatgagcaatgacttcaagtctgtgctggaggtgaggacagagaacctgaagcagcagaggagcagaagagagcagttcagccgggcccctgtgtctgccctgcccctggcccccaaccacctgggcggcggcgctgtggtgctgggcgctgagagccacgccagcaaggatgtggccatcgacatgatggacagcaggaccagccagcagctgcagctgattgatgagcaggacagctacatccagagcagagctgacaccatgcagaacatcgagagcaccatcgtggagctgggcagcatcttccagcagctggcccacatggtgaaggagcaggaggagaccatccagagcgtgctgctcttccccctgctgcctgccctgagccctggcagcaccaggacctgctag

SEQ ID NO: 172449 - DNA, 906 bp, synthetic construct
  misc_feature 1..906: note = Description of Artificial Sequence: Synthetic coding sequence
  source 1..906: mol_type = other DNA
atgagctgccgggacaggacccaggagttcctgagcgcctgcaagagcctgcagacccggcagaatggcatccagaccaacaagccagccctgcgggctgtgcggcagaggtctgagttcaccctgatggccaagagaattggcaaggacctgagcaacacctttgccaagctggagaagctgaccatcctggccaagaggaagagcctgtttgatgacaaggctgtggagattgaggagctgacctacatcatcaagcaggacatcaacagcctgaacaagcagatcgcccagctgcaggactttgtgcgggccaagggcagccagagcggccgccacctgcagacccacagcaacaccatcgtggtgtccctgcagagcaagctggcctccatgagcaatgacttcaagtctgtgctggaggtgaggacagagaacctgaagcagcagaggagcagaagagagcagttcagccgggcccctgtgtctgccctgcccctggcccccaaccacctgggcggcggcgctgtggtgctgggcgctgagagccacgccagcaaggatgtggccatcgacatgatggacagcaggaccagccagcagctgcagctgattgatgagcaggacagctacatccagagcagagctgacaccatgcagaacatcgagagcaccatcgtggagctgggcagcatcttccagcagctggcccacatggtgaaggagcaggaggagaccatccagagaattgatgaaaatgtgctgggcgcccagctggatgtggaggccgcccacagcgagatcctgaagtacttccagagcgtgaccagcaaccgctggctgatggtgaagatcttcctgatcctgattgtgttcttcatcatctttgtggtgttcctggcctag

SEQ ID NO: 172450 - DNA, 780 bp, synthetic construct
  misc_feature 1..780: note = Description of Artificial Sequence: Synthetic coding sequence
  source 1..780: mol_type = other DNA
atggccaagagaattggcaaggacctgagcaacacctttgccaagctggagaagctgaccatcctggccaagaggaagagcctgtttgatgacaaggctgtggagattgaggagctgacctacatcatcaagcaggacatcaacagcctgaacaagcagatcgcccagctgcaggactttgtgcgggccaagggcagccagagcggccgccacctgcagacccacagcaacaccatcgtggtgtccctgcagagcaagctggcctccatgagcaatgacttcaagtctgtgctggaggtgaggacagagaacctgaagcagcagaggagcagaagagagcagttcagccgggcccctgtgtctgccctgcccctggcccccaaccacctgggcggcggcgctgtggtgctgggcgctgagagccacgccagcaaggatgtggccatcgacatgatggacagcaggaccagccagcagctgcagctgattgatgagcaggacagctacatccagagcagagctgacaccatgcagaacatcgagagcaccatcgtggagctgggcagcatcttccagcagctggcccacatggtgaaggagcaggaggagaccatccagagaattgatgaaaatgtgctgggcgcccagctggatgtggaggccgcccacagcgagatcctgaagtacttccagagcgtgaccagcaaccgctggctgatggtgaagatcttcctgatcctgattgtgttcttcatcatctttgtggtgttcctggcctag

SEQ ID NO: 172451 - DNA, 720 bp, synthetic construct
  misc_feature 1..720: note = Description of Artificial Sequence: Synthetic coding sequence
  source 1..720: mol_type = other DNA
atgagctacaccccaggagtgggcggggaccctgcccagctggcccagaggatcagcagcaacatccagaagatcacccagtgcagcgtggagatccagaggaccctgaaccagctgggcaccccccaggacagccctgagctgcggcagcagctgcagcagaagcagcagtacaccaaccagctggccaaggagacagacaagtacatcaaggagtttggcagcctgcccaccaccccatctgagcagaggcagaggaagatccagaaggaccggctggtggccgagttcaccaccagcctgaccaacttccagaaggtgcagaggcaggccgctgagcgggagaaggagtttgtggcccgggtgcgggccagcagccgggtgtctggcagcttccctgaggacagcagcaaggagaggaacctggtgtcctgggagagccagacccagccccaggtgcaggtgcaggatgaggagatcacagaagatgacctgcggctcatccacgagcgggagagcagcatccggcagctggaggccgacatcatggacatcaatgagatcttcaaggacctgggcatgatgattcatgagcagggagatgtgattgacagcattgaggccaacgtggagaatgctgaggtgcacgtgcagcaggccaaccagcagctgagcagagctgctgactaccagaagaaggacagctgcatgctgatgtag

SEQ ID NO: 172452 - DNA, 786 bp, synthetic construct
  misc_feature 1..786: note = Description of Artificial Sequence: Synthetic coding sequence
  source 1..786: mol_type = other DNA
atgagctacaccccaggagtgggcggggaccctgcccagctggcccagaggatcagcagcaacatccagaagatcacccagtgcagcgtggagatccagaggaccctgaaccagctgggcaccccccaggacagccctgagctgcggcagcagctgcagcagaagcagcagtacaccaaccagctggccaaggagacagacaagtacatcaaggagtttggcagcctgcccaccaccccatctgagcagaggcagaggaagatccagaaggaccggctggtggccgagttcaccaccagcctgaccaacttccagaaggtgcagaggcaggccgctgagcgggagaaggagtttgtggcccgggtgcgggccagcagccgggtgtctggcagcttccctgaggacagcagcaaggagaggaacctggtgtcctgggagagccagacccagccccaggtgcaggtgcaggatgaggagatcacagaagatgacctgcggctcatccacgagcgggagagcagcatccggcagctggaggccgacatcatggacatcaatgagatcttcaaggacctgggcatgatgattcatgagcagggagatgtgattgacagcattgaggccaacgtggagaatgctgaggtgcacgtgcagcaggccaaccagcagctgagcagagctgctgactaccagaggaagagcaggaagaccctgtgcatcatcatcctgatcctggtgattggagtggccatcatcagcctcatcatctggggcctgaaccactag

SEQ ID NO: 172453 - DNA, 786 bp, synthetic construct; identical to SEQ ID NO: 172452
  misc_feature 1..786: note = Description of Artificial Sequence: Synthetic coding sequence
  source 1..786: mol_type = other DNA

SEQ ID NO: 172454 - DNA, 711 bp, synthetic construct
  misc_feature 1..711: note = Description of Artificial Sequence: Synthetic coding sequence
  source 1..711: mol_type = other DNA
atggccccagacccctggttcagcacctatgacagcacctgccagatcgcccaggagattgctgagaagatccagcagaggaaccagtatgaaagaaaaggagagaaggcccccaagctgactgtgaccatccgggccctgctgcagaacctgaaggagaagatcgccctgctgaaggacctgctgctgcgggctgtgtccacccaccagatcacccagctggagggggaccggcggcagaacctgctggatgacctggtgacccgggagcggctgctgctggccagcttcaagaatgaaggagctgagccagacctgatccgcagcagcctgatgtctgaggaggccaagagaggagcccccaacccctggctgtttgaggagcctgaggagacccggggcctgggctttgatgagatccggcagcagcagcagaagatcatccaggagcaggatgctggcctggatgccctgagcagcatcatcagccggcagaagcagatgggccaggagattggaaatgagctggatgagcagaatgagatcattgatgacctggccaacctggtggagaacacagatgagaagctgagaaatgagacccggcgggtgaacatggtggacaggaagagcgccagctgtggcatgatcatggtgatcctgctgctgctggtggccatcgtggtggtggccgtgtggcccaccaactag

SEQ ID NO: 172455 - DNA, 1785 bp, synthetic construct
  misc_feature 1..1785: note = Description of Artificial Sequence: Synthetic coding sequence
  source 1..1785: mol_type = other DNA
atggcccccatcggcctgaaggctgtggtgggggagaagatcatgcatgatgtgatcaagaaggtgaagaagaagggggagtggaaggtgctggtggtggaccagctgtccatgaggatgctgagcagctgctgcaagatgacagacatcatgacagagggcatcaccatcgtggaggacatcaacaagaggcgggagcccctgcccagcctggaggccgtgtacctgatcacccccagcgagaagtctgtgcacagcctcatcagtgacttcaaggaccccccaacagccaagtacagagctgcccacgtgttcttcacagacagctgcccagatgccctcttcaatgagctggtgaagagcagagctgccaaggtgatcaagaccctgacagagatcaacatcgccttcctgccctatgagagccaggtgtacagcctggacagcgctgacagcttccagagcttctacagcccccacaaggcccagatgaagaaccccatcctggagcggctggccgagcagatcgccaccctgtgtgccaccctgaaggagtacccagctgtgcgctacagaggagagtacaaggacaatgccctgctggcccagctgatccaggacaagctggatgcctacaaggcagatgaccccaccatgggagagggccctgacaaggcccggagccagctgctgatcctggaccggggctttgaccccagcagccctgtgctgcacgagctgaccttccaggccatgtcctatgacctgctgcccattgaaaatgatgtgtacaagtatgagaccagcggcattggagaggcccgggtgaaggaggtgctgctggatgaagatgatgacctgtggatcgccctgcggcacaagcacatcgccgaggtgtcccaggaggtgaccaggagcctgaaggacttcagcagcagcaagaggatgaacacaggagagaagaccaccatgagggacctgagccagatgctgaagaagatgccccagtaccagaaggagctgagcaagtacagcacccacctgcacctggccgaggactgcatgaagcactaccagggcaccgtggacaagctgtgccgggtggagcaggacctggccatgggcacagatgctgagggggagaagatcaaggaccccatgagggccatcgtgcccatcctgctggatgccaacgtgtccacctatgacaagatccgcatcatcctgctgtacatcttcctgaagaatggcatcacagaggagaacctgaacaagctgatccagcacgcccagatccccccagaagattctgagatcatcaccaacatggcccacctgggcgtgcccatcgtgacagacagcaccctgcggcggcgcagcaagccagagaggaaggagcgcatcagcgagcagacctaccagctgagccgctggacccccatcatcaaggacatcatggaggacaccatcgaggacaagctggacaccaagcactacccctacatcagcaccaggagcagcgccagcttcagcaccacagctgtgtctgcccgctatggccactggcacaagaacaaggcccctggagagtacagaagtggccccaggctcatcatcttcatcctgggcggcgtgtccctgaatgagatgagatgtgcctatgaggtgacccaggccaacgggaagtgggaggtgctgattggcagcacccacatcctgaccccccagaagctgctggacaccctgaagaagctgaacaagacagatgaggagatcagcagctag

SEQ ID NO: 172456 - DNA, 1674 bp, synthetic construct
  misc_feature 1..1674: note = Description of Artificial Sequence: Synthetic coding sequence
  source 1..1674: mol_type = other DNA
atgacagacatcatgacagagggcatcaccatcgtggaggacatcaacaagaggcgggagcccctgcccagcctggaggccgtgtacctgatcacccccagcgagaagtctgtgcacagcctcatcagtgacttcaaggaccccccaacagccaagtacagagctgcccacgtgttcttcacagacagctgcccagatgccctcttcaatgagctggtgaagagcagagctgccaaggtgatcaagaccctgacagagatcaacatcgccttcctgccctatgagagccaggtgtacagcctggacagcgctgacagcttccagagcttctacagcccccacaaggcccagatgaagaaccccatcctggagcggctggccgagcagatcgccaccctgtgtgccaccctgaaggagtacccagctgtgcgctacagaggagagtacaaggacaatgccctgctggcccagctgatccaggacaagctggatgcctacaaggcagatgaccccaccatgggagagggccctgacaaggcccggagccagctgctgatcctggaccggggctttgaccccagcagccctgtgctgcacgagctgaccttccaggccatgtcctatgacctgctgcccattgaaaatgatgtgtacaagtatgagaccagcggcattggagaggcccgggtgaaggaggtgctgctggatgaagatgatgacctgtggatcgccctgcggcacaagcacatcgccgaggtgtcccaggaggtgaccaggagcctgaaggacttcagcagcagcaagaggatgaacacaggagagaagaccaccatgagggacctgagccagatgctgaagaagatgccccagtaccagaaggagctgagcaagtacagcacccacctgcacctggccgaggactgcatgaagcactaccagggcaccgtggacaagctgtgccgggtggagcaggacctggccatgggcacagatgctgagggggagaagatcaaggaccccatgagggccatcgtgcccatcctgctggatgccaacgtgtccacctatgacaagatccgcatcatcctgctgtacatcttcctgaagaatggcatcacagaggagaacctgaacaagctgatccagcacgcccagatccccccagaagattctgagatcatcaccaacatggcccacctgggcgtgcccatcgtgacagacagcaccctgcggcggcgcagcaagccagagaggaaggagcgcatcagcgagcagacctaccagctgagccgctggacccccatcatcaaggacatcatggaggacaccatcgaggacaagctggacaccaagcactacccctacatcagcaccaggagcagcgccagcttcagcaccacagctgtgtctgcccgctatggccactggcacaagaacaaggcccctggagagtacagaagtggccccaggctcatcatcttcatcctgggcggcgtgtccctgaatgagatgagatgtgcctatgaggtgacccaggccaacgggaagtgggaggtgctgattggcagcacccacatcctgacccccaccaagttcctgatggacctgcggcacccagacttccgggagagcagccgggtgtcctttgaggaccaggcccccaccatggagtag

SEQ ID NO: 172457 - DNA, 1308 bp, synthetic construct
  misc_feature 1..1308: note = Description of Artificial Sequence: Synthetic coding sequence
  source 1..1308: mol_type = other DNA
atggcccccatcggcctgaaggctgtggtgggggagaagatcatgcatgatgtgatcaagaaggtgaagaagaagggggagtggaaggtgctggtggtggaccagctgtccatgaggatgctgagcagctgctgcaagatgacagacatcatgacagagggccctgacaaggcccggagccagctgctgatcctggaccggggctttgaccccagcagccctgtgctgcacgagctgaccttccaggccatgtcctatgacctgctgcccattgaaaatgatgtgtacaagtatgagaccagcggcattggagaggcccgggtgaaggaggtgctgctggatgaagatgatgacctgtggatcgccctgcggcacaagcacatcgccgaggtgtcccaggaggtgaccaggagcctgaaggacttcagcagcagcaagaggatgaacacaggagagaagaccaccatgagggacctgagccagatgctgaagaagatgccccagtaccagaaggagctgagcaagtacagcacccacctgcacctggccgaggactgcatgaagcactaccagggcaccgtggacaagctgtgccgggtggagcaggacctggccatgggcacagatgctgagggggagaagatcaaggaccccatgagggccatcgtgcccatcctgctggatgccaacgtgtccacctatgacaagatccgcatcatcctgctgtacatcttcctgaagaatggcatcacagaggagaacctgaacaagctgatccagcacgcccagatccccccagaagattctgagatcatcaccaacatggcccacctgggcgtgcccatcgtgacagacagcaccctgcggcggcgcagcaagccagagaggaaggagcgcatcagcgagcagacctaccagctgagccgctggacccccatcatcaaggacatcatggaggacaccatcgaggacaagctggacaccaagcactacccctacatcagcaccaggagcagcgccagcttcagcaccacagctgtgtctgcccgctatggccactggcacaagaacaaggcccctggagagtacagaagtggccccaggctcatcatcttcatcctgggcggcgtgtccctgaatgagatgagatgtgcctatgaggtgacccaggccaacgggaagtgggaggtgctgattggcagcacccacatcctgacccccaccaagttcctgatggacctgcggcacccagacttccgggagagcagccgggtgtcctttgaggaccaggcccccaccatggagtag

SEQ ID NO: 172458 - DNA, 1812 bp, synthetic construct
  misc_feature 1..1812: note = Description of Artificial Sequence: Synthetic coding sequence
  source 1..1812: mol_type = other DNA
atggcccccatcggcctgaaggctgtggtgggggagaagatcatgcatgatgtgatcaagaaggtgaagaagaagggggagtggaaggtgctggtggtggaccagctgtccatgaggatgctgagcagctgctgcaagatgacagacatcatgacagagggcatcaccatcgtggaggacatcaacaagaggcgggagcccctgcccagcctggaggccgtgtacctgatcacccccagcgagaagtctgtgcacagcctcatcagtgacttcaaggaccccccaacagccaagtacagagctgcccacgtgttcttcacagacagctgcccagatgccctcttcaatgagctggtgaagagcagagctgccaaggtgatcaagaccctgacagagatcaacatcgccttcctgccctatgagagccaggtgtacagcctggacagcgctgacagcttccagagcttctacagcccccacaaggcccagatgaagaaccccatcctggagcggctggccgagcagatcgccaccctgtgtgccaccctgaaggagtacccagctgtgcgctacagaggagagtacaaggacaatgccctgctggcccagctgatccaggacaagctggatgcctacaaggcagatgaccccaccatgggagagggccctgacaaggcccggagccagctgctgatcctggaccggggctttgaccccagcagccctgtgctgcacgagctgaccttccaggccatgtcctatgacctgctgcccattgaaaatgatgtgtacaagtatgagaccagcggcattggagaggcccgggtgaaggaggtgctgctggatgaagatgatgacctgtggatcgccctgcggcacaagcacatcgccgaggtgtcccaggaggtgaccaggagcctgaaggacttcagcagcagcaagaggatgaacacaggagagaagaccaccatgagggacctgagccagatgctgaagaagatgccccagtaccagaaggagctgagcaagtacagcacccacctgcacctggccgaggactgcatgaagcactaccagggcaccgtggacaagctgtgccgggtggagcaggacctggccatgggcacagatgctgagggggagaagatcaaggaccccatgagggccatcgtgcccatcctgctggatgccaacgtgtccacctatgacaagatccgcatcatcctgctgtacatcttcctgaagaatggcatcacagaggagaacctgaacaagctgatccagcacgcccagatccccccagaagattctgagatcatcaccaacatggcccacctgggcgtgcccatcgtgacagacagcaccctgcggcggcgcagcaagccagagaggaaggagcgcatcagcgagcagacctaccagctgagccgctggacccccatcatcaaggacatcatggaggacaccatcgaggacaagctggacaccaagcactacccctacatcagcaccaggagcagcgccagcttcagcaccacagctgtgtctgcccgctatggccactggcacaagaacaaggcccctggagagtacagaagtggccccaggctcatcatcttcatcctgggcggcgtgtccctgaatgagatgagatgtgcctatgaggtgacccaggccaacgggaagtgggaggtgctgattggcagcacccacatcctgacccccaccaagttcctgatggacctgcggcacccagacttccgggagagcagccgggtgtcctttgaggaccaggcccccaccatggagtag

SEQ ID NO: 172459 - DNA, 1389 bp, synthetic construct
  misc_feature 1..1389: note = Description of Artificial Sequence: Synthetic coding sequence
  source 1..1389: mol_type = other DNA
atggcccccaccatccagacccaggcccagcgggaggatggccacaggtctggagtggtgtgccgggtgaagtactgcaacagcctgcctgacatcccctttgaccccaagttcatcacctacccctttgaccagaacagatttgtgcagtacaaggccaccagcctggagaagcagcacaagcatgacctgctgacagagccagacctgggcgtgaccatcgacctgatcaacccagacacctacagaattgaccccaacgtgctgctggaccctgcagatgagaagctgctggaggaggagatccaggcccccaccagcagcaagaggagccagcagcacgccaaggtggtgccctggatgaggaagacagagtacatcagcacagagttcaacagatatggcatcagcaatgagaagccagaggtgaagattggagtgtctgtgaagcagcagttcacagaggaggagatctacaaggaccgggacagccagatcacagccatcgagaagacctttgaagatgcccagaagtccatgtggatcaacccctgtgcccaggtgatctttgacagcgaccctgcccccaaggacaccagcggggctgctgccctggagatgatgagccaggccatgatccggggcatgatggatgaggagggcaaccagtttgtggcctacttcctgcctgtggaggagaccctgaagaagaggaagagggaccaggaggaggagatggactatgccccagatgatgtgtatgactacaagatcgcccgggagtacaactggaatgtgaagaacaaggccagcaagggctatgaggagaactacttcttcatcttccgggagggagatggagtgtactacaatgagctggagaccagggtgcggctgagcaagaggcgggccaaggccggcgtgcagagcggcaccaatgccctgctggtggtgaagcaccgggacatgaatgagaaggagctggaggcccaggaggccaggaaggcccagctggagaaccacgagcctgaggaggaggaggaggaggagatggagacagaggagaaggaggccggcggctctgtgatgctgatcctgcggaccatgcccaccctgatgatgaggacagaagatcggcccaaggtggccgtgaccatgatccagacagctgctgccatgggcgtggccagcggggccggggccacagctgctgcccctgtgcccagccctgtggccgccagcacccggcccaggaggatggctgtgaagctgcagctgctgatccctgtgaagctgattgtgacagtgacagagagccagggcatccagggctggttccgccaccactactgtgagcagcagagcaccttcctggtggtgtgcctgtag

SEQ ID NO: 172460 - DNA, 1197 bp, synthetic construct
  misc_feature 1..1197: note = Description of Artificial Sequence: Synthetic coding sequence
  source 1..1197: mol_type = other DNA
atgtgcatccgggtgcacgtgtccatgtgcatgtgcatgtgtgtgcacgtgtgtgtgcacctgtgcatgcacgtgtgtgctgtgtgcatgtgtgtgtatgtgtgtgtgtgtgtgcacgtgcacgtgtgtgcctctgtgtgtgcctttgtgtgcatgtgtgtgtgtgtgtgtgtgtgtggctctgtgtgtgcctttgtgtctgtgcacgtgtgcatgagggtgtatgtgtgtgtgtgcatctgtgtgcacctgtatgtgtgtgtgtgtgtgtgcctgtgtgcctgtgtgtatgcctgtgtgtgcatgtgcctgcggctgtgtgtgcggctgtgtgtgtctgtgtgtgcctgtgtgtatgcctgcatctgcatgtgcatctgtgtgcacgtgtccatgtatgtgtgtgcctctgtgtgtgcctgtgtgtgtgtgtgtgtgtgtgtgtgtgtgtgcatgagggtgtgtgcccaccagtgcctgcacgtgtgcatctgtgtgtatgtgtgtgcccgcatctgtgtgtgtgcctgtgtgtatgtgtgtgtgtgcatctctgtgtgtgcctgtgtgtatgtgtgtgtgcacctgtgtgtgtgtgcctgtgtgcacgcctgtgtgtgtgtgtgtgcctgtgtgcacctgtgtgtgtgtgcctgtgcccacgtgggcgccaccctggtgtgcatctgcacctacacctgcccccggcccagcatgtttgcccacggcggccgctggggcgtggccggccggccccggcagcccatgagcctgggcgtgcaggcccaggcccagagggtcatccacctgccccagagcgtgcaggccctgatcaaggacttccagggcacccccaccttcacctacaaggccgcccacatcttcttcacagacacctgcccagagcccctcttcagcgagctgggccgcagccggctggccaaggtggtgaagaccctgaaggagatccacctggccttcctgccctatgaggcccaggtgcggcccggcctcatcctgggccggggctggggctttgtgaccaagtgccccctcttcccccagaagcagaccctgcggctgggcgctgtggcccacacctgcaaccccagcgctgtgggcggccagggccgccgcatcacctggggccaggagtttgagaccagcctgggcacagagcaggaccctgtgtcctag

SEQ ID NO: 172461 - DNA, 1773 bp, synthetic construct
  misc_feature 1..1773: note = Description of Artificial Sequence: Synthetic coding sequence
  source 1..1773: mol_type = other DNA
atggcccccagcggcctgaaggctgtggtgggggagaagatcctgagcggggtcatccgctctgtgaagaaggatggagagtggaaggtgctgatcatggaccaccccagcatgaggatcctgagcagctgctgcaagatgtctgacatcctggccgagggcatcaccatcgtggaggacatcaacaagaggcgggagcccatccccagcctggaggccatctacctgctgagccccacagagaaggccctgatcaaggacttccagggcacccccaccttcacctacaaggccgcccacatcttcttcacagacacctgcccagagcccctcttcagcgagctgggccgcagccggctggccaaggtggtgaagaccctgaaggagatccacctggccttcctgccctatgaggcccaggtgttcagcctggatgccccccacagcacctacaacctgtactgccccttccgggcagaggagaggacccggcagctggaggtgctggcccagcagatcgccaccctgtgtgccaccctgcaggagtacccagccatccgctacaggaagggccctgaggacacagcccagctggcccatgctgtgctggccaagctgaatgccttcaaggctgacacccccagcctgggggagggccctgagaagaccaggagccagctgctgatcatggacagagctgctgaccctgtgagccccctgctgcacgagctgaccttccaggccatggcctatgacctgctggacatcgagcaggacacctaccgctatgagaccaccggcctgtctgaggcccgggagaaggctgtgctgctggatgaagatgatgacctgtgggtggagctgcggcacatgcacatcgcagatgtgtccaagaaggtgacagagctgctgcggaccttctgtgagagcaagaggctgaccacagacaaggccaacatcaaggacctgagccagatcctgaagaagatgccccagtaccagaaggagctgaacaagtacagcacccacctgcacctggctgatgactgcatgaagcacttcaagggctctgtggagaagctgtgcagcgtggagcaggacctggccatgggcagtgatgctgagggggagaagatcaaggacagcatgaagctgattgtgcctgtgctgctggatgctgctgtgcctgcctatgacaagatccgggtgctgctgctgtacatcctgctgagaaatggagtgtctgaggagaacctggccaagctgatccagcacgccaacgtgcaggcccacagcagcctcatccggaacctggagcagctgggcggcaccgtgaccaaccctgggggcagcggcaccagcagccggctggagccccgggagaggatggagcccacctaccagctgagccgctggacccctgtgatcaaggatgtgatggaggatgctgtggaggaccggctggacaggaacctgtggccctttgtgtctgaccctgcccccacagccagcagccaggccgctgtgtctgccaggtttggccactggcacaagaacaaggccggcatcgaggcccgggccggccccaggctcatcgtgtatgtgatgggcggcgtggccatgtctgagatgagagctgcctatgaggtgacccgggccacagagggcaagtgggaggtgctgattggcagcagccacatcctgacccccacccgcttcctggatgacctgaaggccctggacaagaagctggaggacatcgccctgccctag

SEQ ID NO: 172462 - DNA, 1815 bp, synthetic construct
  misc_feature 1..1815: note = Description of Artificial Sequence: Synthetic coding sequence
  source 1..1815: mol_type = other DNA
atggcccccagcggcctgaaggctgtggtgggggagaagatcctgagcggggtcatccgctctgtgaagaaggatggagagtggaaggtgctgatcatggaccaccccagcatgaggatcctgagcagctgctgcaagatgtctgacatcctggccgagggcatcaccatcgtggaggacatcaacaagaggcgggagcccatccccagcctggaggccatctacctgctgagccccacagagaaggcccaggcccagagggtcatccacctgccccagagcgtgcaggccctgatcaaggacttccagggcacccccaccttcacctacaaggccgcccacatcttcttcacagacacctgcccagagcccctcttcagcgagctgggccgcagccggctggccaaggtggtgaagaccctgaaggagatccacctggccttcctgccctatgaggcccaggtgttcagcctggatgccccccacagcacctacaacctgtactgccccttccgggcagaggagaggacccggcagctggaggtgctggcccagcagatcgccaccctgtgtgccaccctgcaggagtacccagccatccgctacaggaagggccctgaggacacagcccagctggcccatgctgtgctggccaagctgaatgccttcaaggctgacacccccagcctgggggagggccctgagaagaccaggagccagctgctgatcatggacagagctgctgaccctgtgagccccctgctgcacgagctgaccttccaggccatggcctatgacctgctggacatcgagcaggacacctaccgctatgagaccaccggcctgtctgaggcccgggagaaggctgtgctgctggatgaagatgatgacctgtgggtggagctgcggcacatgcacatcgcagatgtgtccaagaaggtgacagagctgctgcggaccttctgtgagagcaagaggctgaccacagacaaggccaacatcaaggacctgagccagatcctgaagaagatgccccagtaccagaaggagctgaacaagtacagcacccacctgcacctggctgatgactgcatgaagcacttcaagggctctgtggagaagctgtgcagcgtggagcaggacctggccatgggcagtgatgctgagggggagaagatcaaggacagcatgaagctgattgtgcctgtgctgctggatgctgctgtgcctgcctatgacaagatccgggtgctgctgctgtacatcctgctgagaaatggagtgtctgaggagaacctggccaagctgatccagcacgccaacgtgcaggcccacagcagcctcatccggaacctggagcagctgggcggcaccgtgaccaaccctgggggcagcggcaccagcagccggctggagccccgggagaggatggagcccacctaccagctgagccgctggacccctgtgatcaaggatgtgatggaggatgctgtggaggaccggctggacaggaacctgtggccctttgtgtctgaccctgcccccacagccagcagccaggccgctgtgtctgccaggtttggccactggcacaagaacaaggccggcatcgaggcccgggccggccccaggctcatcgtgtatgtgatgggcggcgtggccatgtctgagatgagagctgcctatgaggtgacccgggccacagagggcaagtgggaggtgctgattggcagcagccacatcctgacccccacccgcttcctggatgacctgaaggccctggacaagaagctggaggacatcgccctgccctag

SEQ ID NO: 172463 - DNA, 1740 bp, synthetic construct
  misc_feature 1..1740: note = Description of Artificial Sequence: Synthetic coding sequence
  source 1..1740: mol_type = other DNA
atggcccccagcggcctgaaggctgtggtgggggagaagatcctgagcggggtcatccgctctgtgaagaaggatggagagtggaaggtgctgatcatggaccaccccagcatgaggatcctgagcagctgctgcaagatgtctgacatcctggccgagggcatcaccatcgtggaggacatcaacaagaggcgggagcccatccccagcctggaggccatctacctgctgagccccacagagaagtctgtgcaggccctgatcaaggacttccagggcacccccaccttcacctacaaggccgcccacatcttcttcacagacacctgcccagagcccctcttcagcgagctgggccgcagccggctggccaaggtggtgaagaccctgaaggagatccacctggccttcctgccctatgaggcccaggtgttcagcctggatgccccccacagcacctacaacctgtactgccccttccgggcagaggagaggacccggcagctggaggtgctggcccagcagatcgccaccctgtgtgccaccctgcaggagtacccagccatccgctacagaaaaggacctgaggacacagcccagctggcccatgctgtgctggccaagctgaatgccttcaaggctgacacccccagcctgggggagggccctgagaagaccaggagccagctgctgatcatggacagagctgctgaccctgtgagccccctgctgcacgagctgaccttccaggccatggcctatgacctgctggacatcgagcaggacacctaccgctatgagaccaccggcctgtctgaggcccgggagaaggctgtgctgctggatgaagatgatgacctgtgggtggagctgcggcacatgcacatcgcagatgtgtccaagaaggtgacagagctgctgcggaccttctgtgagagcaagaggctgaccacagacaaggccaacatcaaggacctgagccagatcctgaagaagatgccccagtaccagaaggagctgaacaagtacagcacccacctgcacctggctgatgactgcatgaagcacttcaagggctctgtggagaagctgtgcagcgtggagcaggacctggccatgggcagtgatgctgagggggagaagatcaaggacagcatgaagctgattgtgcctgtgctgctggatgctgctgtgcctgcctatgacaagatccgggtgctgctgctgtacatcctgctgagaaatggagtgtctgaggagaacctggccaagctgatccagcacgccaacgtgcaggcccacagcagcctcatccggaacctggagcagctgggcggcaccgtgaccaaccctgggggcagcggcaccagcagccggctggagccccgggagaggatggagcccacctaccagctgagccgctggacccctgtgatcaaggatgtgatggaggatgctgtggaggaccggctggacaggaacctgtggccctttgtgtctgaccctgcccccacagccagcagccaggccgctgtgtctgcccgcttcggccactggcacaagaacaaggccggcatcgaggcccgggccggcccccggctgattgtgtatgtgatgggcggcgtggccatgtctgagatgagagctgcctatgaggtgacccgggccacagagggcagcggccgctgcagcctggccccccacaccagcagccccaggcctgcctcctggatgacctag

SEQ ID NO: 172464 - DNA, 2421 bp, synthetic construct
  misc_feature 1..2421: note = Description of Artificial Sequence: Synthetic coding sequence
  source 1..2421: mol_type = other DNA
atgcacggcaagagcacagctgtgctggagatggactacagcatcgtggacttcctgaccctgtgtgagaccccctacccaaatgacttccaggagccctatgctgtggtggtgctgctggagaaggacctggtgctgattgacctggcccagaatggctaccccatctttgagaacccctaccccctgagcatccacgagagccctgtgacctgctgtgagtactttgctgactgccctgtggacctgatcccagccctgtacagcgtgggcgcccggcagaagaggcagggctacagcaagaaggagtggcccatcaatggaggcaactggggcctgggcgcccagagctacccagagatcatcatcaccggccatgctgatggctctgtgaagttctgggatgccagcgccatcaccctgcaggtgctgtacaagctgaagaccagcaaggtgtttgagaagagcaggaacaaggatgaccggcccaacacagacatcgtggatgaggacccctatgccatccagatcatctcctggtgcccagagagcaggatgctgtgcatcgccggcgtgtctgcccacgtgatcatctaccgcttcagcaagcaggaggtgatcacagaggtgatccccatgctggaggtgcggctgctgtatgagatcaatgatgtggagaccccagagggggagcagcccccacccctgcccacccctgtgggcggcagcaacccccagcccatccccccccagagccaccccagcaccagcagcagcagcagtgatggcctgcgggacaacgtgccctgcctgaaggtgaagaacagccccctgaagcagagccctggctaccagacagagctggtgatccagctggtgtgggtgggcggggagcccccccagcagatcaccagcctggccgtgaacagcagctatggcctggtggtgtttggaaactgcaatggaattgccatggtggactacctgcagaaggctgtgctgctgaacctgggcaccatcgagctgtatggcagcaatgacccctaccgccgggagcccaggagccccaggaagagccggcagcccagcggggccggcctgtgtgacatcagcgagggcaccgtggtgcctgaggaccgctgcaagagccccaccagcggcagcagcagcccccacaacagtgatgatgagcagaagatgaacaacttcatcgagaaggccaagatgagcaggaagctgagcctgcccacagacctgaagccagacctggatgtgaaggacaacagcttcagccgcagccgcagcagctctgtgaccagcattgacaaggagagccgggaggccatcagcgccctgcacttctgtgagaccttcaccaggaagacagacagcagccccagcccctgcctgtgggtgggcaccaccctgggcaccgtgctggtgattgccctgaacctgcccccaggaggagagcagaggctgctgcagcctgtgattgtgagccccagcggcaccatcctgcggctgaagggggccatcctgaggatggccttcctggacaccaccggctgcctgatccccccagcctatgagccctggagggagcacaacgtgcctgaggagaaggatgagaaggagaagctgaagaagagaagacctgtgtctgtgagccccagcagcagccaggagatcagcgagaaccagtatgctgtgatctgcagcgagaagcaggccaaggtgatcagcctgcccacccagaactgtgcctacaagcagaacatcacagagaccagctttgtgctgcggggggacatcgtggccctgagcaacagcatctgcctggcctgcttctgtgccaacggccacatcatgaccttcagcctgcccagcctgcggcccctgctggatgtgtactacctgcccctgaccaacatgagaattgcccggaccttctgcttcaccaacaacggccaggccctgtacctggtgagccccacagagatccagaggctgacctacagccaggagacctgtgagaacctgcaggagatgctgggggagctgttcacccctgtggagaccccagaggcccccaacagaggcttcttcaagggcctgtttggaggaggagcccagagcctggaccgggaggagctgtttggagagagcagcagcggcaaggccagccgcagcctggcccagcacatccctggccctgggggcatcgagggcgtgaagggggccgccagcggcgtggtgggggagctggcccgggcccggctggccctggatgagcggggccagaagctgggggacctggaggagaggacagctgccatgctgagcagcgctgagagcttcagcaagcacgcccacgagatcatgctgaagtacaaggacaagaagtggtaccagttctag

SEQ ID NO: 172465 - DNA, 3456 bp, synthetic construct
  misc_feature 1..3456: note = Description of Artificial Sequence: Synthetic coding sequence
  source 1..3456: mol_type = other DNA
atgaggaagttcaacatcaggaaggtgctggatggcctgacagctggcagcagcagcgccagccagcagcagcagcagcagcaccccccaggcaaccgggagcctgagatccaggagaccctgcagagcgagcacttccagctgtgcaagacagtgcgccacggcttcccctaccagcccagcgccctggcctttgatcctgtgcagaagatcctggccgtgggcacccagacaggagccctgcggctgtttggccggcctggggtggagtgctactgccagcatgattctggagctgctgtgatccagctgcagttcctgatcaatgaaggagccctggtgtctgccctggctgatgacaccctgcacctgtggaacctgcggcagaagaggcctgccatcctgcacagcctgaagttctgccgggagcgggtgaccttctgccacctgcccttccagagcaagtggctgtatgtgggcacagagcggggcaacatccacatcgtgaatgtggagagcttcaccctgagcggctacgtgatcatgtggaacaaggccatcgagctgagcagcaagagccaccctggccctgtggtgcacatcagtgacaaccccatggatgagggcaagctgctgattggatttgaaagtggcaccgtggtgctgtgggacctgaagagcaagaaggctgactaccgctacacctatgatgaggccatccacagcgtggcctggcaccacgagggcaagcagttcatctgcagccacagtgatggcaccctgaccatctggaatgtgcgcagccctgccaagcctgtgcagaccatcacccctcatggcaagcagctgaaggatggcaagaagccagagccctgcaagcccatcctgaaggtggagttcaagaccaccaggtctggagagcccttcatcatcctgagcggcggcctgtcctatgacacagtgggcagaagaccctgcctgactgtgatgcacggcaagagcacagctgtgctggagatggactacagcatcgtggacttcctgaccctgtgtgagaccccctacccaaatgacttccaggagccctatgctgtggtggtgctgctggagaaggacctggtgctgattgacctggcccagaatggctaccccatctttgagaacccctaccccctgagcatccacgagagccctgtgacctgctgtgagtactttgctgactgccctgtggacctgatcccagccctgtacagcgtgggcgcccggcagaagaggcagggctacagcaagaaggagtggcccatcaatggaggcaactggggcctgggcgcccagagctacccagagatcatcatcactggacatgctgatggctctgtgaagttctgggatgccagcgccatcaccctgcaggtgctgtacaagctgaagaccagcaaggtgtttgagaagagcaggaacaaggatgaccggcccaacacagacatcgtggatgaggacccctatgccatccagatcatctcctggtgcccagagagcaggatgctgtgcatcgccggcgtgtctgcccacgtgatcatctaccgcttcagcaagcaggaggtgatcacagaggtgatccccatgctggaggtgcggctgctgtatgagatcaatgatgtggagaccccagagggggagcagcccccacccctgcccacccctgtgggcggcagcaacccccagcccatccccccccagagccaccccagcaccagcagcagcagcagtgatggcctgcgggacaacgtgccctgcctgaaggtgaagaacagccccctgaagcagagccctggctaccagacagagctggtgatccagctggtgtgggtgggcggggagcccccccagcagatcaccagcctggccgtgaacagcagctatggcctggtggtgtttggaaactgcaatggcatcgccatggtggactacctgcagaaggctgtgctgctgaacctgggcaccatcgagctgtatggcagcaatgacccctacagaagagagcccaggagccccaggaagagccggcagcccagcggggccggcctgtgtgacatcagcgagggcaccgtggtgcctgaagatcgctgcaagagccccaccagcggcagcagcagcccccacaacagtgatgatgagcagaagatgaacaacttcatcgagaaggtgaagaccaagagcaggaagttcagcaagatggtggccaatgacatcgccaagatgagcaggaagctgagcctgcccacagacctgaagccagacctggatgtgaaggacaacagcttcagccgcagccgcagcagctctgtgaccagcattgacaaggagagccgggaggccatcagcgccctgcacttctgtgagaccttcaccaggaagacagacagcagccccagcccctgcctgtgggtgggcaccaccctgggcaccgtgctggtgattgccctgaacctgcccccaggaggagagcagaggctgctgcagcccgtcatcgtgagccccagcggcaccatcctgcggctgaagggggccatcctgaggatggccttcctggacaccaccggctgcctgatccccccagcctatgagccctggagggagcacaacgtgcctgaggagaaggatgagaaggagaagctgaagaagaggaggcctgtgtctgtgagccccagcagcagccaggagatcagcgagaaccagtatgctgtgatctgcagcgagaagcaggccaaggtgatcagcctgcccacccagaactgtgcctacaagcagaacatcacagagaccagctttgtgctgcggggggacatcgtggccctgagcaacagcatctgcctggcctgcttctgtgccaacggccacatcatgaccttcagcctgcccagcctgcggcccctgctggatgtgtactacctgcccctgaccaacatgagaattgcccggaccttctgcttcaccaacaacggccaggccctgtacctggtgagccccacagagatccagaggctgacctacagccaggagacctgtgagaacctgcaggagatgctgggggagctgttcacccctgtggagaccccagaggcccccaacagaggcttcttcaagggcctgtttggaggaggagcccagagcctggaccgggaggagctgtttggagagagcagcagcggcaaggccagccgcagcctggcccagcacatccctggccctgggggcattgaaggagtgaagggagctgccagcggcgtggtgggggagctggcccgggcccggctggccctggatgagcggggccagaagctgggggacctggaggagaggacagctgccatgctgagcagcgctgagagcttcagcaagcacgcccacgagatcatgctgaagtacaaggacaagaagtggtaccagttctag

SEQ ID NO: 172466 - DNA, 525 bp, synthetic construct
  misc_feature 1..525: note = Description of Artificial Sequence: Synthetic coding sequence
  source 1..525: mol_type = other DNA
tgaaaagctgtgctgctgaacctgggcaccatcgagctgtatggcagcaatgacccctacagaagagagcccaggagccccaggaagagccggcagcccagcggggccggcctgtgtgacatcagcgagggcaccgtggtgcctgaagatcgctgcaagagccccaccagcggcagcagcagcccccacaacagtgatgatgagcagaagatgaacaacttcatcgagaaggccaagatgagcaggaagctgagcctgcccacagacctgaagccagacctggatgtgaaggacaacagcttcagccgcagccgcagcagctctgtgaccagcattgacaaggagagccgggaggccatcagcgccctgcacttctgtgagaccttcaccaggaagacagacagcagccccagcccctgcctgtgggtgggcaccaccctgggcaccgtgctggtgattgccctgaacctgcccccaggaggagagcagaggctgctgcagcccgtcatcgtgagccccagctag

SEQ ID NO: 172467 - DNA, 840 bp, synthetic construct
  misc_feature 1..840: note = Description of Artificial Sequence: Synthetic coding sequence
  source 1..840: mol_type = other DNA
atggtggactacctgcagaaggctgtgctgctgaacctgggcaccatcgagctgtatggcagcaatgacccctaccgccgggagcccaggagccccaggaagagccggcagcccagcggaggagtgctgattgtgaccagctgcatgtgtggcctgagcagcctgtacagcgagagcatgaagaagctgcggagcagcttcctgaccggcctgtgtgacatcagcgagggcaccgtggtgcctgaggaccgctgcaagagccccaccagcgccaagatgagcaggaagctgagcctgcccacagacctgaagccagacctggatgtgaaggacaacagcttcagccgcagccgcagcagctctgtgaccagcattgacaaggagagccgggaggccatcagcgccctgcacttctgtgagaccttcaccaggaagacagacagcagccccagcccctgcctgtgggtgggcaccaccctgggcaccgtgctggtgattgccctgaacctgcccccaggaggagagcagaggctgctgcagcctgtgattgtgagccccagcggcaccatcctgcggctgaagggggccatcctgaggatggccttcctggacaccaccggctgcctgatccccccagcctatgagccctggagggagcacaacgtgcctgaggagaaggatgagaaggagaagctgaagaagagaagacctgtgtctgtgagccccagcagcagccaggagatcagcgagaaccagtatgctgtgatctgcagcgagaagcaggccaaggtgatcagcctgcccacccagaactgtgcctacaagcagaacatcacctag

SEQ ID NO: 172468 - DNA, 3297 bp, synthetic construct
  misc_feature 1..3297: note = Description of Artificial Sequence: Synthetic coding sequence
  source 1..3297: mol_type = other DNA
atgaggaagttcaacatcaggaaggtgctggatggcctgacagctggcagcagcagcgccagccagcagcagcagcagcagcaccccccaggcaaccgggagcctgagatccaggagaccctgcagagcgagcacttccagctgtgcaagacagtgcgccacggcttcccctaccagcccagcgccctggcctttgatcctgtgcagaagatcctggccgtgggcacccagacaggagccctgcggctgtttggccggcctggggtggagtgctactgccagcatgattctggagctgctgtgatccagctgcagttcctgatcaatgaaggagccctggtgtctgccctggctgatgacaccctgcacctgtggaacctgcggcagaagaggcctgccatcctgcacagcctgaagttctgccgggagcgggtgaccttctgccacctgcccttccagagcaagtggctgtatgtgggcacagagcggggcaacatccacatcgtgaatgtggagagcttcaccctgagcggctacgtgatcatgtggaacaaggccatcgagctgagcagcaagagccaccctggccctgtggtgcacatcagtgacaaccccatggatgagggcaagctgctgattggatttgaaagtggcaccgtggtgctgtgggacctgaagagcaagaaggctgactaccgctacacctatgatgaggccatccacagcgtggcctggcaccacgagggcaagcagttcatctgcagccacagtgatggcaccctgaccatctggaatgtgcgcagccctgccaagcctgtgcagaccatcacccctcatggcaagcagctgaaggatggcaagaagccagagccctgcaagcccatcctgaaggtggagttcaagaccaccaggtctggagagcccttcatcatcctgagcggcggcctgtcctatgacacagtgggcagaagaccctgcctgactgtgatgcacggcaagagcacagctgtgctggagatggactacagcatcgtggacttcctgaccctgtgtgagaccccctacccaaatgacttccaggagccctatgctgtggtggtgctgctggagaaggacctggtgctgattgacctggcccagaatggctaccccatctttgagaacccctaccccctgagcatccacgagagccctgtgacctgctgtgagtactttgctgactgccctgtggacctgatcccagccctgtacagcgtgggcgcccggcagaagaggcagggctacagcaagaaggagtggcccatcaatggaggcaactggggcctgggcgcccagagctacccagagatcatcatcactggacatgctgatggctctgtgaagttctgggatgccagcgccatcaccctgcaggtgctgtacaagctgaagaccagcaaggtgtttgagaagagcaggaacaaggatgaccggcccaacacagacatcgtggatgaggacccctatgccatccagatcatctcctggtgcccagagagcaggatgctgtgcatcgccggcgtgtctgcccacgtgatcatctaccgcttcagcaagcaggaggtgatcacagaggtgatccccatgctggaggtgcggctgctgtatgagatcaatgatgtggagaccccagagggggagcagcccccacccctgcccacccctgtgggcggcagcaacccccagcccatccccccccagagccaccccagcaccagcagcagcagcagtgatggcctgcgggacaacgtgccctgcctgaaggtgaagaacagccccctgaagcagagccctggctaccagacagagctggtgatccagctggtgtgggtgggcggggagcccccccagcagatcaccagcctggccgtgaacagcagctatggcctggtggtgtttggaaactgcaatggcatcgccatggtggactacctgcagaaggctgtgctgctgaacctgggcaccatcgagctgtatggcagcaatgacccctacagaagagagcccaggagccccaggaagagccggcagcccagcggggccggcctgtgtgacatcagcgagggcaccgtggtgcctgaagatcgctgcaagagccccaccagtgatgtgaaggacaacagcttcagccgcagccgcagcagctctgtgaccagcattgacaaggagagccgggaggccatcagcgccctgcacttctgtgagaccttcaccaggaagacagacagcagccccagcccctgcctgtgggtgggcaccaccctgggcaccgtgctggtgattgccctgaacctgcccccaggaggagagcagaggctgctgcagcctgtgattgtgagccccagcggcaccatcctgcggctgaagggggccatcctgaggatggccttcctggacaccaccggctgcctgatccccccagcctatgagccctggagggagcacaacgtgcctgaggagaaggatgagaaggagaagctgaagaagagaagacctgtgtctgtgagccccagcagcagccaggagatcagcgagaaccagtatgctgtgatctgcagcgagaagcaggccaaggtgatcagcctgcccacccagaactgtgcctacaagcagaacatcacagagaccagctttgtgctgcggggggacatcgtggccctgagcaacagcatctgcctggcctgcttctgtgccaacggccacatcatgaccttcagcctgcccagcctgcggcccctgctggatgtgtactacctgcccctgaccaacatgagaattgcccggaccttctgcttcaccaacaacggccaggccctgtacctggtgagccccacagagatccagaggctgacctacagccaggagacctgtgagaacctgcaggagatgctgggggagctgttcacccctgtggagaccccagaggcccccaacagaggcttcttcaagggcctgtttggaggaggagcccagagcctggaccgggaggagctgtttggagagagcagcagcggcaaggccagccgcagcctggcccagcacatccctggccctgggggcatcgagggcgtgaagggggccgccagcggcgtggtgggggagctggcccgggcccggctggccctggatgagcggggccagaagctgggggacctggaggagaggacagctgccatgctgagcagcgctgagagcttcagcaagcacgcccacgagatcatgctgaagtacaaggacaagaagtggtaccagttctag

SEQ ID NO: 172469 - DNA, 3348 bp, synthetic construct
  misc_feature 1..3348: note = Description of Artificial Sequence: Synthetic coding sequence
  source 1..3348: mol_type = other DNA
atgaggaagttcaacatcaggaaggtgctggatggcctgacagctggcagcagcagcgccagccagcagcagcagcagcagcaccccccaggcaaccgggagcctgagatccaggagaccctgcagagcgagcacttccagctgtgcaagacagtgcgccacggcttcccctaccagcccagcgccctggcctttgatcctgtgcagaagatcctggccgtgggcacccagacaggagccctgcggctgtttggccggcctggggtggagtgctactgccagcatgattctggagctgctgtgatccagctgcagttcctgatcaatgaaggagccctggtgtctgccctggctgatgacaccctgcacctgtggaacctgcggcagaagaggcctgccatcctgcacagcctgaagttctgccgggagcgggtgaccttctgccacctgcccttccagagcaagtggctgtatgtgggcacagagcggggcaacatccacatcgtgaatgtggagagcttcaccctgagcggctacgtgatcatgtggaacaaggccatcgagctgagcagcaagagccaccctggccctgtggtgcacatcagtgacaaccccatggatgagggcaagctgctgattggatttgaaagtggcaccgtggtgctgtgggacctgaagagcaagaaggctgactaccgctacacctatgatgaggccatccacagcgtggcctggcaccacgagggcaagcagttcatctgcagccacagtgatggcaccctgaccatctggaatgtgcgcagccctgccaagcctgtgcagaccatcacccctcatggcaagcagctgaaggatggcaagaagccagagccctgcaagcccatcctgaaggtggagttcaagaccaccaggtctggagagcccttcatcatcctgagcggcggcctgtcctatgacacagtgggcagaagaccctgcctgactgtgatgcacggcaagagcacagctgtgctggagatggactacagcatcgtggacttcctgaccctgtgtgagaccccctacccaaatgacttccaggagccctatgctgtggtggtgctgctggagaaggacctggtgctgattgacctggcccagaatggctaccccatctttgagaacccctaccccctgagcatccacgagagccctgtgacctgctgtgagtactttgctgactgccctgtggacctgatcccagccctgtacagcgtgggcgcccggcagaagaggcagggctacagcaagaaggagtggcccatcaatggaggcaactggggcctgggcgcccagagctacccagagatcatcatcactggacatgctgatggctctgtgaagttctgggatgccagcgccatcaccctgcaggtgctgtacaagctgaagaccagcaaggtgtttgagaagagcaggaacaaggatgaccggcccaacacagacatcgtggatgaggacccctatgccatccagatcatctcctggtgcccagagagcaggatgctgtgcatcgccggcgtgtctgcccacgtgatcatctaccgcttcagcaagcaggaggtgatcacagaggtgatccccatgctggaggtgcggctgctgtatgagatcaatgatgtggagaccccagagggggagcagcccccacccctgcccacccctgtgggcggcagcaacccccagcccatccccccccagagccaccccagcaccagcagcagcagcagtgatggcctgcgggacaacgtgccctgcctgaaggtgaagaacagccccctgaagcagagccctggctaccagacagagctggtgatccagctggtgtgggtgggcggggagcccccccagcagatcaccagcctggccgtgaacagcagctatggcctggtggtgtttggaaactgcaatggcatcgccatggtggactacctgcagaaggctgtgctgctgaacctgggcaccatcgagctgtatggcagcaatgacccctacagaagagagcccaggagccccaggaagagccggcagcccagcggggccggcctgtgtgacatcagcgagggcaccgtggtgcctgaagatcgctgcaagagccccaccagcgccaagatgagcaggaagctgagcctgcccacagacctgaagccagacctggatgtgaaggacaacagcttcagccgcagccgcagcagctctgtgaccagcattgacaaggagagccgggaggccatcagcgccctgcacttctgtgagaccttcaccaggaagacagacagcagccccagcccctgcctgtgggtgggcaccaccctgggcaccgtgctggtgattgccctgaacctgcccccaggaggagagcagaggctgctgcagcccgtcatcgtgagccccagcggcaccatcctgcggctgaagggggccatcctgaggatggccttcctggacaccaccggctgcctgatccccccagcctatgagccctggagggagcacaacgtgcctgaggagaaggatgagaaggagaagctgaagaagaggaggcctgtgtctgtgagccccagcagcagccaggagatcagcgagaaccagtatgctgtgatctgcagcgagaagcaggccaaggtgatcagcctgcccacccagaactgtgcctacaagcagaacatcacagagaccagctttgtgctgcggggggacatcgtggccctgagcaacagcatctgcctggcctgcttctgtgccaacggccacatcatgaccttcagcctgcccagcctgcggcccctgctggatgtgtactacctgcccctgaccaacatgagaattgcccggaccttctgcttcaccaacaacggccaggccctgtacctggtgagccccacagagatccagaggctgacctacagccaggagacctgtgagaacctgcaggagatgctgggggagctgttcacccctgtggagaccccagaggcccccaacagaggcttcttcaagggcctgtttggaggaggagcccagagcctggaccgggaggagctgtttggagagagcagcagcggcaaggccagccgcagcctggcccagcacatccctggccctgggggcattgaaggagtgaagggagctgccagcggcgtggtgggggagctggcccgggcccggctggccctggatgagcggggccagaagctgggggacctggaggagaggacagctgccatgctgagcagcgctgagagcttcagcaagcacgcccacgagatcatgctgaagtacaaggacaagaagtggtaccagttctag

SEQ ID NO: 172470 - DNA, 795 bp, synthetic construct
  misc_feature 1..795: note = Description of Artificial Sequence: Synthetic coding sequence
  source 1..795: mol_type = other DNA
attgagctgtatggcagcaatgacccctacagaagagagcccaggagccccaggaagagccggcagcccagcggcggcgtgctgattgtgaccagctgcatgtgtggcctgagcagcctgtacagcgagagcatgaagaagctgcggagcagcttcctgaccggcctgtgtgacatcagcgagggcaccgtggtgcctgaagatcgctgcaagagccccaccagcgccaagatgagcaggaagctgagcctgcccacagacctgaagccagacctggatgtgaaggacaacagcttcagccgcagccgcagcagctctgtgaccagcattgacaaggagagccgggaggccatcagcgccctgcacttctgtgagaccttcaccaggaagacagacagcagccccagcccctgcctgtgggtgggcaccaccctgggcaccgtgctggtgattgccctgaacctgcccccaggaggagagcagaggctgctgcagcccgtcatcgtgagccccagcggcaccatcctgcggctgaagggggccatcctgaggatggccttcctggacaccaccggctgcctgatccccccagcctatgagccctggagggagcacaacgtgcctgaggagaaggatgagaaggagaagctgaagaagaggaggcctgtgtctgtgagccccagcagcagccaggagatcagcgagaaccagtatgctgtgatctgcagcgagaagcaggccaaggtgatcagcctgcccacccagaactgtgcctacaagcagaacatcacctag

SEQ ID NO: 172471 - DNA, 927 bp, synthetic construct
  misc_feature 1..927: note = Description of Artificial Sequence: Synthetic coding sequence
  source 1..927: mol_type = other DNA
atgaggaagttcaacatcaggaaggtgctggatggcctgacagctggcagcagcagcgccagccagcagcagcagcagcagcaccccccaggcaaccgggagcctgagatccaggagaccctgcagagcgagcacttccagctgtgcaagacagtgcgccacggcttcccctaccagcccagcgccctggcctttgatcctgtgcagaagatcctggccgtgggcacccagacaggagccctgcggctgtttggccggcctggggtggagtgctactgccagcatgattctggagctgctgtgatccagctgcagttcctgatcaatgaaggagccctggtgtctgccctggctgatgacaccctgcacctgtggaacctgcggcagaagaggcctgccatcctgcacagcctgaagttctgccgggagcgggtgaccttctgccacctgcccttccagagcaagtggctgtatgtgggcacagagcggggcaacatccacatcgtgaatgtggagagcttcaccctgagcggctacgtgatcatgtggaacaaggccatcgagctgagcagcaagagccaccctggccctgtggtgcacatcagtgacaaccccatggatgagggcaagctgctgattggatttgaaagtggcaccgtggtgctgtgggacctgaagagcaagaaggctgactaccgctacacctatgatgaggccatccacagcgtggcctggcaccacgagggcaagcagttcatctgcagccacagtgatggcaccctgaccatctggaatgtgcgcagccctgccaagcctgtgcagaccatcacccctcatggcaagcagctgaaggatggcaagaagccagagccctgcaagcccatcctgaaggtggagttcaagaccaccaggtctggagtgtgctag

SEQ ID NO: 172472 - DNA, 3561 bp, synthetic construct
  misc_feature 1..3561: note = Description of Artificial Sequence: Synthetic coding sequence
  source 1..3561: mol_type = other DNA
atgaagaagttcaacttcaggaaggtgctggatggcctgacagccagcagccctggcagcggcagcagcagcggcagcaacagcggcggcggggccggcagcggctctgtgcaccctgctggaacagctggggtgctgcgggaggagatccaggagaccctgaccagcgagtacttccagatctgcaagacagtgagacatggcttcccccaccagcccacagccctggcctttgatcctgtgcagaagatcctggccatcggcaccaggactggagccatccgcatcctgggccggcctggggtggactgctactgccagcacgagagcggggctgctgtgctgcagctgcagttcctgatcaatgaaggagccctggtgtctgccagcagtgatgacaccctgcacctgtggaacctgcggcagaagaggcctgccatcctgcacagcctgaagttcaaccgggagcgcatcacctactgccacctgcccttccagagcaagtggctgtatgtgggcacagagcggggcaacacccacatcgtgaacatcgagagcttcatcctgagcggctacgtgatcatgtggaacaaggccatcgagctgagcaccaagacccaccctggccctgtggtgcacctgagtgacagccccagagatgagggcaagctgctgattggctatgaaaatggcaccgtggtgttctgggacctgaagagcaagagagctgagctgcgggtgtactatgatgaggccatccacagcattgactggcaccacgagggcaagcagttcatgtgcagccacagtgatggcagcctgaccctgtggaacctgaagagccccagccggcccttccagaccaccatcccccacggcaagagccagcgggagggcaggaagtctgagagctgcaagcccatcctgaaggtggagtacaagacctgcaagaacagcgagcccttcatcatcttcagcggcggcctgtcctatgacaaggcctgccggcggcccagcctgaccatcatgcacggcaaggccatcaccgtgctggagatggaccaccccatcgtggagttcctgaccctgtgtgagaccccctacccaaatgagttccaggagccctatgctgtggtggtgctgctggagaaggacctgattgtggtggacctgacccagagcaacttccccatctttgagaacccctaccccatggacatccacgagagccctgtgacctgcacagcctactttgctgactgccccccagacctgatcctggtgctgtacagcattggagtgaagcacaagaagcagggctacagcaacaaggagtggcccatctctggaggagcctggaacctgggcgcccagacctacccagagatcatcatcaccggccatgctgatggcagcatcaagttctgggatgccagcgccatcaccctgcagatgctgtacaagctgaagaccagcaaggtgtttgagaagcagaaggtgggggagggcaagcagacctgtgaaattgtggaggaggacccctttgccatccagatgatctactggtgcccagagagccgcatcttctgtgtgtctggagtgtctgcctacgtgatcatctacaagttcagcagacatgagatcaccacagagatcgtgtccctggaggtgcggctgcagtatgatgtggaggacatcatcaccccagagcctgagaccagcccccccttcccagacctgagcgcccagctgcccagcagccgcagcctgagcggcagcaccaacacagtggccagcgagggcgtgaccaaggacagcatcccctgcctgaatgtgaagaccaggcctgtgaggatgcctcctggctaccaggccgagctggtgatccagctggtgtgggtggatggagagcccccccagcagatcaccagcctggccgtgtcctctgcctatggaattgtggccttcggcaactgcaatggcctggccgtggtggacttcatccagaagacagtgctgctgtccatgggcaccatcgacctgtaccgcagcagtgacctgtaccagaggcagcccaggagccccaggaagaacaagcagttcatcgctgacaacttctgcatgaggggcctgagcaacttctacccagacctgaccaagaggatccgcaccagctaccagagcctgacagagctgaatgacagccctgtgcccctggagctggagcgctgcaagagccccaccagtgaccacgtgaatggccactgcaccagccccaccagccagagctgcagcagcggcaagaggctgagcagcgcagatgtgtccaaggtgaaccgctggggccctggccggccccccttcaggaaggcccagagcgctgcctgcatggagatcagcctgcctgtgaccacagaagaaaatcgggagaacagctacaacagaagccgcagcagcagcatcagcagcattgacaaggacagcaaggaggccatcacagccctgtacttcatggacagctttgccaggaagaatgacagcaccatcagcccctgcctgtttgtgggcaccagcctgggcatggtgctgatcatcagcctgaacctgcccctggctgatgagcagcgcttcacagagcctgtgatggtgctgcccagcggcaccttcctgagcctgaagggagctgtgctgaccttcagctgcatggacaggatgggcggcctgatgcagcccccctatgaggtgtggagggaccccaacaacattgatgaaaatgagaagtcctggaggaggaaggtggtgatgaacagcagcagcgccagccaggagatcggggaccaccagtacaccatcatctgcagcgagaagcaggccaaggtgttcagcctgcccagccagacctgcctgtatgtgcacaacatcacagagaccagcttcatcctgcaggccaacgtggtggtgatgtgcagcagcgcctgcctggcctgcttctgtgccaacggccacatcatgatcatgagcctgcccagcctgcggcccatgctggatgtgaactacctgcccctgacagacatgagaattgcccggaccttctgcttcaccaatgaaggccaggccctgtacctggtgagccccacagagatccagaggctgacctacagccaggagatgtgtgacaacctgcaggacatgctgggggacctcttcacccccatcgagaccccagaggcccagaacagaggcttcctgaagggcctgtttggaggcagcggccagacctttgaccgggaggagctgtttggagaggccagcgctgggaaggccagccgcagcctggcccagcacatccctggccctggcagcattgagggcatgaagggagctgctggaggagtgatgggagagctgacccgggccagaattgccctggatgagcggggccagaggctgggggagctggaggagaagacagctggcatgatgaccagcgctgaggccttcagcaagcacgcccacgagctgatgctgaagtacaaggacaagaagtggtaccagttctag

SEQ ID NO: 172473 - DNA, 384 bp, synthetic construct
  misc_feature 1..384: note = Description of Artificial Sequence: Synthetic coding sequence
  source 1..384: mol_type = other DNA
atgaagaagttcaacttcaggaaggtgctggatggcctgacagccagcagccctggcagcggcagcagcagcggcagcaacagcggcggcggggccggcagcggctctgtgcaccctgctggaacagctggggtgctgcgggaggagatccaggagaccctgaccagcgagtacttccagatctgcaagacagtgagacatggcttcccccaccagcccacagccctggcctttgatcctgtgcagaagatcctggccatcggcaccaggactggagccatccgcatcctgggccggcctggggtggactgctactgccagcacgagagcggggctgctgtgctgcagctgcagttcctgatcaatgaaggagccctggtgtag

SEQ ID NO: 172474 - DNA, 633 bp, synthetic construct
  misc_feature 1..633: note = Description of Artificial Sequence: Synthetic coding sequence
  source 1..633: mol_type = other DNA
atgtctgccaagagcgccatcagcaaggagatctttgcccccctggatgagaggatgctgggcgctgtgcaggtgaagaggaggaccaagaagaagatccccttcctggccaccggcggccagggcgagtacctgacctacatctgcctgtctgtgaccaacaagaagcccacccaggccagcatcaccaaggtgaagcagtttgagggcagcaccagctttgtgcggcgcagccagtggatgctggagcagctgcggcaggtgaatggaattgaccccaacggggacagcgctgagtttgacctgctgtttgaaaatgcctttgaccagtgggtggccagcacagccagcgagaagtgcaccttcttccagatcctgcaccacacctgccagcgctacctgacagacaggaagccagagttcatcaactgccagagcaagatcatgggcggcaacagcatcctgcacagcgctgctgacagcgtgaccagcgctgtgcagaaggccagccaggccctgaatgaaagaggagagcggctgggccgggcagaggagaagacagaggacctgaagaacagcgcccagcagtttgctgagacagcccacaagctggccatgaagcacaagtgctag

SEQ ID NO: 172475 - DNA, 633 bp, synthetic construct
  misc_feature 1..633: note = Description of Artificial Sequence: Synthetic coding sequence
  source 1..633: mol_type = other DNA
atgtctgccaagagcgccatcagcaaggagatctttgcccccctggatgagaggatgctgggcgctgtgcaggtgaagaggaggaccaagaagaagatccccttcctggccaccggcggccagggcgagtacctgacctacatctgcctgtctgtgaccaacaagaagcccacccaggccagcatcaccaaggtgaagcagtttgagggcagcaccagctttgtgcggcgcagccagtggatgctggagcagctgcggcaggtgaatggaattgaccccaacggggacagcgctgagtttgacctgctgtttgaaaatgcctttgaccagtgggtggccagcacagccagcgagaagtgcaccttcttccagatcctgcaccacacctgccagcgctacctgacagacaggaagccagagttcatcaactgccagagcaagatcatgggcggcaacagcatcctgcacagcgctgctgacagcgtgaccagcgctgtgcagaaggccagccaggccctgaatgaaagaggagagcggctgggccgggcagaggagaagacagaggacctgaagaacagcgcccagcagtttgctgagacagcccacaaggtgaccttccggggcaggaagtag

SEQ ID NO: 172476 - DNA, 633 bp, synthetic construct; identical to SEQ ID NO: 172474
  misc_feature 1..633: note = Description of Artificial Sequence: Synthetic coding sequence
  source 1..633: mol_type = other DNA

SEQ ID NO: 172477 - DNA, 633 bp, synthetic construct; identical to SEQ ID NO: 172474
  misc_feature 1..633: note = Description of Artificial Sequence: Synthetic coding sequence
  source 1..633: mol_type = other DNA

SEQ ID NO: 172478 - DNA, 633 bp, synthetic construct; identical to SEQ ID NO: 172474
  misc_feature 1..633: note = Description of Artificial Sequence: Synthetic coding sequence
  source 1..633: mol_type = other DNA

SEQ ID NO: 172479 - DNA, 327 bp, synthetic construct
  misc_feature 1..327: note = Description of Artificial Sequence: Synthetic coding sequence
  source 1..327: mol_type = other DNA
atgtctgcctgcttcctggacaccaggagagctgccttcctgcagtgtgacctgcccagcagctaccgcatcctgaccctgcctgagagcggccactgcggcagcgctgagcctgtgtctgatgccccagccctgctgctgagcggcaacagcatcctgcacagcgctgctgacagcgtgaccagcgctgtgcagaaggccagccaggccctgaatgaaagaggagagcggctgggccgggcagaggagaagacagaggacctgaagaacagcgcccagcagtttgctgagacagcccacaagctggccatgaagcacaagtgctag

SEQ ID NO: 172480 - DNA, 633 bp, synthetic construct; identical to SEQ ID NO: 172474
  misc_feature 1..633: note = Description of Artificial Sequence: Synthetic coding sequence
  source 1..633: mol_type = other DNA

SEQ ID NO: 172481 - DNA, 633 bp, synthetic construct; identical to SEQ ID NO: 172474
  misc_feature 1..633: note = Description of Artificial Sequence: Synthetic coding sequence
  source 1..633: mol_type = other DNA

SEQ ID NO: 172482 - DNA, 1617 bp, synthetic construct
  misc_feature 1..1617: note = Description of Artificial Sequence: Synthetic coding sequence
  source 1..1617: mol_type = other DNA
atggctgtggccgctgctgctgctgctgctggccctgctggagctgggggcggccgggcccagaggagcggcctgctggaggtgctggtgcgggaccgctggcacaaggtgctggtgaacctgtctgaagatgccctggtgctgagcagcgaggagggcgctgctgcctacaacggcatcggcacagccaccaacggcagcttctgccgcggggccggggccggccaccctggagctggaggagcccagcccccagacagccctgctggggtgaggacagccttcacagacctgcctgagcaggtgcctgagagcatcagcaaccagaagaggggcgtgaaggtgctgaagcaggagctgggcggcctgggcatcagcatcaagggcggcaaggagaacaagatgcccatcctgatcagcaagatcttcaagggcctggccgctgaccagacccaggccctgtatgtgggagatgccatcctgtctgtgaatggagctgacctgagagatgccacccatgatgaggccgtgcaggccctgaagagagctgggaaggaggtgctgctggaggtgaagtacatgagggaggccaccccctacgtgaagaagggcagccctgtgtctgagatcggctgggagaccccacctcctgagagcccccggctgggcggcagcaccagtgacccccccagcagccagagcttctccttccaccgggacaggaagagcatccccctgaagatgtgctacgtgaccaggtccatggccctggccgaccctgaaaatcggcagctggagatccacagcccagatgccaagcacacagtcatcctgcggagcaaggacagcgccacagcccaggcctggttcagcgccatccacagcaatgtgaatgacctgctgaccagggtgattgctgaggtgcgggagcagctgggcaagacaggaattgctggcagccgggagatccgccacctgggctggctggccgagaaggtgcctggagagagcaagaagcagtggaagccagccctggtggtgctgacagagaaggacctgctgatctatgacagcatgcccaggaggaaggaggcctggttcagccctgtgcacacctaccccctgctggccacccggctggtgcacagcggccctgggaagggcagcccccaggccggcgtggacctgagctttgccaccaggacaggcacccggcagggcatcgagacccacctgttccgggcagagaccagccgggacctgagccactggaccaggagcatcgtgcagggctgccacaacagcgctgagctgattgctgagatcagcacagcctgcacctacaagaaccaggagtgccgcctgaccatccactatgaaaatggcttcagcatcaccacagagccccaggagggcgccttccccaagaccatcatccagagcccctatgagaagctgaagatgagcagtgatgatggcatccgcatgctgtacctggactttggaggcaaggatggagagatccagctggacctgcacagctgccccaagcccatcgtgttcatcatccacagcttcctgagcgccaagatcacccggctgggcctggtggcctag

SEQ ID NO: 172483 - DNA, 1617 bp, synthetic construct; identical to SEQ ID NO: 172482
  misc_feature 1..1617: note = Description of Artificial Sequence: Synthetic coding sequence
  source 1..1617: mol_type = other DNA

SEQ ID NO: 172484 - DNA, 87 bp, synthetic construct
  misc_feature 1..87: note = Description of Artificial Sequence: Synthetic coding sequence
  source 1..87: mol_type = other DNA
atggctgtggccgctgctgctgctgctgctggccctgctggagctgggggcggccgggcccagaggagcggcctgctggaggtgtag

SEQ ID NO: 172485 - DNA, 1623 bp, synthetic construct
  misc_feature 1..1623: note = Description of Artificial Sequence: Synthetic coding sequence
  source 1..1623: mol_type = other DNA
atgagggtggccgccgccacagctgctgctggggccggccctgccatggctgtgtggacccgggccaccaaggccggcctggtggagctgctgctgcgggagcgctgggtgcgggtggtggccgagctgagcggggagagcctgagcctgactggagatgctgctgctgctgagctggagcccgccctgggccctgctgctgctgccttcaacggcctgcccaatggaggaggagctggggacagcctgcccggcagccccagccggggcctgggcccccccagccccccagccccaccccggggccctgctggggaggccggggccagcccccctgtgcggcgggtgcgggtggtgaagcaggaggccggcggcctgggcatcagcatcaagggcggcagagaaaataggatgcccatcctgatcagcaagatcttccctggcctggccgctgaccagagccgggccctgcggctgggagatgccatcctgtctgtgaatggaacagacctgcggcaggccacccatgaccaggccgtgcaggccctgaagagagctgggaaggaggtgctgctggaggtgaagttcatccgggaggtgaccccctacatcaagaagcccagcctggtgtctgacctgccctgggagggcgccgccccccagagccccagcttcagcggctctgaagattctggcagccccaagcaccagaacagcaccaaggacaggaagatcatccccctgaagatgtgctttgctgccaggaacctgtccatgccagacctggagaaccggctgattgagctgcacagcccagacagcaggaacaccctcatcctgcgctgcaaggacacagccacagcccacagctggtttgtggccatccacaccaacatcatggccctgctgccccaggtgctggccgagctgaatgccatgctgggcgccaccagcacagctgggggcagcaaggaggtgaagcacatcgcctggctggccgagcaggccaagctggatggcggccggcagcagtggaggcctgtgctgatggctgtgacagagaaggacctgctgctgtatgactgcatgccctggaccagagatgcctgggccagcccctgccacagctaccccctggtggccacccggctggtgcacagcggcagcggctgccgcagccccagcctgggcagtgacctgacctttgccaccaggacaggcagccggcagggcatcgagatgcacctgttccgggtggagacccaccgggacctgagctcctggacccgcatcctggtgcagggctgccacgccgctgctgagctgatcaaggaggtgtccctgggctgcatgctgaatggccaggaggtgcggctgaccatccactatgaaaatggcttcaccatcagccgggagaatggaggcagcagcagcatcctgtaccgctacccctttgagcggctgaagatgtctgcagatgatggcatccggaacctgtacctggactttggaggccctgagggggagctgaccatggacctgcacagctgccccaagcccatcgtgtttgtgctgcacaccttcctgagcgccaaggtgaccaggatgggcctgctggtgtag

SEQ ID NO: 172486 - DNA, 1443 bp, synthetic construct
  misc_feature 1..1443: note = Description of Artificial Sequence: Synthetic coding sequence
  source 1..1443: mol_type = other DNA
atggacttcagaacagcctgtgaggagaccaagacaggcatctgcctgctgcaggacggcaaccaggagcccttcaaggtgcggctgcacctggccaaggacatcctgatgatccaggagcaggacgtcatctgtgtgtctggagagcccttctacagcggggagaggacagtgaccatccggcggcagacagtgggcggcttcggcctgagcatcaagggcggcgctgagcacaacatccctgtggtggtgtccaagatcagcaaggagcagagagctgagctgagcggcctgctcttcatcggagatgccatcctgcagatcaatggcatcaacgtgaggaaatgtagacatgaggaggtggtgcaggtgctgagaaatgctggggaggaggtgaccctgactgtgtccttcctgaagagggccccagccttcctgaagctgcccctgaatgaagactgtgcctgtgcccccagcgaccagagcagcggcaccagcagccccctgtgtgacagcggcctgcacctgaactaccaccccaacaacacagacaccctgagctgcagctcctggcccaccagccctggcctgcgctgggagaagcgctggtgtgacctgcggctcatccccctgctgcacagccgcttcagccagtatgtgcctggaacagacctgagccggcagaatgccttccaggtgattgctgtggatggagtgtgcaccggcatcatccagtgcctgtctgctgaggactgtgtggactggctgcaggccatcgccaccaacatcagcaacctgaccaagcacaacatcaagaagatcaacagaaacttccctgtgaaccagcagatcgtgtacatgggctggtgtgaggcccgggagcaggaccccctgcaggacagagtgtacagccccaccttcctggccctgcggggcagctgcctgtacaagttcctggcccctcctgtgaccacctgggactggaccagggctgagaagaccttctctgtgtatgagatcatgtgcaagatcctgaaggacagcgacctgctggacaggaggaagcagtgcttcaccgtgcagagcgagagcggggaggacctgtacttctctgtggagctggagagtgacctggcccagtgggagcgggccttccagacagccaccttcctggaggtggagcgcatccagtgcaagacctacgcctgtgtgctggagagccacctgatgggcctgaccatcgacttcagcacaggcttcatctgctttgatgctgccaccaaggagctggagttcagcaacctgtttgctgtgctgcactgcatccacagcttctttgctgccaaggtggcctgcctggaccccctcttcctgggcaaccaggccacagccagcacagctgccagcagcgccaccaccagcaaggccaagtacaccacctag

SEQ ID NO: 172487 - DNA, 1443 bp, synthetic construct; identical to SEQ ID NO: 172486
  misc_feature 1..1443: note = Description of Artificial Sequence: Synthetic coding sequence
  source 1..1443: mol_type = other DNA

SEQ ID NO: 172488 - DNA, 1554 bp, synthetic construct
  misc_feature 1..1554: note = Description of Artificial Sequence: Synthetic coding sequence
  source 1..1554: mol_type = other DNA
atggacttcagaacagcctgtgaggagaccaagacaggcatctgcctgctgcaggacggcaaccaggagcccttcaaggtgcggctgcacctggccaaggacatcctgatgatccaggagcaggacgtcatctgtgtgtctggagagcccttctacagcggggagaggacagtgaccatccggcggcagacagtgggcggcttcggcctgagcatcaagggcggcgctgagcacaacatccctgtggtggtgtccaagatcagcaaggagcagagagctgagctgagcggcctgctcttcatcggagatgccatcctgcagatcaatggcatcaacgtgaggaaatgtagacatgaggaggtggtgcaggtgctgagaaatgctggggaggaggtgaccctgactgtgtccttcctgaagagggccccagccttcctgaagctgcccctgaatgaagactgtgcctgtgcccccagcgaccagagcagcggcaccagcagccccctgtgtgacagcggcctgcacctgaactaccaccccaacaacacagacaccctgagctgcagctcctggcccaccagccctggcctgcgctgggagaagcgctggtgtgacctgcggctcatccccctgctgcacagccgcttcagccagtatgtgcctggaacagacctgagccggcagaatgccttccaggtgattgctgtggatggagtgtgcaccggcatcatccagtgcctgtctgctgaggactgtgtggactggctgcaggccatcgccaccaacatcagcaacctgaccaagcacaacatcaagaagatcaacagaaacttccctgtgaaccagcagatcgtgtacatgggctggtgtgaggcccgggagcaggaccccctgcaggacagagtgtacagccccaccttcctggccctgcggggcagctgcctgtacaagttcctggcccctcctgtgaccacctgggactggaccagggctgagaagaccttctctgtgtatgagatcatgtgcaagatcctgaaggacagcgacctgctggacaggaggaagcagtgcttcaccgtgcagagcgagagcggggaggacctgtacttctctgtggagctggagagtgacctggcccagtgggagcgggccttccagacagccaccttcctggaggtggagcgcatccagtgcaagacctacgcctgtgtgctggagagccacctgatgggcctgaccatcgacttcagcacaggcttcatctgctttgatgctgccaccaaggctgtgctgtggagatacaagttcagccagctgaagggcagcagtgatgatggcaagagcaagatcaagttcctgttccagaacccagacaccaagcagatcgaggccaaggagctggagttcagcaacctgtttgctgtgctgcactgcatccacagcttctttgctgccaaggtggcctgcctggaccccctcttcctgggcaaccaggccacagccagcacagctgccagcagcgccaccaccagcaaggccaagtacaccacctag

SEQ ID NO: 172489 - DNA, 1554 bp, synthetic construct; identical to SEQ ID NO: 172488
  misc_feature 1..1554: note = Description of Artificial Sequence: Synthetic coding sequence
  source 1..1554: mol_type = other DNA

SEQ ID NO: 172490 - DNA, 279 bp, synthetic construct
  misc_feature 1..279: note = Description of Artificial Sequence: Synthetic coding sequence
  source 1..279: mol_type = other DNA
atggacttcagaacagcctgtgaggagaccaagacaggcatctgcctgctgcaggacggcaaccaggagcccttcaaggtgcggctgcacctggccaaggacatcctgatgatccaggagcaggacgtcatctgtgtgtctggagagcccttctacagcggggagaggacagtgaccatccggcggcagacagtgggcggcttcggcctgagcatcaagggcggcgctgagcacaacatccctgtggtggtgtccaagatcagcaaggagcagaggtag

SEQ ID NO: 172491 - DNA, 423 bp, synthetic construct
  misc_feature 1..423: note = Description of Artificial Sequence: Synthetic coding sequence
  source 1..423: mol_type = other DNA
atggatgtgttcatgaagggcctgagcaaggccaaggagggcgtggtggccgctgctgagaagaccaagcagggcgtggccgaggccgccggcaagaccaaggagggcgtgctgtatgtgggcagcaagaccaaggagggcgtggtgcacggcgtggccaccgtggccgagaagaccaaggagcaggtgaccaacgtgggcggcgctgtggtgactggagtgacagctgtggcccagaagacagtggagggcgccggcagcattgctgctgccaccggctttgtgaagaaggaccagctgggcaagaatgaggagggcgccccccaggagggcatcctggaggacatgcctgtggaccctgacaatgaggcctatgagatgcccagcgaggagggctaccaggactatgagcctgaggcctag

SEQ ID NO: 172492 - DNA, 339 bp, synthetic construct
  misc_feature 1..339: note = Description of Artificial Sequence: Synthetic coding sequence
  source 1..339: mol_type = other DNA
atggatgtgttcatgaagggcctgagcaaggccaaggagggcgtggtggccgctgctgagaagaccaagcagggcgtggccgaggccgccggcaagaccaaggagggcgtgctgtatgtgggcagcaagaccaaggagggcgtggtgcacggcgtggccaccgtggccgagaagaccaaggagcaggtgaccaacgtgggcggcgctgtggtgactggagtgacagctgtggcccagaagacagtggagggcgccggcagcattgctgctgccaccggctttgtgaagaaggaccagctgggcaaggagggctaccaggactatgagcctgaggcctag

SEQ ID NO: 172493 - DNA, 423 bp, synthetic construct; identical to SEQ ID NO: 172491
  misc_feature 1..423: note = Description of Artificial Sequence: Synthetic coding sequence
  source 1..423: mol_type = other DNA

SEQ ID NO: 172494 - DNA, 381 bp, synthetic construct
  misc_feature 1..381: note = Description of Artificial Sequence: Synthetic coding sequence
  source 1..381: mol_type = other DNA
atggatgtgttcatgaagggcctgagcaaggccaaggagggcgtggtggccgctgctgagaagaccaagcagggcgtggccgaggccgccggcaagaccaaggagggcgtgctgtatgtggtggccgagaagaccaaggagcaggtgaccaacgtgggcggcgctgtggtgactggagtgacagctgtggcccagaagacagtggagggcgccggcagcattgctgctgccaccggctttgtgaagaaggaccagctgggcaagaatgaggagggcgccccccaggagggcatcctggaggacatgcctgtggaccctgacaatgaggcctatgagatgcccagcgaggagggctaccaggactatgagcctgaggcctag

SEQ ID NO: 172495 - DNA, 423 bp, synthetic construct; identical to SEQ ID NO: 172491
  misc_feature 1..423: note = Description of Artificial Sequence: Synthetic coding sequence
  source 1..423: mol_type = other DNA

SEQ ID NO: 172496 - DNA, 339 bp, synthetic construct; identical to SEQ ID NO: 172492
  misc_feature 1..339: note = Description of Artificial Sequence: Synthetic coding sequence
  source 1..339: mol_type = other DNA

SEQ ID NO: 172497 - DNA, 348 bp, synthetic construct
  misc_feature 1..348: note = Description of Artificial Sequence: Synthetic coding sequence
  source 1..348: mol_type = other DNA
atggatgtgttcatgaagggcctgagcaaggccaaggagggcgtggtggccgctgctgagaagaccaagcagggcgtggccgaggccgccggcaagaccaaggagggcgtgctgtatgtgggcagcaagaccaaggagggcgtggtgcacggcgtggccaccgtggccgagaagaccaaggagcaggtgaccaacgtgggcggcgctgtggtgactggagtgacagctgtggcccagaagacagtggagggcgccggcagcattgctgctgccaccggctttgtgaagaaggaccagctgggcaaggtgtggctgtgcaccttctgtgtgaccttcatctcctggtag

SEQ ID NO: 172498 - DNA, 381 bp, synthetic construct; identical to SEQ ID NO: 172494
  misc_feature 1..381: note = Description of Artificial Sequence: Synthetic coding sequence
  source 1..381: mol_type = other DNA

SEQ ID NO: 172499 - DNA, 423 bp, synthetic construct; identical to SEQ ID NO: 172491
  misc_feature 1..423: note = Description of Artificial Sequence: Synthetic coding sequence
  source 1..423: mol_type = other DNA

SEQ ID NO: 172500 - DNA, 204 bp, synthetic construct
  misc_feature 1..204: note = Description of Artificial Sequence: Synthetic coding sequence
  source 1..204: mol_type = other DNA
atggatgtgttcatgaagggcctgagcaaggccaaggagggcgtggtggccgctgctgagaagaccaagcagggcgtggccgaggccgccggcaagaccaaggagggcgtgctgtatgtgggcagcaagaccaaggagggcgtggtgcacggcgtggccaccgtggccgagaagaccaaggagcaggtgaccaacgtgggctag

SEQ ID NO: 172501 - DNA, 423 bp, synthetic construct; identical to SEQ ID NO: 172491
  misc_feature 1..423: note = Description of Artificial Sequence: Synthetic coding sequence
  source 1..423: mol_type = other DNA

SEQ ID NO: 172502 - DNA, 2760 bp, synthetic construct
  misc_feature 1..2760: note = Description of Artificial Sequence: Synthetic coding sequence
  source 1..2760: mol_type = other DNA
atggaggcccctgagtacctggacctggatgaaattgacttcagtgatgacatctcctacagcgtgaccagcctgaagaccatccctgagctgtgcagaagatgtgacacccagaatgaagatagatctgtgagcagcagctcctggaactgtggcatcagcaccctcatcaccaacacccagaagcccaccggcattgctgatgtgtacagcaagttccggcctgtgaagagggtgagccccctgaagcaccagcctgagaccctggagaacaatgaaagtgatgaccagaagaaccagaaggtggtggagtaccagaagggcggggagagtgacctgggcccccagccccaggagctgggccctggagatggagtgggcggccccccaggcaagagcagcgagcccagcaccagcctgggggagctggagcactatgacctggacatggatgagatcctggatgtgccctacatcaagagcagccagcagctggccagcttcaccaaggtgaccagcgagaagaggatcctgggcctgtgcaccaccatcaatggcctgagcggcaaggcctgcagcacaggcagcagcgagagcagcagcagcaacatggcccccttctgtgtgctgagccctgtgaagagcccccacctgaggaaggccagcgctgtgattcatgaccagcacaagctgagcacagaggagacagagatcagcccccccctggtgaagtgtggcagcgcctatgagcctgagaaccagagcaaggacttcctgaacaagaccttcagtgacccccacggcaggaaggtggagaagaccaccccagactgccagctgcgggccttccacctgcagagcagcgctgctgagagcaagccagaggagcaggtgtctggcctgaacagaaccagcagccagggccctgaggagaggtctgagtacctgaagaaggtgaagagcatcctgaacatcgtgaaggagggccagatcagcctgctgccccacctggccgctgacaacctggacaagatccatgatgaaaatggaaacaacctgctgcacatcgccgccagccagggccatgctgagtgcctgcagcacctgaccagcctgatgggagaggactgcctgaatgaaagaaacacagagaagctgaccccagctggcctggccatcaagaatggccagctggagtgtgtgcgctggatggtgtctgaaacagaggccatcgccgagctgagctgcagcaaggacttccccagcctcatccactacgccggctgctacggccaggagaagatcctgctgtggctgctgcagttcatgcaggagcagggcatcagcctggatgaggtggaccaggacggcaacagcgctgtgcacgtggccagccagcacggctacctgggctgcatccagaccctggtggagtatggagccaacgtgaccatgcagaaccacgccggggagaagcccagccagagcgctgagcggcagggccacaccctgtgcagccgctacctggtggtggtggagacctgcatgagcctggccagccaggtggtgaagctgaccaagcagctgaaggagcagacagtggagcgggtgaccctgcagaaccagctgcagcagttcctggaggcccagaagtctgagggcaagagcctgcccagcagccccagcagccccagcagccctgccagcaggaagagccagtggaagagcccagatgctgatgatgattctgtggccaagagcaagccaggagtgcaggagggcatccaggtgctgggcagcctgagcgccagcagccgggcccggcccaaggccaaggatgaggacagcgacaagatcctgcggcagctgctgggcaaggagatcagtgaaaatgtgtgcacccaggagaagctgagcctggagttccaggatgcccaggccagcagcaggaacagcaagaagatccccctggagaagcgggagctgaagctggcccggctgcggcagctgatgcagaggagcctgtctgagagtgacacagacagcaacaacagcgaggaccccaagaccacccctgtgaggaaggctgaccggccccggccccagcccatcgtggagagcgtggagagcatggattctgctgagagcctgcacctgatgatcaagaagcacaccctggccagcggcggccgccgcttccccttcagcatcaaggccagcaagagcctggatggccacagccccagccccaccagcgagagcagcgagccagacctggagagccagtacccaggcagcggcagcatcccccccaaccagcccagcggggacccccagcagcccagcccagacagcacagctgcccagaaggtggccaccagccccaagagcgccctgaagagccccagcagcaagaggaggaccagccagaacctgaagctgcgggtgacctttgaggagcctgtggtgcagatggagcagcccagcctggagctgaatggagagaaggacaaggacaagggccgcaccctgcagaggaccagcaccagcaatgaaagtggggaccagctgaagaggccctttggagccttccgcagcatcatggagaccctgagcggcaaccagaacaacaacaacaactaccaggccgccaaccagctgaagaccagcaccctgcccctgaccagcctgggcaggaagacagatgccaagggcaacccagccagcagcgccagcaagggcaagaacaaggccgcctag

SEQ ID NO: 172503 - DNA, 3051 bp, synthetic construct
  misc_feature 1..3051: note = Description of Artificial Sequence: Synthetic coding sequence
  source 1..3051: mol_type = other DNA
atggaggcccctgagtacctggacctggatgaaattgacttcagtgatgacatcagtgacaacagaagccagggcaaccggctgcagaagctgggcctggaggacacagacagagaagatgccatgggcttcggcagccaccgggccaagctgactgtggtggccgccctgggcgcctgccactgcccagaaaatgagtacagcgtgaccagcctgaagaccatccctgagctgtgccgccgctgtgacacccagaatgaagatagatctgtgagcagcagctcctggaactgtggcatcagcaccctcatcaccaacacccagaagcccactggaattgctgatgtgtacagcaagttccggcctgtgaagagggtgagccccctgaagcaccagcctgagaccctggagaacaatgaaagtgatgaccagaagaaccagaaggtggtggagtaccagaagggcggggagagtgacctgggcccccagccccaggagctgggccctggagatggagtgggcggccccccaggcaagagcagcgagcccagcaccagcctgggggagctggagcactatgacctggacatggatgagatcctggatgtgccctacatcaagagcagccagcagctggccagcttcaccaaggtgaccagcgagaagaggatcctgggcctgtgcaccaccatcaatggcctgagcggcaaggcctgcagcacaggcagcagcgagagcagcagcagcaacatggcccccttctgtgtgctgagccctgtgaagagcccccacctgaggaaggccagcgctgtgattcatgaccagcacaagctgagcacagaggagacagagatcagcccccccctggtgaagtgtggcagcgcctatgagcctgagaaccagagcaaggacttcctgaacaagaccttcagtgacccccacggcaggaaggtggagaagaccaccccagactgccagctgcgggccttccacctgcagagcagcgctgctgagagcaagccagaggagcaggtgtctggcctgaacagaaccagcagccagggccctgaggagaggtctgagtacctgaagaaggtgaagagcatcctgaacatcgtgaaggagggccagatcagcctgctgccccacctggccgctgacaacctggacaagatccatgatgaaaatggaaacaacctgctgcacatcgccgccagccagggccacgcagaatgtctgcagcacctgaccagcctgatgggagaggactgcctgaatgaaagaaacacagagaagctgaccccagctggcctggccatcaagaatggccagctggagtgtgtgcgctggatggtgtctgaaacagaggccatcgccgagctgagctgcagcaaggacttccccagcctcatccactacgccggctgctacggccaggagaagatcctgctgtggctgctgcagttcatgcaggagcagggcatcagcctggatgaggtggaccaggacggcaacagcgctgtgcacgtggccagccagcacggctacctgggctgcatccagaccctggtggagtatggagccaacgtgaccatgcagaaccacgccggggagaagcccagccagagcgctgagcggcagggccacaccctgtgcagccgctacctggtggtggtggagacctgcatgagcctggccagccaggtggtgaagctgaccaagcagctgaaggagcagacagtggagcgggtgaccctgcagaaccagctgcagcagttcctggaggcccagaagtctgagggcaagagcctgcccagcagccccagcagccccagcagccctgccagcaggaagagccagtggaagagcccagatgctgatgatgacagcgtggccaagagcaagccaggagtgcaggagggcatccaggtgctgggcagcctgagcgccagcagccgggcccggcccaaggccaaggatgaagattctgacaagatcctgcggcagctgctgggcaaggagatcagtgaaaatgtgtgcacccaggagaagctgagcctggagttccaggatgcccaggccagcagcaggaacagcaagaagatccccctggagaagcgggagctgaagctggcccggctgcggcagctgatgcagaggagcctgtctgagagtgacacagacagcaacaacagcgaggaccccaagaccacccctgtgaggaaggctgaccggccccggccccagcccatcgtggagagcgtggagagcatggacagcgctgagagcctgcacctgatgatcaagaagcacaccctggccagcggcggccgccgcttccccttcagcatcaaggccagcaagagcctggatggccacagccccagccccaccagcgagagcagcgagccagacctggagagccagtacccaggcagcggcagcatcccccccaaccagcccagcggggacccccagcagcccagcccagacagcacagctgcccagaaggtggccaccagccccaagagcgccctgaagagccccagcagcaagaggaggaccagccagaacctgaagctgcgggtgacctttgaggagcctgtggtgcagatggagcagcccagcctggagctgaatggagagaaggacaaggacaagggccgcaccctgcagaggaccagcaccagcaatgaaagtggggaccagctgaagaggccctttggagccttccgcagcatcatggagaccctgagcggcaaccagaacaacaacaacaactaccaggccgccaaccagctgaagaccagcaccctgcccctgaccagcctgggcaggaagacagatgccaagggcaacccagccagcagcgccagcaagggcaagaacaaggccgagatgtacagcagctgcatcaacctgagcagcaacatgctgattgaggagcacctgtgcaatgacaccaggcacaatgacatcaacaggaagatgaagaagagctacagcatcaagcacatcgccgagcctgagagcaaggagctgttcctgtag

SEQ ID NO: 172504 - DNA, 2580 bp, synthetic construct
  misc_feature 1..2580: note = Description of Artificial Sequence: Synthetic coding sequence
  source 1..2580: mol_type = other DNA
atggaggcccctgagtacctggacctggatgaaattgacttcagtgatgacatctcctacagcgtgaccagcctgaagaccatccctgagctgtgcagaagatgtgacacccagaatgaagatagatctgtgagcagcagctcctggaactgtggcatcagcaccctcatcaccaacacccagaagcccaccggcattgctgatgtgtacagcaagttccggcctgtgaagagggtgagccccctgaagcaccagcctgagaccctggagaacaatgaaagtgatgaccagaagaaccagaaggtggtggagtaccagaagggcggggagagtgacctgggcccccagccccaggagctgggccctggagatggagtgggcggccccccaggcaagagcagcgagcccagcaccagcctgggggagctggagcactatgacctggacatggatgagatcctggatgtgccctacatcaagagcagccagcagctggccagcttcaccaaggtgaccagcgagaagaggatcctgggcctgtgcaccaccatcaatggcctgagcggcaaggcctgcagcacaggcagcagcgagagcagcagcagcaacatggcccccttctgtgtgctgagccctgtgaagagcccccacctgaggaaggccagcgctgtgattcatgaccagcacaagctgagcacagaggagacagagatcagcccccccctggtgaagtgtggcagcgcctatgagcctgagaaccagagcaaggacttcctgaacaagaccttcagtgacccccacggcaggaaggtggagaagaccaccccagactgccagctgcgggccttccacctgcagagcagcgctgctgagagcaagccagaggagcaggtgtctggcctgaacagaaccagcagccagggccctgaggagaggtctgagtacctgaagaaggtgaagagcatcctgaacatcgtgaaggagggccagatcagcctgctgaatggccagctggagtgtgtgcgctggatggtgtctgaaacagaggccatcgccgagctgagctgcagcaaggacttccccagcctcatccactacgccggctgctacggccaggagaagatcctgctgtggctgctgcagttcatgcaggagcagggcatcagcctggatgaggtggaccaggacggcaacagcgctgtgcacgtggccagccagcacggctacctgggctgcatccagaccctggtggagtatggagccaacgtgaccatgcagaaccacgccggggagaagcccagccagagcgctgagcggcagggccacaccctgtgcagccgctacctggtggtggtggagacctgcatgagcctggccagccaggtggtgaagctgaccaagcagctgaaggagcagacagtggagcgggtgaccctgcagaaccagctgcagcagttcctggaggcccagaagtctgagggcaagagcctgcccagcagccccagcagccccagcagccctgccagcaggaagagccagtggaagagcccagatgctgatgatgattctgtggccaagagcaagccaggagtgcaggagggcatccaggtgctgggcagcctgagcgccagcagccgggcccggcccaaggccaaggatgaggacagcgacaagatcctgcggcagctgctgggcaaggagatcagtgaaaatgtgtgcacccaggagaagctgagcctggagttccaggatgcccaggccagcagcaggaacagcaagaagatccccctggagaagcgggagctgaagctggcccggctgcggcagctgatgcagaggagcctgtctgagagtgacacagacagcaacaacagcgaggaccccaagaccacccctgtgaggaaggctgaccggccccggccccagcccatcgtggagagcgtggagagcatggattctgctgagagcctgcacctgatgatcaagaagcacaccctggccagcggcggccgccgcttccccttcagcatcaaggccagcaagagcctggatggccacagccccagccccaccagcgagagcagcgagccagacctggagagccagtacccaggcagcggcagcatcccccccaaccagcccagcggggacccccagcagcccagcccagacagcacagctgcccagaaggtggccaccagccccaagagcgccctgaagagccccagcagcaagaggaggaccagccagaacctgaagctgcgggtgacctttgaggagcctgtggtgcagatggagcagcccagcctggagctgaatggagagaaggacaaggacaagggccgcaccctgcagaggaccagcaccagcaatgaaagtggggaccagctgaagaggccctttggagccttccgcagcatcatggagaccctgagcggcaaccagaacaacaacaacaactaccaggccgccaaccagctgaagaccagcaccctgcccctgaccagcctgggcaggaagacagatgccaagggcaacccagccagcagcgccagcaagggcaagaacaaggccgcctag

SEQ ID NO: 172505 - DNA, 1812 bp, synthetic construct
  misc_feature 1..1812: note = Description of Artificial Sequence: Synthetic coding sequence
  source 1..1812: mol_type = other DNA
atgacctacctgatccagagccaccacagcagaagaagccagaactgtgccgaggatgtgatcaggaagaccaagacagaccagaatggccagctggagtgtgtgcgctggatggtgtctgaaacagaggccatcgccgagctgagctgcagcaaggacttccccagcctcatccactacgccggctgctacggccaggagaagatcctgctgtggctgctgcagttcatgcaggagcagggcatcagcctggatgaggtggaccaggacggcaacagcgctgtgcacgtggccagccagcacggctacctgggctgcatccagaccctggtggagtatggagccaacgtgaccatgcagaaccacgccggggagaagcccagccagagcgctgagcggcagggccacaccctgtgcagccgctacctggtggtggtggagacctgcatgagcctggccagccaggtggtgaagctgaccaagcagctgaaggagcagacagtggagcgggtgaccctgcagaaccagctgcagcagttcctggaggcccagaagtctgagggcaagagcctgcccagcagccccagcagccccagcagccctgccagcaggaagagccagtggaagagcccagatgctgatgatgattctgtggccaagagcaagccaggagtgcaggagggcatccaggtgctgggcagcctgagcgccagcagccgggcccggcccaaggccaaggatgaggacagcgacaagatcctgcggcagctgctgggcaaggagatcagtgaaaatgtgtgcacccaggagaagctgagcctggagttccaggatgcccaggccagcagcaggaacagcaagaagatccccctggagaagcgggagctgaagctggcccggctgcggcagctgatgcagaggagcctgtctgagagtgacacagacagcaacaacagcgaggaccccaagaccacccctgtgaggaaggctgaccggccccggccccagcccatcgtggagagcgtggagagcatggattctgctgagagcctgcacctgatgatcaagaagcacaccctggccagcggcggccgccgcttccccttcagcatcaaggccagcaagagcctggatggccacagccccagccccaccagcgagagcagcgagccagacctggagagccagtacccaggcagcggcagcatcccccccaaccagcccagcggggacccccagcagcccagcccagacagcacagctgcccagaaggtggccaccagccccaagagcgccctgaagagccccagcagcaagaggaggaccagccagaacctgaagctgcgggtgacctttgaggagcctgtggtgcagatggagcagcccagcctggagctgaatggagagaaggacaaggacaagggccgcaccctgcagaggaccagcaccagcaatgaaagtggggaccagctgaagaggccctttggagccttccgcagcatcatggagaccctgagcggcaaccagaacaacaacaacaactaccaggccgccaaccagctgaagaccagcaccctgcccctgaccagcctgggcaggaagacagatgccaagggcaacccagccagcagcgccagcaagggcaagaacaaggccgagatgtacagcagctgcatcaacctgagcagcaacatgctgattgaggagcacctgtgcaatgacaccaggcacaatgacatcaacaggaagatgaagaagagctacagcatcaagcacatcgccgagcctgagagcaaggagctgttcctgtag

SEQ ID NO: 172506 - DNA, 1566 bp, synthetic construct
  misc_feature 1..1566: note = Description of Artificial Sequence: Synthetic coding sequence
  source 1..1566: mol_type = other DNA
atgaagctgaccctggtgatgacctacctgatccagagccaccacagcagaagaagccagaactgtgccgaggatgtgatcaggaagaccaagacagaccaggagaagatcctgctgtggctgctgcagttcatgcaggagcagggcatcagcctggatgaggtggaccaggacggcaacagcgctgtgcacgtggccagccagcacggctacctgggctgcatccagaccctggtggagtatggagccaacgtgaccatgcagaaccacgccggggagaagcccagccagagcgctgagcggcagggccacaccctgtgcagccgctacctggtggtggtggagacctgcatgagcctggccagccaggtggtgaagctgaccaagcagctgaaggagcagacagtggagcgggtgaccctgcagaaccagctgcagcagttcctggaggcccagaagtctgagggcaagagcctgcccagcagccccagcagccccagcagccctgccagcaggaagagccagtggaagagcccagatgctgatgatgattctgtggccaagagcaagccaggagtgcaggagggcatccaggtgctgggcagcctgagcgccagcagccgggcccggcccaaggccaaggatgaggacagcgacaagatcctgcggcagctgctgggcaaggagatcagtgaaaatgtgtgcacccaggagaagctgagcctggagttccaggatgcccaggccagcagcaggaacagcaagaagatccccctggagaagcgggagctgaagctggcccggctgcggcagctgatgcagaggagcctgtctgagagtgacacagacagcaacaacagcgaggaccccaagaccacccctgtgaggaaggctgaccggccccggccccagcccatcgtggagagcgtggagagcatggattctgctgagagcctgcacctgatgatcaagaagcacaccctggccagcggcggccgccgcttccccttcagcatcaaggccagcaagagcctggatggccacagccccagccccaccagcgagagcagcgagccagacctggagagccagtacccaggcagcggcagcatcccccccaaccagcccagcggggacccccagcagcccagcccagacagcacagctgcccagaaggtggccaccagccccaagagcgccctgaagagccccagcagcaagaggaggaccagccagaacctgaagctgcgggtgacctttgaggagcctgtggtgcagatggagcagcccagcctggagctgaatggagagaaggacaaggacaagggccgcaccctgcagaggaccagcaccagcaatgaaagtggggaccagctgaagaggccctttggagccttccgcagcatcatggagaccctgagcggcaaccagaacaacaacaacaactaccaggccgccaaccagctgaagaccagcaccctgcccctgaccagcctgggcaggaagacagatgccaagggcaacccagccagcagcgccagcaagggcaagaacaaggccgcctag

SEQ ID NO: 172507 - DNA, 1146 bp, synthetic construct
  misc_feature 1..1146: note = Description of Artificial Sequence: Synthetic coding sequence
  source 1..1146: mol_type = other DNA
atgaagctgaccctggtgatgacctacctgatccagagccaccacagcagaagaagccagaactgtgccgaggatgtgatcaggaagaccaagacagaccagaatggccagctggagtgtgtgcgctggatggtgtctgaaacagaggccatcgccgagctgagctgcagcaaggacttccccagcctcatccactacgccggctgctacggccaggagaagatcctgctgtggctgctgcagttcatgcaggagcagggcatcagcctggatgaggtggaccaggacggcaacagcgctgtgcacgtggccagccagcacggctacctgggctgcatccagaccctggtggagtatggagccaacgtgaccatgcagaaccacgccggggagaagcccagccagagcgctgagcggcagggccacaccctgtgcagccgctacctggtggtggtggagacctgcatgagcctggccagccaggtggtgaagctgaccaagcagctgaaggagcagacagtggagcgggtgaccctgcagaaccagctgcagcagttcctggaggcccagaagtctgagggcaagagcctgcccagcagccccagcagccccagcagccctgccagcaggaagagccagtggaagagcccagatgctgatgatgattctgtggccaagagcaagccaggagtgcaggagggcatccaggtgctgggcagcctgagcgccagcagccgggcccggcccaaggccaaggatgaggacagcgacaagatcctgcggcagctgctgggcaaggagatcagtgaaaatgtgtgcacccaggagaagctgagcctggagttccaggatgcccaggccagcagcaggaacagcaagaagatccccctggagaagcgggagctgaagctggcccggctgcggcagctgatgcagaggagcctgtctgagagtgacacagacagcaacaacagcgaggaccccaagaccacccctgtgaggaaggctgaccggccccggccccagcccatcgtggagagcgtggagagcatggattctgctggcttcctgagcgccagccggccccccaacccctggatggccacagcccacctgcccccccagagagctgccaaccagacctag

SEQ ID NO: 172508 - DNA, 1767 bp, synthetic construct
  misc_feature 1..1767: note = Description of Artificial Sequence: Synthetic coding sequence
  source 1..1767: mol_type = other DNA
atggaggcccctgagtacctggacctggatgaaattgacttcagtgatgacatcagtgacaacagaagccagggcaaccggctgcagaagctgggcctggaggacacagacagagaagatgccatgggcttcggcagccaccgggccaagctgactgtggtggccgccctgggcgcctgccactgcccagaaaatgagtacagcgtgaccagcctgaagaccatccctgagctgtgccgccgctgtgacacccagaatgaagatagatctgtgagcagcagctcctggaactgtggcatcagcaccctcatcaccaacacccagaagcccactggaattgctgatgtgtacagcaagttccggcctgtgaagagggtgagccccctgaagcaccagcctgagaccctggagaacaatgaaagtgatgaccagaagaaccagaaggtggtggagtaccagaagggcggggagagtgacctgggcccccagccccaggagctgggccctggagatggagtgggcggccccccaggcaagagcagcgagcccagcaccagcctgggggagctggagcactatgacctggacatggatgagatcctggatgtgccctacatcaagagcagccagcagctggccagcttcaccaaggtgaccagcgagaagaggatcctgggcctgtgcaccaccatcaatggcctgagcggcaaggcctgcagcacaggcagcagcgagagcagcagcagcaacatggcccccttctgtgtgctgagccctgtgaagagcccccacctgaggaaggccagcgctgtgattcatgaccagcacaagctgagcacagaggagacagagatcagcccccccctggtgaagtgtggcagcgcctatgagcctgagaaccagagcaaggacttcctgaacaagaccttcagtgacccccacggcaggaaggtggagaagaccaccccagactgccagctgcgggccttccacctgcagagcagcgctgctgagagcaagccagaggagcaggtgtctggcctgaacagaaccagcagccagggccctgaggagaggtctgagtacctgaagaaggtgaagagcatcctgaacatcgtgaaggagggccagatcagcctgctgccccacctggccgctgacaacctggacaagatccatgatgaaaatggaaacaacctgctgcacatcgccgccagccagggccacgcagaatgtctgcagcacctgaccagcctgatgggagaggactgcctgaatgaaagaaacacagagaagctgaccccagctggcctggccatcaagaatggccagctggagtgtgtgcgctggatggtgtctgaaacagaggccatcgccgagctgagctgcagcaaggacttccccagcctcatccactacgccggctgctacggccaggagaagatcctgctgtggctgctgcagttcatgcaggagcagggcatcagcctggatgaggtggaccaggacggcaacagcgctgtgcacgtggccagccagcacggctacctgggctgcatccagacccggctgaagatccagggcacctggaatggaagtgagacctgcctcttcacccaccacttcagcagctacccacccatcagcagcggcctgcagtgccagggccaggagggcgtgctcttcatcccagaccaggtgggcgccgccaccaacaagcaggtgctcttccagaaccagctgcctgagaccaagagcagctactag

SEQ ID NO: 172509 - DNA, 267 bp, synthetic construct
  misc_feature 1..267: note = Description of Artificial Sequence: Synthetic coding sequence
  source 1..267: mol_type = other DNA
atggaggcccctgagtacctggacctggatgaaattgacttcagtgatgacatctcctacagcgtgaccagcctgaagaccatccctgagctgtgcagaagatgtgacacccagaatgaagatagaagtgccacccccagctgccggcagagccggcagaacagcaggaggaagtggaagcagagcatcacctactgcggcgtgacaggcacccggcgggtgtccacagccccccacttctttgatggccggcggctgccccagtag

SEQ ID NO: 172510 - DNA, 297 bp, synthetic construct
  misc_feature 1..297: note = Description of Artificial Sequence: Synthetic coding sequence
  source 1..297: mol_type = other DNA
atggaggcccctgagtacctggacctggatgaaattgacttcagtgatgacatctcctacagcgtgaccagcctgaagaccatccctgagctgtgcagaagatgtgacacccagaatgaagatagatctgtgagcagcagctcctggaactgtggcatcagcaccctcatcaccaacacccagaagcccaccggcattgctgatgtgtacagcaagttccggcctgtgaagagggtgagccccctgaagcaccagcctgagaccctggagaacaatgaaagtgatgaccagaagtag

SEQ ID NO: 172511 - DNA, 45 bp, synthetic construct
  misc_feature 1..45: note = Description of Artificial Sequence: Synthetic coding sequence
  source 1..45: mol_type = other DNA
atggaggcccctgagtacctggacctggatgaaattgacttctag

SEQ ID NO: 172512 - DNA, 408 bp, synthetic construct
  misc_feature 1..408: note = Description of Artificial Sequence: Synthetic coding sequence
  source 1..408: mol_type = other DNA
atggaggcccctgagtacctggacctggatgaaattgacttcagtgatgacatctcctacagcgtgaccagcctgaagaccatccctgagctgtgcagaagatgtgacacccagaatgaagatagatctgtgagcagcagctcctggaactgtggcatcagcaccctcatcaccaacacccagaagcccaccggcattgctgatgtgtacagcaagttccggcctgtgaagagggtgagccccctgaagcaccagcctgagaccctggagaacaatgaaagtgatgaccagaagaaccagaaggtggtggagtaccagaagggcggggagagtgacctgggcccccagccccaggagctgggccctggagatggagtgggcggccccccaggcaagagcagcgagtag

SEQ ID NO: 172513 - DNA, 1434 bp, synthetic construct
  misc_feature 1..1434: note = Description of Artificial Sequence: Synthetic coding sequence
  source 1..1434: mol_type = other DNA
atgcaggagcagggcatcagcctggatgaggtggaccaggacggcaacagcgctgtgcacgtggccagccagcacggctacctgggctgcatccagaccctggtggagtatggagccaacgtgaccatgcagaaccacgccggggagaagcccagccagagcgctgagcggcagggccacaccctgtgcagccgctacctggtggtggtggagacctgcatgagcctggccagccaggtggtgaagctgaccaagcagctgaaggagcagacagtggagcgggtgaccctgcagaaccagctgcagcagttcctggaggcccagaagtctgagggcaagagcctgcccagcagccccagcagccccagcagccctgccagcaggaagagccagtggaagagcccagatgctgatgatgattctgtggccaagagcaagccaggagtgcaggagggcatccaggtgctgggcagcctgagcgccagcagccgggcccggcccaaggccaaggatgaggacagcgacaagatcctgcggcagctgctgggcaaggagatcagtgaaaatgtgtgcacccaggagaagctgagcctggagttccaggatgcccaggccagcagcaggaacagcaagaagatccccctggagaagcgggagctgaagctggcccggctgcggcagctgatgcagaggagcctgtctgagagtgacacagacagcaacaacagcgaggaccccaagaccacccctgtgaggaaggctgaccggccccggccccagcccatcgtggagagcgtggagagcatggattctgctgagagcctgcacctgatgatcaagaagcacaccctggccagcggcggccgccgcttccccttcagcatcaaggccagcaagagcctggatggccacagccccagccccaccagcgagagcagcgagccagacctggagagccagtacccaggcagcggcagcatcccccccaaccagcccagcggggacccccagcagcccagcccagacagcacagctgcccagaaggtggccaccagccccaagagcgccctgaagagccccagcagcaagaggaggaccagccagaacctgaagctgcgggtgacctttgaggagcctgtggtgcagatggagcagcccagcctggagctgaatggagagaaggacaaggacaagggccgcaccctgcagaggaccagcaccagcaatgaaagtggggaccagctgaagaggccctttggagccttccgcagcatcatggagaccctgagcggcaaccagaacaacaacaacaactaccaggccgccaaccagctgaagaccagcaccctgcccctgaccagcctgggcaggaagacagatgccaagggcaacccagccagcagcgccagcaagggcaagaacaaggccgcctag

SEQ ID NO: 172514 - DNA, 405 bp, synthetic construct
  misc_feature 1..405: note = Description of Artificial Sequence: Synthetic coding sequence
  source 1..405: mol_type = other DNA
atggatgtgttcatgaagggcctgtccatggccaaggagggcgtggtggccgctgctgagaagaccaagcagggcgtgacagaagctgctgagaagaccaaggagggcgtgctgtatgtgggcagcaagacccgggagggcgtggtgcagggcgtggcctctgtggccgagaagaccaaggagcaggccagccacctgggcggcgctgtgttcagcggggccggcaacattgctgctgccaccggcctggtgaagcgggaggagttccccacagacctgaagccagaggaggtggcccaggaggccgctgaggagcccctcatcgagcccctgatggagcctgagggggagagctatgaggaccccccccaggaggagtaccaggagtatgagcctgaggcctag

SEQ ID NO: 172515 - DNA, 405 bp, synthetic construct; identical to SEQ ID NO: 172514
  misc_feature 1..405: note = Description of Artificial Sequence: Synthetic coding sequence
  source 1..405: mol_type = other DNA

SEQ ID NO: 172516 - DNA, 405 bp, synthetic construct; identical to SEQ ID NO: 172514
  misc_feature 1..405: note = Description of Artificial Sequence: Synthetic coding sequence
  source 1..405: mol_type = other DNA

SEQ ID NO: 172517 - DNA, 405 bp, synthetic construct; identical to SEQ ID NO: 172514
  misc_feature 1..405: note = Description of Artificial Sequence: Synthetic coding sequence
  source 1..405: mol_type = other DNA

SEQ ID NO: 172518 - DNA, 381 bp, synthetic construct
  misc_feature 1..381: note = Description of Artificial Sequence: Synthetic coding sequence
  source 1..381: mol_type = other DNA
atggatgtgttcaagaagggcttcagcatcgccaaggagggcgtggtgggcgctgtggagaagaccaagcagggcgtgacagaagctgctgagaagaccaaggagggcgtgatgtatgtgggcgccaagaccaaggaaaatgtggtgcagagcgtgaccagcggcctgccctggggctggggctggggcggcggccagcctgtgagcagccacagcggccgggaggaccagggcgccggccagaggcgggagcggggctgtggggagcagaggcagcactgcggccaccaggaccggggcggcggcggggagcaccggggccacctgcggggcggggcccagggcggcctggaggccatctgcccccccaccggcggctag

SEQ ID NO: 172519 - DNA, 384 bp, synthetic construct
  misc_feature 1..384: note = Description of Artificial Sequence: Synthetic coding sequence
  source 1..384: mol_type = other DNA
atggatgtgttcaagaagggcttcagcatcgccaaggagggcgtggtgggcgctgtggagaagaccaagcagggcgtgacagaagctgctgagaagaccaaggagggcgtgatgtatgtgggcgccaagaccaaggaaaatgtggtgcagagcgtgacctctgtggccgagaagaccaaggagcaggccaatgctgtgtctgaggccgtggtgtcctctgtgaacacagtggccaccaagacagtggaggaggccgagaacattgctgtgaccagcggcgtggtgaggaaggaggacctgcggcccagcgccccccagcaggagggggaggccagcaaggagaaggaggaggtggccgaggaggcccagagcggcggggactag

SEQ ID NO: 172520 - DNA, 471 bp, synthetic construct
  misc_feature 1..471: note = Description of Artificial Sequence: Synthetic coding sequence
  source 1..471: mol_type = other DNA
atggccggccagttccgctcctatgtgtgggaccccctgctgatcctgagccagatcgtgctgatgcagacagtgtactacggcagcctgggcctgtggctggccctggtggatggcctggtgcgcagcagccccagcctggaccagatgtttgatgctgagatcctgggcttcagcaccccacctggccgcctgtccatgatgtccttcatcctgaatgccctgacctgtgccctgggcctgctgtacttcatccggcggggcaagcagtgcctggacttcaccgtgacagtgcacttcttccacctgctgggctgctggttctacagcagccgcttccccagcgccctgacctggtggctggtgcaggccgtgtgcatcgccctgatggctgtgattggagagtacctgtgcatgaggacagagctgaaggagatccccctgaacagcgcccccaagagcaatgtgtag

SEQ ID NO: 172521 - DNA, 471 bp, synthetic construct; identical to SEQ ID NO: 172520
  misc_feature 1..471: note = Description of Artificial Sequence: Synthetic coding sequence
  source 1..471: mol_type = other DNA

SEQ ID NO: 172522 - DNA, 357 bp, synthetic construct
  misc_feature 1..357: note = Description of Artificial Sequence: Synthetic coding sequence
  source 1..357: mol_type = other DNA
atggccggccagttccgctcctatgtgtgggaccccctgctgatcctgagccagatcgtgctgatgcagacagtgtactacggcagcctgggcctgtggctggccctggtggatggcctggtgcgcagcagccccagcctggaccagatgtttgatgctgagatcctgggcttcagcaccccacctggccgcctgtccatgatgtccttcatcctgaatgccctgacctgtgccctgggcctgctgtacttcatccggcggggcaagcagtgcctggacttcaccgtgacagtgcacttcttccacctgctgggctgctggttctacagcagccgcttccccagcgccctgacctag

SEQ ID NO: 172523 - DNA, 231 bp, synthetic construct
  misc_feature 1..231: note = Description of Artificial Sequence: Synthetic coding sequence
  source 1..231: mol_type = other DNA
atggccggccagttccgctcctatgtgtgggaccccctgctgatcctgagccagatcgtgctgatgcagacagtgtactacggcagcctgggcctgtggctggccctggtggatggcctggtgcgcagcagccccagcctggaccagatgtttgatgctgagatcctgggcttcagcaccccacctggccgcctgtccatgatgtccttcatcctgaatgccctgacctag

SEQ ID NO: 172524 - DNA, 1134 bp, synthetic construct
  misc_feature 1..1134: note = Description of Artificial Sequence: Synthetic coding sequence
  source 1..1134: mol_type = other DNA
atgagcagccctggaacagagagcgctgggaagagcctgcagtacagagtggaccacctgctgtctgctgtggagaatgagctgcaggccggcagcgagaagggggaccccacagagcgggagctgcgggtgggcctggaggagagcgagctgtggctgcgcttcaaggagctgaccaatgagatgattgtgaccaagaatggaagaaggatgtttcctgtgctgaaggtgaatgtgtctggcctggaccccaatgccatgtacagcttcctgctggactttgtggccgctgacaaccaccgctggaagtatgtgaatggagagtgggtgcctgggggcaagccagagccccaggcccccagctgtgtgtacatccacccagacagccccaactttggagcccactggatgaaggcccctgtgtccttcagcaaggtgaagctgaccaacaagctgaatggaggcggccagatcatgctgaacagcctgcacaagtatgagccccgcatccacatcgtgcgggtgggcggcccccagaggatgatcaccagccactgcttccctgagacccagttcatcgctgtgacagcctaccagaatgaggagatcacagccctgaagatcaagtacaacccctttgccaaggccttcctggatgccaaggagaggagtgaccacaaggagatgatggaggagcccggggacagccagcagcccggctacagccagagctacagcgacaacagccctgcctgcctgtccatgctgcagagccatgacaactggagcagcctgggcatgcctgcccaccccagcatgctgcctgtgagccacaatgccagcccccccaccagcagcagccagtaccccagcctgtggagcgtgtccaatggagctgtgaccccaggcagccaggccgctgctgtgtccaatggcctgggcgcccagttcttccggggcagccctgcccactacacccccctgacccaccctgtgtctgcccccagcagcagcggcagccccctgtatgaaggagctgctgctgccacagacatcgtggacagccagtatgatgctgctgcccagggccgcctcatcgcctcctggacccctgtgagcccccccagcatgtag

SEQ ID NO: 172525 - DNA, 735 bp, synthetic construct
  misc_feature 1..735: note = Description of Artificial Sequence: Synthetic coding sequence
  source 1..735: mol_type = other DNA
atgcgctggtgcctgctgctgatctgggcccagggcctgcggcaggcccccctggccagcggcatgatgacaggcaccatcgagaccaccggcaacatctctgctgagaagggcggcagcatcatcctgcagtgccacctgagcagcaccacagcccaggtgacccaggtgaactgggagcagcaggaccagctgctggccatctgcaatgctgacctgggctggcacatcagccccagcttcaaggacagagtggcccctggccctggcctgggcctgaccctgcagagcctgactgtgaatgacacaggagagtacttctgcatctaccacacctacccagatggcacctacacaggccgcatcttcctggaggtgctggagagctctgtggccgagcacggggcccgcttccagatccccctgctgggcgccatggccgccaccctggtggtgatctgcacagctgtgattgtggtggtggccctgaccaggaagaagaaggccctgcgcatccacagcgtggagggggacctgcggaggaagtctgctggccaggaggagtggagccccagcgcccccagccccccaggcagctgtgtgcaggccgaggccgccccagctggcctgtgtggggagcagagaggagaggactgtgccgagctgcatgactacttcaacgtgctgagctaccgcagcctgggcaactgcagcttcttcacagaaacaggatag

SEQ ID NO: 172526 - DNA, 936 bp, synthetic construct
  misc_feature 1..936: note = Description of Artificial Sequence: Synthetic coding sequence
  source 1..936: mol_type = other DNA
atggccttcctggtggcccaccccatgcagtttgtgtacctgctgaccaccctgtgtgtgttcaacatggtgtttgccaagctgggcttcagcgagaccgtcttcagccagaggctgtccttcaccgtgctgtctgctgtgggctacttccagtggcagaagaggccccacctgctgcctgtgggccccctgggccgctccatgcgctggtgcctgctgctgatctgggcccagggcctgcggcaggcccccctggccagcggcatgatgacaggcaccatcgagaccactggaaacatctctgctgagaagggcggcagcatcatcctgcagtgccacctgagcagcaccacagcccaggtgacccaggtgaactgggagcagcaggaccagctgctggccatctgcaatgctgacctgggctggcacatcagccccagcttcaaggacagagtggcccctggccctggcctgggcctgaccctgcagagcctgactgtgaatgacaccggggagtacttctgcatctaccacacctacccagatggcacctacacaggccgcatcttcctggaggtgctggagagctctgtggccgagcacggggcccgcttccagatccccctgctgggcgccatggccgccaccctggtggtgatctgcacagctgtgattgtggtggtggccctgaccaggaagaagaaggccctgcgcatccacagcgtggagggggacctgcggaggaagtctgctggccaggaggagtggagccccagcgcccccagccccccaggcagctgtgtgcaggccgaggccgccccagctggcctgtgtggggagcagagaggagaggactgtgccgagctgcatgactacttcaacgtgctgagctaccgcagcctgggcaactgcagcttcttcacagagaccggctag

SEQ ID NO: 172527 - DNA, 735 bp, synthetic construct; identical to SEQ ID NO: 172525
  misc_feature 1..735: note = Description of Artificial Sequence: Synthetic coding sequence
  source 1..735: mol_type = other DNA

SEQ ID NO: 172528 - DNA, 561 bp, synthetic construct
  misc_feature 1..561: note = Description of Artificial Sequence: Synthetic coding sequence
  source 1..561: mol_type = other DNA
atgagcggcatcagcggctgccccttcttcctgtggggcctgctggccctgctgggcctggccctggtgatcagcctcatcttcaacatcagccactacgtggagaagcagaggcaggacaagatgtacagctacagcagtgaccacaccagggtggatgagtactacatcgaggacacccccatctacggcaacctggatgacatgatcagcgagcccatggatgagaactgctatgagcagatgaaggcccggcctgagaagtctgtgaacaagatgcaggaggccaccccatctgcccaggccaccaatgagacccagatgtgctacgccagcctggaccacagcgtgaagggcaagaggaggaagcccaggaagcagaacacccacttcagtgacaaggatggagatgagcagctgcacgccattgatgcctctgtgtccaagaccaccctggtggacagcttcagccctgagagccaggccgtggaggagaacatccatgatgaccccatccggctgtttggcctcatccgggccaagcgggagcccatcaactag

SEQ ID NO: 172529 - DNA, 1308 bp, synthetic construct
  misc_feature 1..1308: note = Description of Artificial Sequence: Synthetic coding sequence
  source 1..1308: mol_type = other DNA
atgagcagccctggaacagagagcgctgggaagagcctgcagtacagagtggaccacctgctgtctgctgtggagaatgagctgcaggccggcagcgagaagggggaccccacagagcgggagctgcgggtgggcctggaggagagcgagctgtggctgcgcttcaaggagctgaccaatgagatgattgtgaccaagaatggaagaaggatgtttcctgtgctgaaggtgaatgtgtctggcctggaccccaatgccatgtacagcttcctgctggactttgtggccgctgacaaccaccgctggaagtatgtgaatggagagtgggtgcctgggggcaagccagagccccaggcccccagctgtgtgtacatccacccagacagccccaactttggagcccactggatgaaggcccctgtgtccttcagcaaggtgaagctgaccaacaagctgaatggaggcggccagatcatgctgaacagcctgcacaagtatgagccccgcatccacatcgtgcgggtgggcggcccccagaggatgatcaccagccactgcttccctgagacccagttcatcgctgtgacagcctaccagaatgaggagatcacagccctgaagatcaagtacaacccctttgccaaggccttcctggatgccaaggagaggagtgaccacaaggagatgatggaggagcccggggacagccagcagcccggctacagccagtggggctggctgctgcccggcaccagcaccctgtgccccccagccaacccccacccccagtttggaggagccctgagcctgcccagcacccacagctgtgaccgctaccccaccctgcggagccacaggagcagcccctaccccagcccctatgcccacaggaacaacagccccacctacagcgacaacagccctgcctgcctgtccatgctgcagagccatgacaactggagcagcctgggcatgcctgcccaccccagcatgctgcctgtgagccacaatgccagcccccccaccagcagcagccagtaccccagcctgtggagcgtgtccaatggagctgtgaccccaggcagccaggccgctgctgtgtccaatggcctgggcgcccagttcttccggggcagccctgcccactacacccccctgacccaccctgtgtctgcccccagcagcagcggcagccccctgtatgaaggagctgctgctgccacagacatcgtggacagccagtatgatgctgctgcccagggccgcctcatcgcctcctggacccctgtgagcccccccagcatgtag

SEQ ID NO: 172530 - DNA, 732 bp, synthetic construct
  misc_feature 1..732: note = Description of Artificial Sequence: Synthetic coding sequence
  source 1..732: mol_type = other DNA
atgagcagccctggaacagagagcgctgggaagagcctgcagtacagagtggaccacctgctgtctgctgtggagaatgagctgcaggccggcagcgagaagggggaccccacagagcgggagctgcgggtgggcctggaggagagcgagctgtggctgcgcttcaaggagctgaccaatgagatgattgtgaccaagaatggaagaaggatgtttcctgtgctgaaggtgaatgtgtctggcctggaccccaatgccatgtacagcttcctgctggactttgtggccgctgacaaccaccgctggaagtatgtgaatggagagtgggtgcctgggggcaagccagagccccaggcccccagctgtgtgtacatccacccagacagccccaactttggagcccactggatgaaggcccctgtgtccttcagcaaggtgaagctgaccaacaagctgaatggaggcggccagatcatgctgaacagcctgcacaagtatgagccccgcatccacatcgtgcgggtgggcggcccccagaggatgatcaccagccactgcttccctgagacccagttcatcgctgtgacagcctaccagaatgaggagatcacagccctgaagatcaagtacaacccctttgccaaggccttcctggatgccaaggagaggagtgaccacaaggagatgatggaggagcccggggacagccagcagcccggctacagccagtag

SEQ ID NO: 172531 - DNA, 366 bp, synthetic construct
  misc_feature 1..366: note = Description of Artificial Sequence: Synthetic coding sequence
  source 1..366: mol_type = other DNA
atgaggatcatgctgctcttcaccgccatcctggccttcagcctggcccagagctttggagctgtgtgcaaggagccccaggaggaggtggtgcctgggggcggccgcagcaagagggaccctgacctgtaccagctgctgcagaggctcttcaagagccacagcagcctggagggcctgctgaaggccctgagccaggccagcacagaccccaaggagagcaccagccctgagaagagggacatgcatgacttctttgtgggcctgatgggcaagaggtctgtgcagcctgacagccccacagatgtgaaccaggagaatgtgcccagctttggcatcctgaagtacccacccagggctgagtag

SEQ ID NO: 172532 - DNA, 366 bp, synthetic construct; identical to SEQ ID NO: 172531
  misc_feature 1..366: note = Description of Artificial Sequence: Synthetic coding sequence
  source 1..366: mol_type = other DNA

SEQ ID NO: 172533 - DNA, 312 bp, synthetic construct
  misc_feature 1..312: note = Description of Artificial Sequence: Synthetic coding sequence
  source 1..312: mol_type = other DNA
atgaggatcatgctgctcttcaccgccatcctggccttcagcctggcccagagctttggagctgtgtgcaaggagccccaggaggaggtggtgcctgggggcggccgcagcaagagggaccctgacctgtaccagctgctgcagaggctcttcaagagccacagcagcctggagggcctgctgaaggccctgagccaggccagcacagaccccaaggagagcaccagccctgagaagcacagccccacagatgtgaaccaggagaatgtgcccagctttggcatcctgaagtacccacccagggctgagtag

SEQ ID NO: 172534 - DNA, 366 bp, synthetic construct; identical to SEQ ID NO: 172531
  misc_feature 1..366: note = Description of Artificial Sequence: Synthetic coding sequence
  source 1..366: mol_type = other DNA

SEQ ID NO: 172535 - DNA, 1224 bp, synthetic construct
  misc_feature 1..1224: note = Description of Artificial Sequence: Synthetic coding sequence
  source 1..1224: mol_type = other DNA
atggacaacgtgctgcctgtggacagcgacctgagccccaacatcagcaccaacaccagcgagcccaaccagtttgtgcagcctgcctggcagatcgtgctgtgggccgccgcctacaccgtcatcgtggtgacctctgtggtgggcaatgtggtggtgatgtggatcatcctggcccacaagaggatgaggacagtgaccaactacttcctggtgaacctggcctttgctgaggcctccatggccgccttcaacacagtggtgaacttcacctatgctgtgcacaatgagtggtactacggcctcttctactgcaagttccacaacttcttccccatcgctgctgtgtttgccagcatctacagcatgacagctgtggcctttgaccgctacatggccatcatccaccccctgcagccccggctgagcgccacagccaccaaggtggtgatctgtgtgatctgggtgctggccctgctgctggccttcccccagggctactacagcaccacagagaccatgcccagccgggtggtgtgcatgattgagtggccagagcaccccaacaagatctatgagaaggtgtaccacatctgtgtgacagtgctgatctacttcctgcccctgctggtgattggctacgcctacacagtggtgggcatcaccctgtgggccagcgagatccctggggacagcagtgaccgctaccacgagcaggtgtctgccaagaggaaggtggtgaagatgatgattgtggtggtgtgcacctttgccatctgctggctgcccttccacatcttcttcctgctgccctacatcaacccagacctgtacctgaagaagttcatccagcaggtgtacctggccatcatgtggctggccatgagcagcaccatgtacaaccccatcatctactgctgcctgaatgaccgcttccggctgggcttcaagcacgccttccgctgctgccccttcatctctgctggggactatgagggcctggagatgaagagcacccgctacctgcagacccagggctctgtgtacaaggtgtcccggctggagaccaccatcagcacagtggtgggcgcccacgaggaggagccagaagatggccccaaggccacccccagcagcctggacctgaccagcaactgcagcagcagaagtgacagcaagaccatgacagagagcttctccttcagcagcaatgtgctgtcctag

SEQ ID NO: 172536 - DNA, 936 bp, synthetic construct
  misc_feature 1..936: note = Description of Artificial Sequence: Synthetic coding sequence
  source 1..936: mol_type = other DNA
atggacaacgtgctgcctgtggacagcgacctgagccccaacatcagcaccaacaccagcgagcccaaccagtttgtgcagcctgcctggcagatcgtgctgtgggccgccgcctacaccgtcatcgtggtgacctctgtggtgggcaatgtggtggtgatgtggatcatcctggcccacaagaggatgaggacagtgaccaactacttcctggtgaacctggcctttgctgaggcctccatggccgccttcaacacagtggtgaacttcacctatgctgtgcacaatgagtggtactacggcctcttctactgcaagttccacaacttcttccccatcgctgctgtgtttgccagcatctacagcatgacagctgtggcctttgaccgctacatggccatcatccaccccctgcagccccggctgagcgccacagccaccaaggtggtgatctgtgtgatctgggtgctggccctgctgctggccttcccccagggctactacagcaccacagagaccatgcccagccgggtggtgtgcatgattgagtggccagagcaccccaacaagatctatgagaaggtgtaccacatctgtgtgacagtgctgatctacttcctgcccctgctggtgattggctacgcctacacagtggtgggcatcaccctgtgggccagcgagatccctggggacagcagtgaccgctaccacgagcaggtgtctgccaagaggaaggtggtgaagatgatgattgtggtggtgtgcacctttgccatctgctggctgcccttccacatcttcttcctgctgccctacatcaacccagacctgtacctgaagaagttcatccagcaggtgtacctggccatcatgtggctggccatgagcagcaccatgtacaaccccatcatctactgctgcctgaatgacagatag

SEQ ID NO: 172537 - DNA, 1197 bp, synthetic construct
  misc_feature 1..1197: note = Description of Artificial Sequence: Synthetic coding sequence
  source 1..1197: mol_type = other DNA
atgggcacctgtgacatcgtgacagaggccaacatcagcagcggccctgagagcaacaccaccggcatcacagccttctccatgcccagctggcagctggccctgtgggccacagcctacctggccctggtgctggtggccgtgactggaaatgccatcgtcatctggatcatcctggcccacaggaggatgaggacagtgaccaactacttcatcgtgaacctggccctggccgacctgtgcatggccgccttcaatgctgccttcaactttgtgtatgccagccacaacatctggtacttcggccgggccttctgctacttccagaacctcttccccatcacagccatgtttgtgtccatctacagcatgacagccatcgctgctgaccgctacatggccatcgtgcaccccttccagccccggctgagcgcccccagcaccaaggctgtgattgctggcatctggctggtggccctggccctggccagcccccagtgcttctacagcacagtgaccatggaccagggcgccaccaagtgtgtggtggcctggccagaagattctgggggcaagaccctgctgctgtaccacctggtggtgattgccctgatctacttcctgcccctggccgtgatgtttgtggcctacagcgtcatcggcctgaccctgtggaggagagctgtgcccggccaccaggcccatggagccaacctgcggcacctgcaggccatgaagaagtttgtgaagaccatggtgctggtggtgctgacctttgccatctgctggctgccctaccacctgtacttcatcctgggcagcttccaggaggacatctactgccacaagttcatccagcaggtgtacctggccctcttctggctggccatgagcagcaccatgtacaaccccatcatctactgctgcctgaaccaccgcttccgcagcggcttccggctggccttccgctgctgcccctgggtgacccccaccaaggaggacaagctggagctgacccccaccaccagcctgagcaccagggtgaaccgctgccacaccaaggagaccctcttcatggccggggacacagcccccagcgaggccaccagcggggaggccggccggccccaggacggcagcggcctgtggtttggctacggcctgctggcccccaccaagacccacgtggagatctag

SEQ ID NO: 172538 - DNA, 561 bp, synthetic construct
  misc_feature 1..561: note = Description of Artificial Sequence: Synthetic coding sequence
  source 1..561: mol_type = other DNA
atgtttgtggcctacagcgtcatcggcctgaccctgtggaggagagctgtgcccggccaccaggcccatggagccaacctgcggcacctgcaggccatgaagaagtttgtgaagaccatggtgctggtggtgctgacctttgccatctgctggctgccctaccacctgtacttcatcctgggcagcttccaggaggacatctactgccacaagttcatccagcaggtgtacctggccctcttctggctggccatgagcagcaccatgtacaaccccatcatctactgctgcctgaaccaccgcttccgcagcggcttccggctggccttccgctgctgcccctgggtgacccccaccaaggaggacaagctggagctgacccccaccaccagcctgagcaccagggtgaaccgctgccacaccaaggagaccctcttcatggccggggacacagcccccagcgaggccaccagcggggaggccggccggccccaggacggcagcggcctgtggtttggctacggcctgctggcccccaccaagacccacgtggagatctag

SEQ ID NO: 172539 - DNA, 1398 bp, synthetic construct
  misc_feature 1..1398: note = Description of Artificial Sequence: Synthetic coding sequence
  source 1..1398: mol_type = other DNA
atggccaccctgcctgctgctgagacctggattgatggcggcggcggcgtgggcgcagatgctgtgaacctgacagccagcctggccgccggggccgccaccggggctgtggagaccggctggctgcagctgctggaccaggccggcaacctgagcagcagccccagcgccctgggcctgcctgtggccagccctgcccccagccagccctgggccaacctgaccaaccagtttgtgcagcccagctggagaattgccctgtggagcctggcctacggcgtggtggtggccgtggccgtgctgggcaacctgattgtcatctggatcatcctggcccacaagaggatgaggacagtgaccaactacttcctggtgaacctggccttcagtgatgcctccatggccgccttcaacaccctggtgaacttcatctatgccctgcacagcgagtggtactttggagccaactactgccgcttccagaacttcttccccatcacagctgtgtttgccagcatctacagcatgacagccatcgctgtggaccgctacatggccatcatcgaccccctgaagccccggctgagcgccacagccaccaagatcgtcatcggcagcatctggatcctggccttcctgctggccttcccccagtgcctgtacagcaagaccaaggtgatgcctggccgcaccctgtgctttgtgcagtggccagagggccccaagcagcacttcacctaccacatcatcgtcatcatcctggtgtactgcttccccctgctgatcatgggcatcacctacaccatcgtgggcatcaccctgtggggcggggagatccctggggacacctgtgacaagtaccacgagcagctgaaggccaagaggaaggtggtgaagatgatgatcatcgtggtgatgacctttgccatctgctggctgccctaccacatctacttcatcctgacagccatctaccagcagctgaaccgctggaagtacatccagcaggtgtacctggccagcttctggctggccatgagcagcaccatgtacaaccccatcatctactgctgcctgaacaagcgcttccgggccggcttcaagagggccttccgctggtgccccttcatcaaggtgtcctcctatgatgagctggagctgaagaccacccgcttccaccccaaccggcagagctccatgtacacagtgaccaggatggagagcatgacagtggtgtttgaccccaatgatgctgacaccaccaggagcagcaggaagaagagggccaccccccgggaccccagcttcaacggctgcagcagaagaaacagcaagagcgccagcgccaccagcagcttcatcagcagcccctacacctctgtggatgagtacagctag

SEQ ID NO: 172540 - DNA, 5682 bp, synthetic construct
  misc_feature 1..5682: note = Description of Artificial Sequence: Synthetic coding sequence
  source 1..5682: mol_type = other DNA
atgggccctggctgtgacctgctgctgaggacagctgccaccatcacagctgctgccatcatgtctgacacagacagtgatgaggacagcgctgggggcggccccttcagcctggccggcttcctgtttggaaacatcaatggagctggccagctggagggggagagcgtgctggatgatgagtgcaagaagcacctggccggcctgggcgccctgggcctgggcagcctcatcacagagctgacagccaatgaggagctgaccggcacagatggagccctggtgaatgatgagggctgggtgcgcagcacagaagatgctgtggactacagcgacatcaatgaggtggccgaggatgagagccgccgctaccagcagaccatgggcagcctgcagcccctgtgccacagcgactatgatgaagatgattatgatgctgactgtgaagatattgactgcaagctgatgcctcctcctcctcctcctcctggccccatgaagaaggacaaggaccaggacagcatcaccggggtgtctgaaaatggagagggcatcatcctgcccagcatcatcgcccccagcagcctggccagcgagaaggtggacttcagcagcagcagtgacagcgagagcgagatgggcccccaggaggccacccaggccgagagtgaagatggcaagctgaccctgcccctggccggcatcatgcagcatgatgccaccaagctgctgcccagcgtgacagagctgtttcctgagttccggcctgggaaggtgctgcgcttcctgcggctgtttggacctgggaagaatgtgcccagcgtgtggaggtctgcccggaggaagaggaagaagaagcaccgggagctgatccaggaggagcagatccaggaggtggagtgcagcgtggagagcgaggtgtcccagaagagcctgtggaactatgactatgcccctcctcctcctcctgagcagtgcctgagtgatgatgagatcaccatgatggcccctgtggagagcaagttcagccagagcactggagacatcgacaaggtgacagacaccaagccccgggtggccgagtggaggtatggccctgcccggctgtggtatgacatgctgggcgtgcctgaagatggcagcggctttgattatggcttcaagctgaggaagacagagcacgagcccgtcatcaagagcaggatgattgaggagttcaggaagctggaggagaacaatggaacagacctgctggctgatgagaacttcctgatggtgacccagctgcactgggaggatgacatcatctgggatggagaagatgtgaagcacaagggcaccaagccccagagggccagcctggccggctggctgcccagctccatgaccagaaatgccatggcctacaacgtgcagcagggctttgctgccaccctggatgatgacaagccctggtacagcatcttccccatcgacaatgaagacctggtgtatggccgctgggaggacaacatcatctgggatgcccaggccatgccccggctgctggagccccctgtgctgaccctggaccccaatgatgagaacctgatcctggagatcccagatgagaaggaggaggccaccagcaacagccccagcaaggagagcaagaaggagagcagcctgaagaagagccgcatcctgctgggcaagacaggagtcatcaaggaggagccccagcagaacatgagccagcctgaggtgaaggacccctggaacctgagcaatgatgagtactactaccccaagcagcagggcctgcggggcacctttggaggcaacatcatccagcacagcatcccagctgtggagctgcggcagcccttcttccccacccacatgggccccatcaagctgcggcagttccacaggcctcccctgaagaagtacagctttggagccctgagccagcccggcccccacagcgtgcagcccctgctgaagcacatcaagaagaaggccaagatgagggagcaggagcggcaggccagcggcggcggggagatgttcttcatgaggaccccccaggacctgaccgggaaggatggagacctgatcctggccgagtacagtgaagaaaatggccccctgatgatgcaggtgggcatggccaccaagatcaagaactactacaagaggaagccaggcaaggaccccggggccccagactgcaagtacggggagaccgtgtactgccacaccagccccttcctgggcagcctgcaccctggccagctgctgcaggcctttgagaacaacctcttccgggcccccatctacctgcacaagatgcctgagacagacttcctgatcatccgcacccggcagggctactacatccgggagctggtggacatctttgtggtgggccagcagtgccccctgtttgaggtgcccggccccaacagcaagagggccaacacccacatccgggacttcctgcaggtgttcatctaccgcctcttctggaagagcaaggaccggccccggcgcatccgcatggaggacatcaagaaggccttccccagccacagcgagagcagcatcaggaagaggctgaagctgtgtgccgacttcaagaggacaggcatggacagcaactggtgggtgctgaagagtgacttccggctgcccacagaggaggagatccgggccatggtgtccccagagcagtgctgtgcctactacagcatgattgctgctgagcagaggctgaaggatgctggctacggggagaagagcttctttgcccctgaggaggagaatgaggaggacttccagatgaagattgatgatgaggtgaggacagccccctggaacaccacccgggccttcatcgccgccatgaagggcaagtgcctgctggaggtgactggagtggccgaccccaccggctgtggggagggcttctcctatgtgaagatccccaacaagcccacccagcagaaggatgacaaggagccccagcctgtgaagaagacagtgactggaacagatgctgacctgcggcggctgagcctgaagaatgccaagcagctgctgaggaagtttggagtgcctgaggaggagatcaagaagctgagccgctgggaggtgattgatgtggtgaggaccatgagcacagagcaggcccggagcggggagggccccatgagcaagtttgcccggggcagccgcttctctgtggccgagcaccaggagcgctacaaggaggagtgccagaggatctttgacctgcagaacaaggtgctgagcagcacagaggtgctgagcacagacacagacagcagcagcgctgaggacagcgactttgaggagatgggcaagaacatcgagaacatgctgcagaacaagaagaccagcagccagctgagccgggagcgggaggagcaggagaggaaggagctgcagaggatgctgctggccgccggcagcgctgccagcggcaacaaccacagagatgatgacacagcctctgtgaccagcctgaacagcagcgccaccggccgctgcctgaagatctaccgcaccttcagagatgaggagggcaaggagtatgtgcgctgtgaaacagtgaggaagccagctgtgattgatgcctacgtgcgcatccgcaccaccaaggatgaggagttcatcaggaagtttgccctgtttgatgagcagcaccgggaggagatgaggaaggagcggcggcgcatccaggagcagctgcggcggctgaagaggaaccaggagaaggagaagctgaagggccccccagagaagaagcccaagaagatgaaggagaggccagacctgaagctgaagtgtggggcctgtggggccatcggccacatgaggaccaacaagttctgccccctgtactaccagaccaatgccccacccagcaaccctgtggccatgacagaggagcaggaggaggagctggagaagacagtcatccacaatgacaatgaggagctgatcaaggtggagggcaccaagatcgtgctgggcaagcagctgattgaatctgcagatgaggtgcggaggaagagcctggtgctgaagttccccaagcagcagctgccccccaagaagaagagaagagtgggcaccaccgtgcactgtgactacctgaaccggccccacaagagcatccacagaagaagaacagaccccatggtgaccctgagcagcatcctggagagcatcatcaatgacatgagggacctgcccaacacctaccccttccacacccctgtgaatgccaaggtggtgaaggactactacaagatcatcacccggcccatggacctgcagaccctgagagaaaatgtgaggaagaggctgtaccccagccgggaggagttccgggagcacctggagctgattgtgaagaacagcgccacctacaacggccccaagcacagcctgacccagatcagccagagcatgctggacctgtgtgatgagaagctgaaggagaaggaggacaagctggcccggctggagaaggccatcaaccccctgctggatgatgatgaccaggtggccttctccttcatcctggacaacatcgtgacccagaagatgatggctgtgcctgacagctggcccttccaccaccctgtgaacaagaagtttgtgcctgactactacaaggtgattgtgaaccccatggacctggagaccatcaggaagaacatcagcaagcacaagtaccagagccgggagagcttcctggatgatgtgaacctgatcctggccaacagcgtgaagtacaacggccctgagagccagtacaccaagacagcccaggagatcgtgaatgtgtgctaccagaccctgacagaatatgatgagcacctgacccagctggagaaggacatctgcacagccaaggaggccgccctggaggaggccgagctggagagcctggaccccatgaccccaggcccctacaccccccagcccccagacctgtatgacaccaacaccagcctgtccatgagcagagatgccagcgtcttccaggatgagagcaacatgtctgtgctggacatccccagcgccaccccagagaagcaggtgacccaggagggagaagatggagatggagacctggctgatgaggaggagggcaccgtgcagcagccccaggcctctgtgctgtatgaggacctgctgatgtctgaaggagaagatgatgaagaagatgctggcagtgatgaggagggggacaaccccttcagcgccatccagctgtctgagagcggcagtgacagtgatgtgggcagcggcggcatccggcccaagcagcccaggatgctgcaggagaacaccaggatggacatggagaatgaggagagcatgatgtcctatgaaggagatggaggagaggccagccacggcctggaggacagcaacatctcctatggcagctatgaggagccagaccccaagagcaacacccaggacaccagcttcagcagcattggaggctatgaggtgtctgaggaggaggaggatgaggaggaggaggagcagaggagcggccccagcgtgctgagccaggtgcacctgtctgaagatgaagaagattctgaggacttccacagcattgctggggacagcgacctggacagtgatgaatag

SEQ ID NO: 172541 - DNA, 5619 bp, synthetic construct
  misc_feature 1..5619: note = Description of Artificial Sequence: Synthetic coding sequence
  source 1..5619: mol_type = other DNA
atgggccctggctgtgacctgctgctgaggacagctgccaccatcacagctgctgccatcatgtctgacacagacagtgatgaggacagcgctgggggcggccccttcagcctggccggcttcctgtttggaaacatcaatggagctggccagctggagggggagagcgtgctggatgatgagtgcaagaagcacctggccggcctgggcgccctgggcctgggcagcctcatcacagagctgacagccaatgaggagctgaccggcacagatggagccctggtgaatgatgagggctgggtgcgcagcacagaagatgctgtggactacagcgacatcaatgaggtggccgaggatgagagccgccgctaccagcagaccatgggcagcctgcagcccctgtgccacagcgactatgatgaagatgattatgatgctgactgtgaagatattgactgcaagctgatgcctcctcctcctcctcctcctggccccatgaagaaggacaaggaccaggacagcatcaccggggagaaggtggacttcagcagcagcagtgacagcgagagcgagatgggcccccaggaggccacccaggccgagagtgaagatggcaagctgaccctgcccctggccggcatcatgcagcatgatgccaccaagctgctgcccagcgtgacagagctgtttcctgagttccggcctgggaaggtgctgcgcttcctgcggctgtttggacctgggaagaatgtgcccagcgtgtggaggtctgcccggaggaagaggaagaagaagcaccgggagctgatccaggaggagcagatccaggaggtggagtgcagcgtggagagcgaggtgtcccagaagagcctgtggaactatgactatgcccctcctcctcctcctgagcagtgcctgagtgatgatgagatcaccatgatggcccctgtggagagcaagttcagccagagcactggagacatcgacaaggtgacagacaccaagccccgggtggccgagtggaggtatggccctgcccggctgtggtatgacatgctgggcgtgcctgaagatggcagcggctttgattatggcttcaagctgaggaagacagaacatgagcctgtgatcaagagcaggatgattgaggagttcaggaagctggaggagaacaacggcacagacctgctggctgatgagaacttcctgatggtgacccagctgcactgggaggatgacatcatctgggatggagaagatgtgaagcacaagggcaccaagccccagagggccagcctggccggctggctgcccagctccatgaccagaaatgccatggcctacaacgtgcagcagggctttgctgccaccctggatgatgacaagccctggtacagcatcttccccatcgacaatgaagacctggtgtatggccgctgggaggacaacatcatctgggatgcccaggccatgccccggctgctggagccccctgtgctgaccctggaccccaatgatgaaaatctcatcctggagatcccagatgagaaggaggaggccaccagcaacagccccagcaaggagagcaagaaggagagcagcctgaagaagagccgcatcctgctgggcaagacaggagtcatcaaggaggagccccagcagaacatgagccagcctgaggtgaaggacccctggaacctgagcaatgatgagtactactaccccaagcagcagggcctgcggggcaccttcggcggcaacatcatccagcacagcatcccagctgtggagctgcggcagcccttcttccccacccacatgggccccatcaagctgcggcagttccaccggccccccctgaagaagtacagctttggagccctgagccagcccggcccccacagcgtgcagcccctgctgaagcacatcaagaagaaggccaagatgagggagcaggagcggcaggccagcggcggcggggagatgttcttcatgaggaccccccaggacctgaccgggaaggatggagacctgatcctggccgagtacagcgaggagaatggccccctgatgatgcaggtgggcatggccaccaagatcaagaactactacaagaggaagccaggcaaggaccccggggccccagactgcaagtatggagagaccgtgtactgccacaccagccccttcctgggcagcctgcaccctggccagctgctgcaggcctttgagaacaacctcttccgggcccccatctacctgcacaagatgcctgagacagacttcctgatcatccgcacccggcagggctactacatccgggagctggtggacatctttgtggtgggccagcagtgccccctgtttgaggtgcccggccccaacagcaagagggccaacacccacatccgggacttcctgcaggtgttcatctaccgcctcttctggaagagcaaggaccggccccggcgcatccgcatggaggacatcaagaaggccttccccagccacagcgagagcagcatcaggaagaggctgaagctgtgtgccgacttcaagaggacaggcatggacagcaactggtgggtgctgaagagtgacttccggctgcccacagaggaggagatccgggccatggtgtccccagagcagtgctgtgcctactacagcatgattgctgctgagcagaggctgaaggatgctggctatggagagaagagcttctttgcccctgaggaggagaatgaggaggacttccagatgaagattgatgatgaggtgaggacagccccctggaacaccacccgggccttcatcgccgccatgaagggcaagtgcctgctggaggtgactggagtggccgaccccaccggctgtggggagggcttctcctatgtgaagatccccaacaagcccacccagcagaaggatgacaaggagccccagcctgtgaagaagacagtgactggaacagatgctgacctgcggcggctgagcctgaagaatgccaagcagctgctgaggaagtttggagtgcctgaggaggagatcaagaagctgagccgctgggaggtgattgatgtggtgaggaccatgagcacagagcaggcccggtctggagagggccccatgagcaagtttgcccggggcagccgcttctctgtggccgagcaccaggagcgctacaaggaggagtgccagaggatctttgacctgcagaacaaggtgctgagcagcacagaggtgctgagcacagacacagacagcagcagcgcagaagattctgactttgaggagatgggcaagaacatcgagaacatgctgcagaacaagaagaccagcagccagctgagccgggagcgggaggagcaggagaggaaggagctgcagaggatgctgctggccgccggcagcgctgccagcggcaacaaccacagagatgatgacacagcctctgtgaccagcctgaacagcagcgccaccggccgctgcctgaagatctaccgcaccttcagagatgaggagggcaaggagtatgtgcgctgtgagaccgtgaggaagccagctgtgattgatgcctacgtgcgcatccgcaccaccaaggatgaggagttcatcaggaagtttgccctgtttgatgagcagcaccgggaggagatgaggaaggagcggcggcgcatccaggagcagctgcggcggctgaagaggaaccaggagaaggagaagctgaagggccccccagagaagaagcccaagaagatgaaggagaggccagacctgaagctgaagtgtggggcctgtggggccatcggccacatgaggaccaacaagttctgccccctgtactaccagaccaatgccccacccagcaaccctgtggccatgacagaggagcaggaggaggagctggagaagacagtcatccacaatgacaatgaggagctgatcaaggtggagggcaccaagatcgtgctgggcaagcagctgattgagagcgcagatgaggtgcggaggaagagcctggtgctgaagttccccaagcagcagctgccccccaagaagaagagaagagtgggcaccaccgtgcactgtgactacctgaaccggccccacaagagcatccacagaagaagaacagaccccatggtgaccctgagcagcatcctggagagcatcatcaatgacatgagggacctgcccaacacctaccccttccacacccctgtgaatgccaaggtggtgaaggactactacaagatcatcacccggcccatggacctgcagaccctgcgggagaatgtgaggaagaggctgtaccccagccgggaggagttccgggagcacctggagctgattgtgaagaacagcgccacctacaacggccccaagcacagcctgacccagatcagccagagcatgctggacctgtgtgatgagaagctgaaggagaaggaggacaagctggcccggctggagaaggccatcaaccccctgctggatgatgatgaccaggtggccttctccttcatcctggacaacatcgtgacccagaagatgatggctgtgcctgacagctggcccttccaccaccctgtgaacaagaagtttgtgcctgactactacaaggtgattgtgaaccccatggacctggagaccatcaggaagaacatcagcaagcacaagtaccagagccgggagagcttcctggatgatgtgaacctgatcctggccaacagcgtgaagtacaatggacctgagagccagtacaccaagacagcccaggagatcgtgaatgtgtgctaccagaccctgacagaatatgatgagcacctgacccagctggagaaggacatctgcacagccaaggaggccgccctggaggaggccgagctggagagcctggaccccatgaccccaggcccctacaccccccagcccccagacctgtatgacaccaacaccagcctgtccatgagcagagatgcctctgtgttccaggatgagagcaacatgtctgtgctggacatccccagcgccaccccagagaagcaggtgacccaggagggggaggatggagatggagacctggctgatgaggaggagggcaccgtgcagcagccccaggcctctgtgctgtatgaggacctgctgatgtctgagggggaggatgatgaggaggatgctggcagtgatgaggagggggacaaccccttcagcgccatccagctgtctgagagcggcagtgacagtgatgtgggcagcggcggcatccggcccaagcagcccaggatgctgcaggagaacaccaggatggacatggagaatgaggagagcatgatgtcctatgaaggagatggaggagaggccagccacggcctggaggacagcaacatctcctatggcagctatgaggagccagaccccaagagcaacacccaggacaccagcttcagcagcatcggcggctatgaggtgtctgaggaggaggaggatgaggaggaggaggagcagaggagcggccccagcgtgctgagccaggtgcacctgtctgaagatgaggaggacagcgaggacttccacagcattgctggggacagcgacctggacagtgatgaatag

SEQ ID NO: 172542 - DNA, 1632 bp, synthetic construct
  misc_feature 1..1632: note = Description of Artificial Sequence: Synthetic coding sequence
  source 1..1632: mol_type = other DNA
atgacagaggagcaggaggaggagctggagaagacagtcatccacaatgacaatgaggagctgatcaaggtggagggcaccaagatcgtgctgggcaagcagctgattgagagcgcagatgaggtgcggaggaagagcctggtgctgaagttccccaagcagcagctgccccccaagaagaagagaagagtgggcaccaccgtgcactgtgactacctgaaccggccccacaagagcatccacagaagaagaacagaccccatggtgaccctgagcagcatcctggagagcatcatcaatgacatgagggacctgcccaacacctaccccttccacacccctgtgaatgccaaggtggtgaaggactactacaagatcatcacccggcccatggacctgcagaccctgcgggagaatgtgaggaagaggctgtaccccagccgggaggagttccgggagcacctggagctgattgtgaagaacagcgccacctacaacggccccaagcacagcctgacccagatcagccagagcatgctggacctgtgtgatgagaagctgaaggagaaggaggacaagctggcccggctggagaaggccatcaaccccctgctggatgatgatgaccaggtggccttctccttcatcctggacaacatcgtgacccagaagatgatggctgtgcctgacagctggcccttccaccaccctgtgaacaagaagtttgtgcctgactactacaaggtgattgtgaaccccatggacctggagaccatcaggaagaacatcagcaagcacaagtaccagagccgggagagcttcctggatgatgtgaacctgatcctggccaacagcgtgaagtacaatggacctgagagccagtacaccaagacagcccaggagatcgtgaatgtgtgctaccagaccctgacagaatatgatgagcacctgacccagctggagaaggacatctgcacagccaaggaggccgccctggaggaggccgagctggagagcctggaccccatgaccccaggcccctacaccccccaggccaagcccccagacctgtatgacaccaacaccagcctgtccatgagcagagatgcctctgtgttccaggatgagagcaacatgtctgtgctggacatccccagcgccaccccagagaagcaggtgacccagatgaggcagggccggggccgcctgggggaggaggacagtgatgtggacatcgagggctatgatgatgaggaggaggatggcaagcccaagaccccagcccctgagggggaggatggagatggagacctggctgatgaggaggagggcaccgtgcagcagccccaggcctctgtgctgtatgaggacctgctgatgtctgagggggaggatgatgaggaggatgctggcagtgatgaggagggggacaaccccttcagcgccatccagctgtctgagagcggcagtgacagtgatgtgggcagcggcggcatccggcccaagcagcccaggatgctgcaggagaacaccaggatggacatggagaatgaggagagcatgatgtcctatgaaggagatggaggagaggccagccacggcctggaggacagcaacatcagccaccagtag

SEQ ID NO: 172543 - DNA, 5688 bp, synthetic construct
  misc_feature 1..5688: note = Description of Artificial Sequence: Synthetic coding sequence
  source 1..5688: mol_type = other DNA
atgggccctggctgtgacctgctgctgaggacagctgccaccatcacagctgctgccatcatgtctgacacagacagtgatgaggacagcgctgggggcggccccttcagcctggccggcttcctgtttggaaacatcaatggagctggccagctggagggggagagcgtgctggatgatgagtgcaagaagcacctggccggcctgggcgccctgggcctgggcagcctcatcacagagctgacagccaatgaggagctgaccggcacagatggagccctggtgaatgatgagggctgggtgcgcagcacagaagatgctgtggactacagcgacatcaatgaggtggccgaggatgagagccgccgctaccagcagaccatgggcagcctgcagcccctgtgccacagcgactatgatgaagatgattatgatgctgactgtgaagatattgactgcaagctgatgcctcctcctcctcctcctcctggccccatgaagaaggacaaggaccaggacagcatcaccggggtgtctgaaaatggagagggcatcatcctgcccagcatcatcgcccccagcagcctggccagcgagaaggtggacttcagcagcagcagtgacagcgagagcgagatgggcccccaggaggccacccaggccgagagtgaagatggcaagctgaccctgcccctggccggcatcatgcagcatgatgccaccaagctgctgcccagcgtgacagagctgtttcctgagttccggcctgggaaggtgctgcgcttcctgcggctgtttggacctgggaagaatgtgcccagcgtgtggaggtctgcccggaggaagaggaagaagaagcaccgggagctgatccaggaggagcagatccaggaggtggagtgcagcgtggagagcgaggtgtcccagaagagcctgtggaactatgactatgcccctcctcctcctcctgagcagtgcctgagtgatgatgagatcaccatgatggcccctgtggagagcaagttcagccagagcactggagacatcgacaaggtgacagacaccaagccccgggtggccgagtggaggtatggccctgcccggctgtggtatgacatgctgggcgtgcctgaagatggcagcggctttgattatggcttcaagctgaggaagacagagcacgagcccgtcatcaagagcaggatgattgaggagttcaggaagctggaggagaacaatggaacagacctgctggctgatgagaacttcctgatggtgacccagctgcactgggaggatgacatcatctgggatggagaagatgtgaagcacaagggcaccaagccccagagggccagcctggccggctggctgcccagctccatgaccagaaatgccatggcctacaacgtgcagcagggctttgctgccaccctggatgatgacaagccctggtacagcatcttccccatcgacaatgaagacctggtgtatggccgctgggaggacaacatcatctgggatgcccaggccatgccccggctgctggagccccctgtgctgaccctggaccccaatgatgagaacctgatcctggagatcccagatgagaaggaggaggccaccagcaacagccccagcaaggagagcaagaaggagagcagcctgaagaagagccgcatcctgctgggcaagacaggagtcatcaaggaggagccccagcagaacatgagccagcctgaggtgaaggacccctggaacctgagcaatgatgagtactactaccccaagcagcagggcctgcggggcacctttggaggcaacatcatccagcacagcatcccagctgtggagctgcggcagcccttcttccccacccacatgggccccatcaagctgcggcagttccacaggcctcccctgaagaagtacagctttggagccctgagccagcccggcccccacagcgtgcagcccctgctgaagcacatcaagaagaaggccaagatgagggagcaggagcggcaggccagcggcggcggggagatgttcttcatgaggaccccccaggacctgaccgggaaggatggagacctgatcctggccgagtacagtgaagaaaatggccccctgatgatgcaggtgggcatggccaccaagatcaagaactactacaagaggaagccaggcaaggaccccggggccccagactgcaagtacggggagaccgtgtactgccacaccagccccttcctgggcagcctgcaccctggccagctgctgcaggcctttgagaacaacctcttccgggcccccatctacctgcacaagatgcctgagacagacttcctgatcatccgcacccggcagggctactacatccgggagctggtggacatctttgtggtgggccagcagtgccccctgtttgaggtgcccggccccaacagcaagagggccaacacccacatccgggacttcctgcaggtgttcatctaccgcctcttctggaagagcaaggaccggccccggcgcatccgcatggaggacatcaagaaggccttccccagccacagcgagagcagcatcaggaagaggctgaagctgtgtgccgacttcaagaggacaggcatggacagcaactggtgggtgctgaagagtgacttccggctgcccacagaggaggagatccgggccatggtgtccccagagcagtgctgtgcctactacagcatgattgctgctgagcagaggctgaaggatgctggctacggggagaagagcttctttgcccctgaggaggagaatgaggaggacttccagatgaagattgatgatgaggtgaggacagccccctggaacaccacccgggccttcatcgccgccatgaagggcaagtgcctgctggaggtgactggagtggccgaccccaccggctgtggggagggcttctcctatgtgaagatccccaacaagcccacccagcagaaggatgacaaggagccccagcctgtgaagaagacagtgactggaacagatgctgacctgcggcggctgagcctgaagaatgccaagcagctgctgaggaagtttggagtgcctgaggaggagatcaagaagctgagccgctgggaggtgattgatgtggtgaggaccatgagcacagagcaggcccggagcggggagggccccatgagcaagtttgcccggggcagccgcttctctgtggccgagcaccaggagcgctacaaggaggagtgccagaggatctttgacctgcagaacaaggtgctgagcagcacagaggtgctgagcacagacacagacagcagcagcgctgaggacagcgactttgaggagatgggcaagaacatcgagaacatgctgcagaacaagaagaccagcagccagctgagccgggagcgggaggagcaggagaggaaggagctgcagaggatgctgctggccgccggcagcgctgccagcggcaacaaccacagagatgatgacacagcctctgtgaccagcctgaacagcagcgccaccggccgctgcctgaagatctaccgcaccttcagagatgaggagggcaaggagtatgtgcgctgtgaaacagtgaggaagccagctgtgattgatgcctacgtgcgcatccgcaccaccaaggatgaggagttcatcaggaagtttgccctgtttgatgagcagcaccgggaggagatgaggaaggagcggcggcgcatccaggagcagctgcggcggctgaagaggaaccaggagaaggagaagctgaagggccccccagagaagaagcccaagaagatgaaggagaggccagacctgaagctgaagtgtggggcctgtggggccatcggccacatgaggaccaacaagttctgccccctgtactaccagaccaatgccccacccagcaaccctgtggccatgacagaggagcaggaggaggagctggagaagacagtcatccacaatgacaatgaggagctgatcaaggtggagggcaccaagatcgtgctgggcaagcagctgattgaatctgcagatgaggtgcggaggaagagcctggtgctgaagttccccaagcagcagctgccccccaagaagaagagaagagtgggcaccaccgtgcactgtgactacctgaaccggccccacaagagcatccacagaagaagaacagaccccatggtgaccctgagcagcatcctggagagcatcatcaatgacatgagggacctgcccaacacctaccccttccacacccctgtgaatgccaaggtggtgaaggactactacaagatcatcacccggcccatggacctgcagaccctgagagaaaatgtgaggaagaggctgtaccccagccgggaggagttccgggagcacctggagctgattgtgaagaacagcgccacctacaacggccccaagcacagcctgacccagatcagccagagcatgctggacctgtgtgatgagaagctgaaggagaaggaggacaagctggcccggctggagaaggccatcaaccccctgctggatgatgatgaccaggtggccttctccttcatcctggacaacatcgtgacccagaagatgatggctgtgcctgacagctggcccttccaccaccctgtgaacaagaagtttgtgcctgactactacaaggtgattgtgaaccccatggacctggagaccatcaggaagaacatcagcaagcacaagtaccagagccgggagagcttcctggatgatgtgaacctgatcctggccaacagcgtgaagtacaacggccctgagagccagtacaccaagacagcccaggagatcgtgaatgtgtgctaccagaccctgacagaatatgatgagcacctgacccagctggagaaggacatctgcacagccaaggaggccgccctggaggaggccgagctggagagcctggaccccatgaccccaggcccctacaccccccaggccaagcccccagacctgtatgacaccaacaccagcctgtccatgagcagagatgccagcgtcttccaggatgagagcaacatgtctgtgctggacatccccagcgccaccccagagaagcaggtgacccaggagggagaagatggagatggagacctggctgatgaggaggagggcaccgtgcagcagccccaggcctctgtgctgtatgaggacctgctgatgtctgaaggagaagatgatgaagaagatgctggcagtgatgaggagggggacaaccccttcagcgccatccagctgtctgagagcggcagtgacagtgatgtgggcagcggcggcatccggcccaagcagcccaggatgctgcaggagaacaccaggatggacatggagaatgaggagagcatgatgtcctatgaaggagatggaggagaggccagccacggcctggaggacagcaacatctcctatggcagctatgaggagccagaccccaagagcaacacccaggacaccagcttcagcagcattggaggctatgaggtgtctgaggaggaggaggatgaggaggaggaggagcagaggagcggccccagcgtgctgagccaggtgcacctgtctgaagatgaagaagattctgaggacttccacagcattgctggggacagcgacctggacagtgatgaatag

SEQ ID NO: 172544 - DNA, 5721 bp, synthetic construct
  misc_feature 1..5721: note = Description of Artificial Sequence: Synthetic coding sequence
  source 1..5721: mol_type = other DNA
atgggccctggctgtgacctgctgctgaggacagctgccaccatcacagctgctgccatcatgtctgacacagacagtgatgaggacagcgctgggggcggccccttcagcctggccggcttcctgtttggaaacatcaatggagctggccagctggagggggagagcgtgctggatgatgagtgcaagaagcacctggccggcctgggcgccctgggcctgggcagcctcatcacagagctgacagccaatgaggagctgaccggcacagatggagccctggtgaatgatgagggctgggtgcgcagcacagaagatgctgtggactacagcgacatcaatgaggtggccgaggatgagagccgccgctaccagcagaccatgggcagcctgcagcccctgtgccacagcgactatgatgaagatgattatgatgctgactgtgaagatattgactgcaagctgatgcctcctcctcctcctcctcctggccccatgaagaaggacaaggaccaggacagcatcaccggggagaaggtggacttcagcagcagcagtgacagcgagagcgagatgggcccccaggaggccacccaggccgagagtgaagatggcaagctgaccctgcccctggccggcatcatgcagcatgatgccaccaagctgctgcccagcgtgacagagctgtttcctgagttccggcctgggaaggtgctgcgcttcctgcggctgtttggacctgggaagaatgtgcccagcgtgtggaggtctgcccggaggaagaggaagaagaagcaccgggagctgatccaggaggagcagatccaggaggtggagtgcagcgtggagagcgaggtgtcccagaagagcctgtggaactatgactatgcccctcctcctcctcctgagcagtgcctgagtgatgatgagatcaccatgatggcccctgtggagagcaagttcagccagagcactggagacatcgacaaggtgacagacaccaagccccgggtggccgagtggaggtatggccctgcccggctgtggtatgacatgctgggcgtgcctgaagatggcagcggctttgattatggcttcaagctgaggaagacagaacatgagcctgtgatcaagagcaggatgattgaggagttcaggaagctggaggagaacaacggcacagacctgctggctgatgagaacttcctgatggtgacccagctgcactgggaggatgacatcatctgggatggagaagatgtgaagcacaagggcaccaagccccagagggccagcctggccggctggctgcccagctccatgaccagaaatgccatggcctacaacgtgcagcagggctttgctgccaccctggatgatgacaagccctggtacagcatcttccccatcgacaatgaagacctggtgtatggccgctgggaggacaacatcatctgggatgcccaggccatgccccggctgctggagccccctgtgctgaccctggaccccaatgatgaaaatctcatcctggagatcccagatgagaaggaggaggccaccagcaacagccccagcaaggagagcaagaaggagagcagcctgaagaagagccgcatcctgctgggcaagacaggagtcatcaaggaggagccccagcagaacatgagccagcctgaggtgaaggacccctggaacctgagcaatgatgagtactactaccccaagcagcagggcctgcggggcaccttcggcggcaacatcatccagcacagcatcccagctgtggagctgcggcagcccttcttccccacccacatgggccccatcaagctgcggcagttccaccggccccccctgaagaagtacagctttggagccctgagccagcccggcccccacagcgtgcagcccctgctgaagcacatcaagaagaaggccaagatgagggagcaggagcggcaggccagcggcggcggggagatgttcttcatgaggaccccccaggacctgaccgggaaggatggagacctgatcctggccgagtacagcgaggagaatggccccctgatgatgcaggtgggcatggccaccaagatcaagaactactacaagaggaagccaggcaaggaccccggggccccagactgcaagtatggagagaccgtgtactgccacaccagccccttcctgggcagcctgcaccctggccagctgctgcaggcctttgagaacaacctcttccgggcccccatctacctgcacaagatgcctgagacagacttcctgatcatccgcacccggcagggctactacatccgggagctggtggacatctttgtggtgggccagcagtgccccctgtttgaggtgcccggccccaacagcaagagggccaacacccacatccgggacttcctgcaggtgttcatctaccgcctcttctggaagagcaaggaccggccccggcgcatccgcatggaggacatcaagaaggccttccccagccacagcgagagcagcatcaggaagaggctgaagctgtgtgccgacttcaagaggacaggcatggacagcaactggtgggtgctgaagagtgacttccggctgcccacagaggaggagatccgggccatggtgtccccagagcagtgctgtgcctactacagcatgattgctgctgagcagaggctgaaggatgctggctatggagagaagagcttctttgcccctgaggaggagaatgaggaggacttccagatgaagattgatgatgaggtgaggacagccccctggaacaccacccgggccttcatcgccgccatgaagggcaagtgcctgctggaggtgactggagtggccgaccccaccggctgtggggagggcttctcctatgtgaagatccccaacaagcccacccagcagaaggatgacaaggagccccagcctgtgaagaagacagtgactggaacagatgctgacctgcggcggctgagcctgaagaatgccaagcagctgctgaggaagtttggagtgcctgaggaggagatcaagaagctgagccgctgggaggtgattgatgtggtgaggaccatgagcacagagcaggcccggtctggagagggccccatgagcaagtttgcccggggcagccgcttctctgtggccgagcaccaggagcgctacaaggaggagtgccagaggatctttgacctgcagaacaaggtgctgagcagcacagaggtgctgagcacagacacagacagcagcagcgcagaagattctgactttgaggagatgggcaagaacatcgagaacatgctgcagaacaagaagaccagcagccagctgagccgggagcgggaggagcaggagaggaaggagctgcagaggatgctgctggccgccggcagcgctgccagcggcaacaaccacagagatgatgacacagcctctgtgaccagcctgaacagcagcgccaccggccgctgcctgaagatctaccgcaccttcagagatgaggagggcaaggagtatgtgcgctgtgagaccgtgaggaagccagctgtgattgatgcctacgtgcgcatccgcaccaccaaggatgaggagttcatcaggaagtttgccctgtttgatgagcagcaccgggaggagatgaggaaggagcggcggcgcatccaggagcagctgcggcggctgaagaggaaccaggagaaggagaagctgaagggccccccagagaagaagcccaagaagatgaaggagaggccagacctgaagctgaagtgtggggcctgtggggccatcggccacatgaggaccaacaagttctgccccctgtactaccagaccaatgccccacccagcaaccctgtggccatgacagaggagcaggaggaggagctggagaagacagtcatccacaatgacaatgaggagctgatcaaggtggagggcaccaagatcgtgctgggcaagcagctgattgagagcgcagatgaggtgcggaggaagagcctggtgctgaagttccccaagcagcagctgccccccaagaagaagagaagagtgggcaccaccgtgcactgtgactacctgaaccggccccacaagagcatccacagaagaagaacagaccccatggtgaccctgagcagcatcctggagagcatcatcaatgacatgagggacctgcccaacacctaccccttccacacccctgtgaatgccaaggtggtgaaggactactacaagatcatcacccggcccatggacctgcagaccctgcgggagaatgtgaggaagaggctgtaccccagccgggaggagttccgggagcacctggagctgattgtgaagaacagcgccacctacaacggccccaagcacagcctgacccagatcagccagagcatgctggacctgtgtgatgagaagctgaaggagaaggaggacaagctggcccggctggagaaggccatcaaccccctgctggatgatgatgaccaggtggccttctccttcatcctggacaacatcgtgacccagaagatgatggctgtgcctgacagctggcccttccaccaccctgtgaacaagaagtttgtgcctgactactacaaggtgattgtgaaccccatggacctggagaccatcaggaagaacatcagcaagcacaagtaccagagccgggagagcttcctggatgatgtgaacctgatcctggccaacagcgtgaagtacaatggacctgagagccagtacaccaagacagcccaggagatcgtgaatgtgtgctaccagaccctgacagaatatgatgagcacctgacccagctggagaaggacatctgcacagccaaggaggccgccctggaggaggccgagctggagagcctggaccccatgaccccaggcccctacaccccccagcccccagacctgtatgacaccaacaccagcctgtccatgagcagagatgcctctgtgttccaggatgagagcaacatgtctgtgctggacatccccagcgccaccccagagaagcaggtgacccagatgaggcagggccggggccgcctgggggaggaggacagtgatgtggacatcgagggctatgatgatgaggaggaggatggcaagcccaagaccccagcccctgagggggaggatggagatggagacctggctgatgaggaggagggcaccgtgcagcagccccaggcctctgtgctgtatgaggacctgctgatgtctgagggggaggatgatgaggaggatgctggcagtgatgaggagggggacaaccccttcagcgccatccagctgtctgagagcggcagtgacagtgatgtgggcagcggcggcatccggcccaagcagcccaggatgctgcaggagaacaccaggatggacatggagaatgaggagagcatgatgtcctatgaaggagatggaggagaggccagccacggcctggaggacagcaacatctcctatggcagctatgaggagccagaccccaagagcaacacccaggacaccagcttcagcagcatcggcggctatgaggtgtctgaggaggaggaggatgaggaggaggaggagcagaggagcggccccagcgtgctgagccaggtgcacctgtctgaagatgaggaggacagcgaggacttccacagcattgctggggacagcgacctggacagtgatgaatag

SEQ ID NO: 172545 - DNA, 897 bp, synthetic construct
  misc_feature 1..897: note = Description of Artificial Sequence: Synthetic coding sequence
  source 1..897: mol_type = other DNA
atgacagaggagcaggaggaggagctggagaagacagtcatccacaatgacaatgaggagctgatcaaggtggagggcaccaagatcgtgctgggcaagcagctgattgagagcgcagatgaggtgcggaggaagagcctggtgctgaagttccccaagcagcagctgccccccaagaagaagagaagagtgggcaccaccgtgcactgtgactacctgaaccggccccacaagagcatccacagaagaagaacagaccccatggtgaccctgagcagcatcctggagagcatcatcaatgacatgagggacctgcccaacacctaccccttccacacccctgtgaatgccaaggtggtgaaggactactacaagatcatcacccggcccatggacctgcagaccctgcgggagaatgtgaggaagaggctgtaccccagccgggaggagttccgggagcacctggagctgattgtgaagaacagcgccacctacaacggccccaagcacagcctgacccagatcagccagagcatgctggacctgtgtgatgagaagctgaaggagaaggaggacaagctggcccggctggagaaggccatcaaccccctgctggatgatgatgaccaggtggccttctccttcatcctggacaacatcgtgacccagaagatgatggctgtgcctgacagctggcccttccaccaccctgtgaacaagaagtttgtgcctgactactacaaggtgattgtgaaccccatggacctggagaccatcaggaagaacatcagcaagcacaagtaccagagccgggagagcttcctggatgatgtgaacctgatcctggccaacagcgtgaagtacaacggctacatgtgcaccacctgccgcttctag

SEQ ID NO: 172546 - DNA, 657 bp, synthetic construct
  misc_feature 1..657: note = Description of Artificial Sequence: Synthetic coding sequence
  source 1..657: mol_type = other DNA
atgagctgcagcggcagcggggctgaccctgaggccgccccagccagcgctgccagcgcccctggccctgcccctcctgtgtctgccccagctgccctgcccagcagcacagctgctgagaacaaggccagccctgctggaacagctgggggccctggggccggggctgctgctgggggcaccggccccctggccgcccgggccggggagcctgctgagaggagaggagctgcccctgtgtctgctgggggcgccgcccctcctgagggcgccatcagcaatggagtgtatgtgctgcccagcgctgccaatggagatgtgaagcctgtggtgagcagcacccccctggtggacttcctgatgcagctggaggactacacccccaccatcccagatgctgtgacaggctactacctgaacagagctggctttgaggccagtgacccccgcatcatccgcctcatcagcctggccgcccagaagttcatcagtgacatcgccaatgatgccctgcagcactgcaagatgaagggcacagccagcggcagcagccgcagcaagagcaaggacaggaagtacaccctgaccatggaggacctgaccccagccctgtctgaatatggcatcaacgtgaagaagccccactacttcacctag

SEQ ID NO: 172547 - DNA, 636 bp, synthetic construct
  misc_feature 1..636: note = Description of Artificial Sequence: Synthetic coding sequence
  source 1..636: mol_type = other DNA
atggatgatgcccacgagagccccagcgacaagggcggggagactggagagagtgatgaaacagctgctgtgcctggggaccccggggccacagacacagatggcatccctgaggagacagatggagatgctgatgtggacctgaaggaggccgctgctgaggagggggagctggagagccaggatgtgtctgacctgaccaccgtggagcgggaggacagcagcctgctgaacccagctgccaagaagctgaagattgacaccaaggagaagaaggagaagaagcagaaggtggatgaagatgagatccagaagatgcagatcctggtgagcagcttcagcgaggagcagctgaacagatatgagatgtacagaagaagtgccttccccaaggccgccatcaagaggctcatccagagcatcaccggcacctctgtgtcccagaatgtggtgattgccatgagcggcatcagcaaggtgtttgtgggggaggtggtggaggaggccctggatgtgtgtgagaagtggggcgagatgccacccctgcagcccaagcacatgagggaggccgtgcggcggctgaagagcaagggccagatccccaacagcaagcacaagaagatcatcttcttctag

SEQ ID NO: 172548 - DNA, 465 bp, synthetic construct
  misc_feature 1..465: note = Description of Artificial Sequence: Synthetic coding sequence
  source 1..465: mol_type = other DNA
atggatgatgcccacgagagccccagcgacaagggcggggagactggagagagtgatgaaacagctgctgtgcctggggaccccggggccacagacacagatggcatccctgaggagacagatggagatgctgatgtggacctgaaggaggccgctgctgaggagggggagctggagagccaggatgtgtctgacctgaccaccgtggagcgggaggacagcagcctgctgaacccagctgccaagaagctgaagattgacaccaaggagaagaaggagaagaagcagaaggtggatgaagatgagatccagaagatgcagatcctggtgagcagcttcagcgaggagcagctgaacagatatgagatgtacagaagaagtgccttccccaaggccgccatcaagaggcactggatgtgtgtgcgctctggagagaagtgccaccactacaaccccaacatctag

SEQ ID NO: 172549 - DNA, 486 bp, synthetic construct
  misc_feature 1..486: note = Description of Artificial Sequence: Synthetic coding sequence
  source 1..486: mol_type = other DNA
atgaaccagtttggccccagcgccctgatcaacctgagcaacttcagcagcatcaagccagagcccgccagcaccccaccccagggctccatggccaacagcacagctgtggtgaagatccctggcacccctggggccggcggccgcctgagccctgagaacaaccaggtgctgaccaagaagaagctgcaggacctggtgcgggaggtggaccccaatgagcagctggatgaagatgtggaggagatgctgctgcagattgctgatgacttcatcgagagcgtggtgacagctgcctgccagctggcccggcacaggaagagcagcaccctggaggtgaaggatgtgcagctgcacctggagcggcagtggaacatgtggatccctggctttggaagtgaggagatccggccctacaagaaggcctgcaccacagaggcccacaagcagaggatggccctgatcaggaagaccaccaagaagtag

SEQ ID NO: 172550 - DNA, 486 bp, synthetic construct; identical to SEQ ID NO: 172549
  misc_feature 1..486: note = Description of Artificial Sequence: Synthetic coding sequence
  source 1..486: mol_type = other DNA

SEQ ID NO: 172551 - DNA, 1779 bp, synthetic construct
  misc_feature 1..1779: note = Description of Artificial Sequence: Synthetic coding sequence
  source 1..1779: mol_type = other DNA
atgtctgacagcggcagctatggccagagcggcggggagcagcagagctacagcacctacggcaaccctggcagccagggctacggccaggccagccagagctacagcggctacggccagaccacagacagcagctatggccagaactacagcggctacagcagctatggccagagccagagcggctacagccagagctatggaggctatgagaaccagaagcagagcagctacagccagcagccctacaacaaccagggccagcagcagaacatggagagcagcggcagccagggcggccgggcccccagctatgaccagcctgactatggccagcaggacagctatgaccagcagagcggctatgaccagcaccagggcagctatgatgagcagagcaactatgaccagcagcacgacagctacagccagaaccagcagagctaccacagccagcgggagaactacagccaccacacccaggatgacagaagagatgtgagccgctacggggaggacaacagaggctatggaggcagccagggcggcggccggggccggggcggctatgacaaggatggccggggccccatgacaggcagcagcggcggggacagaggaggcttcaagaactttggaggccaccgggactatggccccaggacagatgctgacagcgagagtgacaacagcgacaacaacaccatctttgtgcagggcctgggggagggcgtgtccacagaccaggtgggggagttcttcaagcagatcggcatcatcaagaccaacaagaagacaggcaagcccatgatcaacctgtacacagacaaggacaccgggaagcccaagggggaggccaccgtgtcctttgatgatcctccttctgccaaggccgccatcgactggtttgatggcaaggagttccacggcaacatcatcaaggtgtcctttgccacccggcggcctgagttcatgagaggaggcggcagcggcggcggccggcggggccggggcggctaccggggccggggcggcttccagggccggggcggggaccccaagagcggggactgggtgtgccccaaccccagctgtggcaacatgaactttgcccggaggaacagctgcaaccagtgcaatgagcccaggcctgaggacagccggcccagcggcggggacttccggggccggggctatggaggagagcggggctaccggggccggggcggccggggcggggaccggggcggctacggcggggacagaagtggcggcggctatggaggagacaggagcagcggcggcggctacagcggggacagaagtggcggcggctacggcggggacagaagtggcggcggctatggaggagaccggggcggcggctatggaggagaccggggcggcggctatggaggagaccggggcggcggctatggaggagaccggggcggctacggcggggacagaggaggcggctacggcggggacagaggaggctatggaggagaccggggcggctacggcggggacagaggaggctatggaggagaccggggcggctacggcggggacaggagcagaggaggctatggaggagaccggggcggcggcagcggctatggaggagacagaagtggcggctatggaggagacagaagtggcggcggctacggcggggacagaggaggcggctacggcggggacagaggaggctatggaggcaagatgggcggcagaaatgactacagaaatgaccagaggaaccggccctactag

SEQ ID NO: 172552 - DNA, 1779 bp, synthetic construct; identical to SEQ ID NO: 172551
  misc_feature 1..1779: note = Description of Artificial Sequence: Synthetic coding sequence
  source 1..1779: mol_type = other DNA

SEQ ID NO: 172553 - DNA, 1188 bp, synthetic construct
  misc_feature 1..1188: note = Description of Artificial Sequence: Synthetic coding sequence
  source 1..1188: mol_type = other DNA
atgacaggcagcagtggaggagaccggggcggcttcaagaactttggaggccaccgggactatggccccaggacagatgctgacagcgagagtgacaacagcgacaacaacaccatctttgtgcagggcctgggggagggcgtgtccacagaccaggtgggggagttcttcaagcagatcggcatcatcaagaccaacaagaagacaggcaagcccatgatcaacctgtacacagacaaggacaccgggaagcccaagggggaggccaccgtgtcctttgatgacccccccagcgccaaggccgccatcgactggtttgatggcaaggagttccacggcaacatcatcaaggtgtcctttgccaccaggaggcctgagttcatgaggggcggcggcagcggcggcggcagaagaggccggggcggctaccggggccggggcggcttccagggccggggcggggaccccaagagcggggactgggtgtgccccaaccccagctgtggcaacatgaactttgcccggaggaacagctgcaaccagtgcaatgagcccaggcctgaggacagccggcccagcggcggggacttccggggccggggctacggcggggagcggggctaccggggccggggcggccggggcggggacagaggaggctatggaggagacagaagtggcggcggctacggcggggacaggagcagcggcggcggctacagcggggacagaagtggcggcggctatggaggagacagaagtggcggcggctacggcggggacagaggaggcggctacggcggggacagaggaggcggctacggcggggacagaggaggcggctacggcggggacagaggaggctatggaggagaccggggcggcggctatggaggagaccggggcggctacggcggggacagaggaggctatggaggagaccggggcggctacggcggggacagaggaggctatggaggagacaggagccggggcggctacggcggggacagaggaggcggcagcggctacggcggggacagaagtggcggctacggcggggacagaagtggcggcggctatggaggagaccggggcggcggctatggaggagaccggggcggctacggcggcaagatgggcggcagaaatgactacagaaatgaccagaggaaccggccctactag

SEQ ID NO: 172554 - DNA, 2790 bp, synthetic construct
  misc_feature 1..2790: note = Description of Artificial Sequence: Synthetic coding sequence
  source 1..2790: mol_type = other DNA
atgtgtgagagctacagccgcagcctgctgcgggtgtctgtggcccagatctgccaggccctgggctgggacagcgtgcagctgagcgcctgccacctgctgacagatgtgctgcagcgctacctgcagcagctgggccggggctgccaccgctacagcgagctgtatggccgcacagaccccatcctggatgatgtgggggaggccttccagctgatgggcgtgtccctgcacgagctggaggactacatccacaacatcgagcctgtgaccttcccccaccagatccccagcttccctgtgtccaagaacaacgtgctgcagttcccccagcccggcagcaaggatgctgaggagaggaaggagtacatcccagactacctgccccccatcgtgagcagccaggaggaggaggaggaggagcaggtgcccacagatggcggcaccagcgctgaggccatgcaggtgcccctggaggaggatgatgagctggaggaggaggagatcatcaatgatgagaacttcctgggcaagaggcccctggacagccctgaggccgaggagctgcctgccatgaagaggccccggctgctgagcaccaagggggacaccctggatgtggtgctgctggaggcccgggagcccctgagcagcatcaacacccagaagatcccccccatgctgagccctgtgcacgtgcaggacagcacagacctggccccacccagccctgagccccccatgctggcccctgtggccaagagccagatgcccacagccaagcccctggagaccaagagcttcacccccaagaccaagaccaagaccagcagccctggccagaagaccaagagccccaagacagcccagagccctgccatggtgggcagccccatccgcagccccaagacagtgtccaaggagaagaagagccctggccgcagcaagagccccaagagccccaagagccccaaggtgaccacccacatcccccagacccctgtgcggcctgagacccccaacagaacaccttctgccaccctgtctgagaagatcagcaaggagaccatccaggtgaagcagatccagaccccaccagatgctgggaagctgaacagcgagaaccagcccaagaaggctgtggtggccgacaagaccatcgaggccagcattgatgctgtgattgcccgggcctgtgccgagcgggagccagacccctttgagttcagcagcggcagcgagagcgagggggacatcttcaccagccccaagaggatcagcggccctgagtgcaccacccccaaggccagcaccagcgccaacaacttcaccaagagcggcagcacccccctgcccctgagcggcggcaccagcagcagtgacaacagctggaccatggatgccagcattgatgaggtggtgaggaaggccaagctgggcacccccagcaacatgccacccaacttcccctacatcagcagccccagcgtgtccccacccaccccagagcccctgcacaaggtgtatgaggagaagaccaagctgcccagctctgtggaggtgaagaagaagctgaagaaggagctgaagaccaagatgaagaagaaggagaagcagagggaccgggagcgggagaaggacaagaacaaggacaagagcaaggagaaggacaaggtgaaggagaaggagaaggacaaggagaccggccgggagaccaagtacccctggaaggagttcctgaaggaggaggaggccgacccctacaagttcaagatcaaggagtttgaagatgtggaccccaaggtgaagctgaaggatggcctggtgaggaaggagaaggagaagcacaaggacaagaagaaggaccgggagaagggcaagaaggacaaggacaagcgggagaaggagaaggtgaaggacaagggccgggaggacaagatgaaggccccagccccacccctggtgctgccccccaaggagctggccctgcccctcttcagccctgccacagccagccgggtgcctgccatgctgcccagcctgctgcctgtgctgcctgagaagctgtttgaggagaaggagaaggtgaaggagaaggagaagaagaaggacaagaaggagaagaagaagaagaaggagaaggagaaggagaagaaggagaaggagcgggagaaggagaagcgggagcgggagaagcgggagaaggagaaggagaagcacaagcatgagaagatcaaggtggagcctgtggccctggcccccagccctgtgatcccccggctgaccctgcgggtgggcgccggccaggacaagatcgtcatcagcaaggtggtgcctgcccctgaggccaagccagcccccagccagaaccggcccaagaccccacctccagccccagccccagcccctggccccatgctggtgtccccagcccctgtgcccctgcccctgctggcccaggccgctgctggccctgccctgctgcccagccctggccctgctgccagcggggccagcgccaaggcccctgtgcgctctgtggtgacagaaacagtgtccacctacgtgatcagagatgagtggggcaaccagatctggatctgccccggctgcaacaagccagatgatggcagccccatgattggctgtgatgactgtgatgactggtaccactggccctgtgtgggcatcatgacagcccctcctgaggagatgcagtggttctgccccaagtgtgccaacaagaagaaggacaagaagcacaagaagaggaagcaccgggcccactag

SEQ ID NO: 172555 - DNA, 852 bp, synthetic construct
  misc_feature 1..852: note = Description of Artificial Sequence: Synthetic coding sequence
  source 1..852: mol_type = other DNA
atgtgtgagagctacagccgcagcctgctgcgggtgtctgtggcccagatctgccaggccctgggctgggacagcgtgcagctgagcgcctgccacctgctgacagatgtgctgcagcgctacctgcagcagctgggccggggctgccaccgctacagcgagctgtatggccgcacagaccccatcctggatgatgtgggggaggccttccagctgatgggcgtgtccctgcacgagctggaggactacatccacaacatcgagcctgtgaccttcccccaccagatccccagcttccctgtgtccaagaacaacgtgctgcagttcccccagcccggcagcaaggatgctgaggagaggaaggagtacatcccagactacctgccccccatcgtgagcagccaggaggaggaggaggaggagcaggtgcccacagatggcggcaccagcgctgaggccatgcaggtgcccctggaggaggatgatgagctggaggaggaggagatcatcaatgatgagaacttcctgggcaagaggcccctggacagccctgaggccgaggagctgcctgccatgaagaggccccggctgctgagcaccaagggggacaccctggatgtggtgctgctggaggcccgggagcccctgagcagcatcaacacccagaagatcccccccatgctgagccctgtgcacgtgcaggacagcacagacctggccccacccagccctgagccccccatgctggcccctgtggccaagagccagatgcccacagccaagcccctggagaccaagagcttcacccccaagaccaagaccaagaagaagaagaagaagaagaagagctag

SEQ ID NO: 172556 - DNA, 3258 bp, synthetic construct
  misc_feature 1..3258: note = Description of Artificial Sequence: Synthetic coding sequence
  source 1..3258: mol_type = other DNA
atggctgctggcagtgacctgctggatgaggtgttcttcaacagcgaggtggatgagaaggtggtgtctgacctggtgggcagcctggagagccagctggccgccagcgctgcccaccaccaccacctggcccccaggaccccagaggtgcgggctgctgctgctggggccctgggcaaccacgtggtgtctggcagccctgctggagctgctggagctggccctgctgccccagctgagggcgcccctggagctgcccctgagcccccacctgctggccgggcccggcctgggggcggcggcccccagaggcctggcccccccagcccccggcggcccctggtgcctgctggccctgcccctcctgctgccaagctgcggcccccacctgagggcagcgctggcagctgtgcccctgtgcctgctgctgctgctgtggccgccggccctgagcccgccccagctggccctgccaagccagctggccctgctgccctggccgcccgggccggccctggccctggccctggccctggccctggccctggccctggccctgggaagccagctggccctggggccgcccagaccctgaatggatctgctgccctgctgaacagccaccacgccgccgccccagctgtgtccctggtgaacaacggccctgctgccctgctgcccctgcccaagccagctgcccctggcaccgtcatccagaccccaccatttgtgggcgctgctgcccccccagccccagctgcccccagccccccagctgccccagccccagctgccccagctgctgcccctcctcctcctcctccagccccagccaccctggcccggcccccaggccaccctgctggccccccaacagctgccccagctgtgcccccacctgctgctgcccagaatggaggcagcgctggagctgccccagccccagccccagctgctgggggccctgctggggtgtctggccagcccggccctggagctgctgctgctgccccagcccctggggtgaaggccgagagccccaagagggtggtgcaggccgcccctcctgctgcccagaccctggccgccagcggccctgccagcacagctgcctccatggtgattggccccaccatgcagggcgccctgcccagccctgctgctgtgcccccaccagcccctggcacccccaccggcctgcccaagggagctgctggagctgtgacccagagcctgagcaggacccccacagccaccaccagcggcatccgggccaccctgacccccaccgtgctggccccccggctgccccagcccccccagaaccccaccaacatccagaacttccagctgcccccaggcatggtgctggtgcgctcagaaaatggccagctgctgatgatcccccagcaggccctggcccagatgcaggcccaggcccacgcccagccccagaccaccatggcccccaggcctgccacccccaccagcgcccctcctgtgcagatcagcacagtgcaggcccctggcacccccatcatcgcccggcaggtgacccccaccaccatcatcaagcaggtgtcccaggcccagaccaccgtgcagcccagcgccaccctgcagaggagccctggggtgcagccccagctggtgctgggcggggccgcccagacagccagcctgggcacagccacagctgtgcagacaggcaccccccagaggacagtgcctggggccaccaccaccagcagcgctgccacagagaccatggagaatgtgaagaagtgcaagaacttcctgagcaccctcatcaagctggccagcagcggcaagcagagcacagaaacagctgccaacgtgaaggagctggtgcagaacctgctggatggcaagattgaagctgaggacttcaccagccggctgtaccgggagctgaacagcagcccccagccctacctggtgcccttcctgaagaggagcctgcctgccctgcggcagctgaccccagattctgctgccttcatccagcagagccagcagcagcccccaccacccaccagccaggccaccacagccctgacagctgtggtgctgagcagctctgtgcagaggacagctgggaagacagctgccaccgtgaccagcgccctgcagccccctgtgctgagcctgacccagcccacccaggtgggcgtgggcaagcagggccagcccacccccctggtgatccagcagccccccaagccaggggccctgatccggcccccccaggtgaccctgacccagacccccatggtggccctgcggcagccccacaaccgcatcatgctgaccaccccccagcagatccagctgaaccccctgcagcctgtgcctgtggtgaagccagctgtgctgcccggcaccaaggccctgtctgctgtgtctgcccaggccgccgccgcccagaagaacaagctgaaggagcccggcggcggcagcttcagagatgatgatgacatcaatgatgtggcctccatggccggcgtgaacctgtctgaggagagcgcccgcatcctggccaccaacagcgagctggtgggcaccctgaccaggagctgcaaggatgagaccttcctgctgcaggcccccctgcagaggcgcatcctggagatcggcaagaagcacggcatcacagagctgcacccagatgtggtgtcctatgtgagccacgccacccagcagaggctgcagaacctggtggagaagatcagcgagacagcccagcagaagaacttctcctacaaggatgatgacagatatgagcaggccagtgatgtgcgggcccagctgaagttctttgagcagctggaccagatcgagaagcagaggaaggatgagcaggagcgggagatcctgatgagagctgccaagagccgcagccggcaggaggaccctgagcagctgcggctgaagcagaaggccaaggagatgcagcagcaggagctggcccagatgaggcagagagatgccaacctgacagccctggccgccatcggccccaggaagaagaggaaggtggactgccccggccctggcagcggggctgagggcagcggccctggctctgtggtgcccggcagcagcggcgtgggcaccccccggcagttcacccggcagaggatcaccagggtgaacctgcgggacctgatcttctgcctggagaatgaaagagagaccagccacagcctgctgctgtacaaggccttcctgaagtag

SEQ ID NO: 172557 - DNA, 2850 bp, synthetic construct
  misc_feature 1..2850: note = Description of Artificial Sequence: Synthetic coding sequence
  source 1..2850: mol_type = other DNA
ggccggggcctgctgcagcagagaggaggccgggagagcggccctgcccctcctgctgccaagctgcggcccccacctgagggcagcgctggcagctgtgcccctgtgcctgctgctgctgctgtggccgccggccctgagcccgccccagctggccctgccaagccagctggccctgctgccctggccgcccgggccggccctggccctggccctggccctggccctggccctggccctggccctgggaagccagctggccctggggccgcccagaccctgaatggatctgctgccctgctgaacagccaccacgccgccgccccagctgtgtccctggtgaacaacggccctgctgccctgctgcccctgcccaagccagctgccccagctgctgcccctcctcctcctcctccagccccagccaccctggcccggcccccaggccaccctgctggccccccaacagctgccccagctgtgcccccacctgctgctgcccagaatggaggcagcgctggagctgccccagccccagccccagctgctgggggccctgctggggtgtctggccagcccggccctggagctgctgctgctgccccagcccctggggtgaaggccgagagccccaagagggtggtgcaggccgcccctcctgctgcccagaccctggccgccagcggccctgccagcacagctgcctccatggtgattggccccaccatgcagggcgccctgcccagccctgctgctgtgcccccaccagcccctggcacccccaccggcctgcccaagggagctgctggagctgtgacccagagcctgagcaggacccccacagccaccaccagcggcatccgggccaccctgacccccaccgtgctggccccccggctgccccagcccccccagaaccccaccaacatccagaacttccagctgcccccaggcatggtgctggtgcgctcagaaaatggccagctgctgatgatcccccagcaggccctggcccagatgcaggcccaggcccacgcccagccccagaccaccatggcccccaggcctgccacccccaccagcgcccctcctgtgcagatcagcacagtgcaggcccctggcacccccatcatcgcccggcaggtgacccccaccaccatcatcaagcaggtgtcccaggcccagaccaccgtgcagcccagcgccaccctgcagaggagccctggggtgcagccccagctggtgctgggcggggccgcccagacagccagcctgggcacagccacagctgtgcagacaggcaccccccagaggacagtgcctggggccaccaccaccagcagcgctgccacagagaccatggagaatgtgaagaagtgcaagaacttcctgagcaccctcatcaagctggccagcagcggcaagcagagcacagaaacagctgccaacgtgaaggagctggtgcagaacctgctggatggcaagattgaagctgaggacttcaccagccggctgtaccgggagctgaacagcagcccccagccctacctggtgcccttcctgaagaggagcctgcctgccctgcggcagctgaccccagattctgctgccttcatccagcagagccagcagcagcccccaccacccaccagccaggccaccacagccctgacagctgtggtgctgagcagctctgtgcagaggacagctgggaagacagctgccaccgtgaccagcgccctgcagccccctgtgctgagcctgacccagcccacccaggtgggcgtgggcaagcagggccagcccacccccctggtgatccagcagccccccaagccaggggccctgatccggcccccccaggtgaccctgacccagacccccatggtggccctgcggcagccccacaaccgcatcatgctgaccaccccccagcagatccagctgaaccccctgcagcctgtgcctgtggtgaagccagctgtgctgcccggcaccaaggccctgtctgctgtgtctgcccaggccgccgccgcccagaagaacaagctgaaggagcccggcggcggcagcttcagagatgatgatgacatcaatgatgtggcctccatggccggcgtgaacctgtctgaggagagcgcccgcatcctggccaccaacagcgagctggtgggcaccctgaccaggagctgcaaggatgagaccttcctgctgcaggcccccctgcagaggcgcatcctggagatcggcaagaagcacggcatcacagagctgcacccagatgtggtgtcctatgtgagccacgccacccagcagaggctgcagaacctggtggagaagatcagcgagacagcccagcagaagaacttctcctacaaggatgatgacagatatgagcaggccagtgatgtgcgggcccagctgaagttctttgagcagctggaccagatcgagaagcagaggaaggatgagcaggagcgggagatcctgatgagagctgccaagagccgcagccggcaggaggaccctgagcagctgcggctgaagcagaaggccaaggagatgcagcagcaggagctggcccagatgaggcagagagatgccaacctgacagccctggccgccatcggccccaggaagaagaggaaggtggactgccccggccctggcagcggggctgagggcagcggccctggctctgtggtgcccggcagcagcggcgtgggcaccccccggcagttcacccggcagaggatcaccagggtgaacctgcgggacctgatcttctgcctggagaatgaaagagagaccagccacagcctgctgctgtacaaggccttcctgaagtag

SEQ ID NO: 172558 - DNA, 2589 bp, synthetic construct
  misc_feature 1..2589: note = Description of Artificial Sequence: Synthetic coding sequence
  source 1..2589: mol_type = other DNA
atgcctgctggcctgacagagcctgctggagctgcccctcctgctgctgtgtctgccagcggcaccgtgaccatggccccagctggggccctgcctgtgcgggtggagagcacccctgtggccctgggcgctgtgaccaaggcccctgtgtctgtgtgtgtggagcccacagccagccagcccctgcggagccctgtgggcaccctggtgaccaaggtggcccctgtgtctgccccacccaaggtgagcagcggcccccggctgcctgccccccagatcgtggccgtgaaggcccccaacaccaccaccatccagtttcctgccaacctgcagctgcccccaggcaccgtgctgatcaagagcaacagcggccccctgatgctggtgagcccccagcagacagtgaccagggctgagaccaccagcaacatcaccagcaggcctgctgtgcctgccaacccccagacagtgaagatctgcaccgtgcccaacagcagcagccagctgatcaagaaggtggccgtgacccctgtgaagaagctggcccagatcggcaccaccgtggtgaccaccgtgcccaagcccagctctgtgcagagcgtggccgtgcccacctctgtggtgacagtgacccctgggaagcccctgaacacagtgaccaccctgaagcccagcagcctgggcgccagcagcacccccagcaatgagcccaacctgaaggccgagaacagcgctgctgtgcagatcaacctgagccccaccatgctggagaatgtgaagaagtgcaagaacttcctggccatgctgatcaagctggcctgcagcggcagccagagccctgagatgggccagaatgtgaagaagctggtggagcagctgctggatgccaagattgaggccgaggagttcaccaggaagctgtatgtggagctgaagagcagcccccagccccacctggtgcccttcctgaagaagtctgtggtggccctgcggcagctgctgcccaacagccagagcttcatccagcagtgtgtgcagcagaccagcagtgacatggtgattgccacctgcaccaccaccgtgaccaccagccctgtggtgaccaccaccgtgagcagcagccagagcgagaagagcatcatcgtgtctggggccacagcccccaggacagtgtctgtgcagaccctgaaccccctggccggccctgtgggcgccaaggccggcgtggtgaccctgcacagcgtgggccccacagctgccactggaggcaccacagctggcaccggcctgctgcagaccagcaagcccctggtgacctctgtggccaacacagtgaccaccgtgtccctgcagcctgagaagcctgtggtgtctggaacagctgtgaccctgagcctgcctgctgtgacctttggagagaccagcggggccgccatctgcctgcccagcgtgaagcctgtggtgagcagcgctggcaccaccagtgacaagcctgtgattggcacccctgtgcagatcaagctggcccagcccggccctgtgctgagccagcctgctggcatcccccaggccgtgcaggtgaagcagctggtggtgcagcagcccagcggcggcaatgagaagcaggtgaccaccatcagccacagcagcaccctgaccatccagaagtgtggccagaagaccatgcctgtgaacaccatcatccccaccagccagttccccccagccagcatcctgaagcagatcaccctgcccggcaacaagatcctgagcctgcaggccagccccacccagaagaaccgcatcaaggaaaatgtgaccagctgcttcagagatgaagatgacatcaatgatgtgacctccatggccggcgtgaacctgaatgaggagaatgcctgcatcctggccaccaacagcgagctggtgggcaccctcatccagagctgcaaggatgagcccttcctgttcatcggggccctgcagaagaggatcctggacatcggcaagaagcatgacatcacagagctgaacagtgatgctgtgaacctgatcagccaggccacccaggagcggctgcggggcctgctggagaagctgacagccatcgcccagcacaggatgaccacctacaaggccagcgagaactacatcctgtgcagcgacaccaggagccagctgaagttcctggagaagctggaccagctggagaagcagaggaaggacctggaggagcgggagatgctgctgaaggccgccaagagccgcagcaacaaggaggaccctgagcagctgcggctgaagcagaaggccaaggagctgcagcagctggagctggcccagatccagcacagagatgccaacctgacagccctggccgccatcggccccaggaagaagaggcccctggagagcggcatcgagggcctgaaggacaacctgctggccagcggcaccagcagcctgacagccaccaagcagctgcaccggccccgcatcacccgcatctgcctgcgggacctgatcttctgcatggagcaggagcgggagatgaagtacagccgggccctgtacctggccctgctgaagtag

SEQ ID NO: 172559 - DNA, 1857 bp, synthetic construct
  misc_feature 1..1857: note = Description of Artificial Sequence: Synthetic coding sequence
  source 1..1857: mol_type = other DNA
atgcctgctggcctgacagagcctgctggagctgcccctcctgctgctgtgtctgccagcggcaccgtgaccatggccccagctggggccctgcctgtgcgggtggagagcacccctgtggccctgggcgctgtgaccaaggcccctgtgtctgtgtgtgtggagcccacagccagccagcccctgcggagccctgtgggcaccctggtgaccaaggtggcccctgtgtctgccccacccaaggtgagcagcggcccccggctgcctgccccccagatcgtggccgtgaaggcccccaacaccaccaccatccagtttcctgccaacctgcagctgcccccaggcaccgtgctgatcaagagcaacagcggccccctgatgctggtgagcccccagcagacagtgaccagggctgagaccaccagcaacatcaccagcaggcctgctgtgcctgccaacccccagacagtgaagatctgcaccgtgcccaacagcagcagccagctgatcaagaaggtggccgtgacccctgtgaagaagctggcccagatcggcaccaccgtggtgaccaccgtgcccaagcccagctctgtgcagagcgtggccgtgcccacctctgtggtgacagtgacccctgggaagcccctgaacacagtgaccaccctgaagcccagcagcctgggcgccagcagcacccccagcaatgagcccaacctgaaggccgagaacagcgctgctgtgcagatcaacctgagccccaccatgctggagaatgtgaagaagtgcaagaacttcctggccatgctgatcaagctggcctgcagcggcagccagagccctgagatgggccagaatgtgaagaagctggtggagcagctgctggatgccaagattgaggccgaggagttcaccaggaagctgtatgtggagctgaagagcagcccccagccccacctggtgcccttcctgaagaagtctgtggtggccctgcggcagctgctgcccaacagccagagcttcatccagcagtgtgtgcagcagaccagcagtgacatggtgattgccacctgcaccaccaccgtgaccaccagccctgtggtgaccaccaccgtgagcagcagccagagcgagaagagcatcatcgtgtctggggccacagcccccaggacagtgtctgtgcagaccctgaaccccctggccggccctgtgggcgccaaggccggcgtggtgaccctgcacagcgtgggccccacagctgccactggaggcaccacagctggcaccggcctgctgcagaccagcaagcccctggtgacctctgtggccaacacagtgaccaccgtgtccctgcagcctgagaagcctgtggtgtctggaacagctgtgaccctgagcctgcctgctgtgacctttggagagaccagcggggccgccatctgcctgcccagcgtgaagcctgtggtgagcagcgctggcaccaccagtgacaagcctgtgattggcacccctgtgcagatcaagctggcccagcccggccctgtgctgagccagcctgctggcatcccccaggccgtgcaggtgaagcagctggtggtgcagcagcccagcggcggcaatgagaagcaggtgaccaccatcagccacagcagcaccctgaccatccagaagtgtggccagaagaccatgcctgtgaacaccatcatccccaccagccagttccccccagccagcatcctgaagcagatcaccctgcccggcaacaagatcctgagcctgcaggccagccccacccagaagaaccgcatcaaggaaaatgtgaccagctgcttccgcagcaccttcatctgtgtgtactag

SEQ ID NO: 172560 - DNA, 2598 bp, synthetic construct
  misc_feature 1..2598: note = Description of Artificial Sequence: Synthetic coding sequence
  source 1..2598: mol_type = other DNA
atgcctgctggcctgacagagcctgctggagctgcccctcctgctgctgtgtctgccagcggcaccgtgaccatggccccagctggggccctgcctgtgcgggtggagagcacccctgtggccctgggcgctgtgaccaaggcccctgtgtctgtgtgtgtggagcccacagccagccagcccctgcggagccctgtgggcaccctggtgaccaaggtggcccctgtgtctgccccacccaaggtgagcagcggcccccggctgcctgccccccagatcgtggccgtgaaggcccccaacaccaccaccatccagtttcctgccaacctgcagctgcccccaggcaccgtgctgatcaagagcaacagcggccccctgatgctggtgagcccccagcagacagtgaccagggctgagaccaccagcaacatcaccagcaggcctgctgtgcctgccaacccccagacagtgaagatctgcaccgtgcccaacagcagcagccagctgatcaagaaggtggccgtgacccctgtgaagaagctggcccagatcggcaccaccgtggtgaccaccgtgcccaagcccagctctgtgcagagcgtggccgtgcccacctctgtggtgacagtgacccctgggaagcccctgaacacagtgaccaccctgaagcccagcagcctgggcgccagcagcacccccagcaatgagcccaacctgaaggccgagaacagcgctgctgtgcagatcaacctgagccccaccatgctggagaatgtgaagaagtgcaagaacttcctggccatgctgatcaagctggcctgcagcggcagccagagccctgagatgggccagaatgtgaagaagctggtggagcagctgctggatgccaagattgaggccgaggagttcaccaggaagctgtatgtggagctgaagagcagcccccagccccacctggtgcccttcctgaagaagtctgtggtggccctgcggcagctgctgcccaacagccagagcttcatccagcagtgtgtgcagcagaccagcagtgacatggtgattgccacctgcaccaccaccgtgaccaccagccctgtggtgaccaccaccgtgagcagcagccagagcgagaagagcatcatcgtgtctggggccacagcccccaggacagtgtctgtgcagaccctgaaccccctggccggccctgtgggcgccaaggccggcgtggtgaccctgcacagcgtgggccccacagctgccactggaggcaccacagctggcaccggcctgctgcagaccagcaagcccctggtgacctctgtggccaacacagtgaccaccgtgtccctgcagcctgagaagcctgtggtgtctggaacagctgtgaccctgagcctgcctgctgtgacctttggagagaccagcggggccgccatctgcctgcccagcgtgaagcctgtggtgttctgctgggaccacatcaagcctgtgattggcacccctgtgcagatcaagctggcccagcccggccctgtgctgagccagcctgctggcatcccccaggccgtgcaggtgaagcagctgttcagcctcttccaggtggtgcagcagcccagcggcggcaatgagaagcaggtgaccaccatcagccacagcagcaccctgaccatccagaagtgtggccagaagaccatgcctgtgaacaccatcatccccaccagccagtttcctccagccagcatcctgaagcagatcaccctgcccggcaacaagatcctgagcctgcaggccagccccacccagaagaaccgcatcaaggaaaatgtgaccagctgcttcagagatgaagatgacatcaatgatgtgacctccatggccggcgtgaacctgaatgaagaaaatgcctgcatcctggccaccaacagcgagctggtgggcaccctcatccagagctgcaaggatgagcccttcctgttcatcggggccctgcagaagaggatcctggacatcggcaagaagcatgacatcacagagctgaacagtgatgctgtgaacctgatcagccaggccacccaggagcggctgcggggcctgctggagaagctgacagccatcgcccagcacaggatgaccacctacaaggccagcgagaactacatcctgtgcagcgacaccaggagccagctgaagttcctggagaagctggaccagctggagaagcagaggaaggacctggaggagcgggagatgctgctgaaggccgccaagagccgcagcaacaaggaggaccctgagcagctgcggctgaagcagaaggccaaggagctgcagcagctggagctggcccagatccagcacagagatgccaacctgacagccctggccgccatcggccccaggaagaagaggcccctggagagcggcatcgagggcctgaaggacaacctgctggccagcggcaccagcagcctgacagccaccaagcagctgcaccggccccgcatcacccgcatctgcctgcgggacctgatcttctgcatggagcaggagcgggagatgaagtacagccgggccctgtacctggccctgctgaagtag

SEQ ID NO: 172561 - DNA, 2238 bp, synthetic construct
  misc_feature 1..2238: note = Description of Artificial Sequence: Synthetic coding sequence
  source 1..2238: mol_type = other DNA
atggccgccctggccgaggagcagacagaggtggccgtgaagctggagcctgagggcccccccaccctgctgcccccccaggccggagatggagctggggagggcagcggcggcaccaccaacaacggccccaatggaggcggcggcaatgtggccgccagcagcagcactggaggagatggcggcacccccaagcccaccgtggccgtgtctgctgctgccccagctggggccgcccctgtgcctgctgctgccccagatgctggggcccctcatgaccggcagaccctgctggccgtgctgcagttcctgcggcagagcaagctgcgggaggccgaggaggccctgcggcgggaggccggcctgctggaggaggccgtggccggcagcggggcccctggagaggtggacagcgctggagctgaggtgaccagcgccctgctgagccgggtgacagccagcgcccctggccctgctgccccagaccccccaggcaccggggccagcggggccaccgtggtgtctggcagcgccagcggccctgctgcccctgggaaggtgggctctgtggccgtggaggaccagccagatgtgtctgctgtgctgagcgcctacaaccagcagggcgaccccaccatgtatgaggagtactacagcggcctgaagcacttcatcgagtgcagcctggactgccacagagctgagctgagccagctgttctaccccctgtttgtgcacatgtacctggagctggtgtacaaccagcatgaaaatgaggccaagagcttctttgagaagttccacggggaccaggagtgctactaccaggatgacctgcgggtgctgagcagcctgaccaagaaggagcacatgaagggaaatgagaccatgctggacttccgcaccagcaagtttgtgctgcgcatcagccgggacagctaccagctgctgaagaggcacctgcaggagaagcagaacaaccagatctggaacatcgtgcaggagcacctgtacatcgacatctttgatggcatgcccaggagcaagcagcagattgatgccatggtgggcagcctggccggggaggccaagcgggaggccaacaagagcaaggtgttcttcggcctgctgaaggagcctgagattgaggtgcccctggatgatgaagatgaggagggggagaatgaggagggcaagcccaagaagaagaagcccaagaaggacagcatcggcagcaagagcaagaagcaggaccccaatgccccaccccagaaccgcatccccctgcctgagctgaaggacagcgacaagctggacaagatcatgaacatgaaggagaccaccaagagggtgcggctgggccctgactgcctgcccagcatctgcttctacaccttcctgaatgcctaccagggcctgacagctgtggatgtgacagatgacagcagcctgattgctgggggctttgctgacagcacagtgcgggtgtggagcgtgacccccaagaagctgcggtctgtgaagcaggccagtgacctgagcctgattgacaaggagagtgatgatgtgctggagcgcatcatggatgagaagacagccagcgagctgaagatcctgtatggccacagcggccctgtgtatggagccagcttctccccagaccggctgtgggccacagaccactaccagcccctgcgcatctttgctggccacctggctgatgtgaactgcacccgcttccaccccaacagcaactacgtggccactggatctgctgacagaacagtgcggctgtgggatgtgctgaatggaaactgtgtgcgcatcttcaccggccacaagggccccatccacagcctgaccttcagccccaacggccgcttcctggccactggagccacagatggccgggtgctgctgtgggacattggacatggcctgatggtgggggagctgaagggccacacagacacagtgtgcagcctgcgcttcagcagagatggagagatcctggccagcggctccatggacaacacagtgcggctgtgggatgccatcaaggcctttgaggacctggagacagatgacttcaccacagccaccggccacatcaacctgcctgagaacagccaggagctgctgctgggcacctacatgaccaagagcacccctgtggtgcacctgcacttcaccaggaggaacctggtgctggccgccggggcctacagcccccagtag

SEQ ID NO: 172562 - DNA, 2403 bp, synthetic construct
  misc_feature 1..2403: note = Description of Artificial Sequence: Synthetic coding sequence
  source 1..2403: mol_type = other DNA
atggccgccctggccgaggagcagacagaggtggccgtgaagctggagcctgagggcccccccaccctgctgcccccccaggccggagatggagctggggagggcagcggcggcaccaccaacaacggccccaatggaggcggcggcaatgtggccgccagcagcagcactggaggagatggcggcacccccaagcccaccgtggccgtgtctgctgctgccccagctggggccgcccctgtgcctgctgctgccccagatgctggggcccctcatgaccggcagaccctgctggccgtgctgcagttcctgcggcagagcaagctgcgggaggccgaggaggccctgcggcgggaggccggcctgctggaggaggccgtggccggcagcggggcccctggagaggtggacagcgctggagctgaggtgaccagcgccctgctgagccgggtgacagccagcgcccctggccctgctgccccagaccccccaggcaccggggccagcggggccaccgtggtgtctggcagcgccagcggccctgctgcccctgggaaggtgggctctgtggccgtggaggaccagccagatgtgtctgctgtgctgagcgcctacaaccagcagggcgaccccaccatgtatgaggagtactacagcggcctgaagcacttcatcgagtgcagcctggactgccacagagctgagctgagccagctgttctaccccctgtttgtgcacatgtacctggagctggtgtacaaccagcatgaaaatgaggccaagagcttctttgagaagttccacggggaccaggagtgctactaccaggatgacctgcgggtgctgagcagcctgaccaagaaggagcacatgaagggaaatgagaccatgctggacttccgcaccagcaagtttgtgctgcgcatcagccgggacagctaccagctgctgaagaggcacctgcaggagaagcagaacaaccagatctggaacatcgtgcaggagcacctgtacatcgacatctttgatggcatgcccaggagcaagcagcagattgatgccatggtgggcagcctggccggggaggccaagcgggaggccaacaagagcaaggtgttcttcggcctgctgaaggagcctgagattgaggtgcccctggatgatgaagatgaggagggggagaatgaggagggcaagcccaagaagaagaagcccaagaaggacagcatcggcagcaagagcaagaagcaggaccccaatgccccaccccagaaccgcatccccctgcctgagctgaaggacagcgacaagctggacaagatcatgaacatgaaggagaccaccaagagggtgcggctgggccctgactgcctgcccagcatctgcttctacaccttcctgaatgcctaccagggcctgacagctgtggatgtgacagatgacagcagcctgattgctgggggctttgctgacagcacagtgcgggtgtggagcgtgacccccaagaagctgcggtctgtgaagcaggccagtgacctgagcctgattgacaaggagagtgatgatgtgctggagcgcatcatggatgagaagacagccagcgagctgaagatcctgtatggccacagcggccctgtgtatggagccagcttctccccagacaggaactacctgctgagcagcagtgaagatggcaccgtgcggctgtggagcctgcagaccttcacctgcctggtgggctacaagggccacaactaccctgtgtgggacacccagttcagcccctacggctactactttgtgtctgggggccatgacagagtggcccggctgtgggccacagaccactaccagcccctgcgcatctttgctggccacctggctgatgtgaactgcacccgcttccaccccaacagcaactacgtggccaccggcagcgctgacagaacagtgcggctgtgggatgtgctgaatggaaactgtgtgcgcatcttcaccggccacaagggccccatccacagcctgaccttcagccccaacggccgcttcctggccaccggggccacagatggccgggtgctgctgtgggacatcggccacggcctgatggtgggggagctgaagggccacacagacacagtgtgcagcctgcgcttcagcagagatggagagatcctggccagcggctccatggacaacacagtgcggctgtgggatgccatcaaggcctttgaggacctggagacagatgacttcaccacagccaccggccacatcaacctgcctgagaacagccaggagctgctgctgggcacctacatgaccaagagcacccctgtggtgcacctgcacttcaccaggaggaacctggtgctggccgccggggcctacagcccccagtag

SEQ ID NO: 172563 - DNA, 2034 bp, synthetic construct
  misc_feature 1..2034: note = Description of Artificial Sequence: Synthetic coding sequence
  source 1..2034: mol_type = other DNA
atggccgaggagaagaagctgaagctgagcaacacagtgctgcccagcgagagcatgaaggtggtggccgagagcatgggcatcgcccagatccaggaggagacctgccagctgctgacagatgaggtgtcctaccgcatcaaggagatcgcccaggatgccctgaagttcatgcacatgggcaagaggcagaagctgaccaccagtgacattgattatgccctgaagctgaagaatgtggagcccctgtatggcttccacgcccaggagttcatccccttccgctttgccagcggcggcggccgggagctgtacttctatgaggagaaggaggtggacctgagtgacatcatcaacacccccctgccccgggtgcccctggatgtgtgcctgaaggcccactggctgagcattgagggctgccagcctgccatcccagaaaatcctcctccagcccccaaggagcagcagaaggccgaggccacagagcccctgaagagcgccaagccaggccaggaggaggatggccccctgaagggcaagggccagggcgccaccacagcagatggcaagggcaaggagaagaaggccccacccctgctggagggcgcccccctgcggctgaagcccaggagcatccacgagctgtctgtggagcagcagctgtactacaaggagatcacagaggcctgtgtgggcagctgtgaggccaagagagctgaggccctgcagagcatcgccacagaccccggcctgtaccagatgctgccccgcttcagcaccttcatcagcgagggcgtgcgggtgaatgtggtgcagaacaacctggccctgctgatctacctgatgaggatggtgaaggccctgatggacaaccccaccctgtacctggagaagtatgtgcatgagctgatcccagctgtgatgacctgcatcgtgtcccggcagctgtgcctgcggccagatgtggacaaccactgggccctgcgggactttgctgcccggctggtggcccagatctgcaagcacttcagcaccaccaccaacaacatccagagccgcatcaccaagaccttcaccaagtcctgggtggatgagaagaccccctggaccaccaggtatggcagcattgctggcctggccgagctgggccatgatgtgatcaagaccctcatcctgccccggctgcagcaggagggggagcgcatccgctctgtgctggatggccctgtgctgagcaacatcgaccgcatcggggctgaccacgtgcagagcctgctgctgaagcactgtgcccctgtgctggccaagctgcggcccccaccagacaaccaggatgcctacagagctgagtttggcagcctgggccccctgctgtgcagccaggtggtgaaggcccgggcccaggccgccctgcaggcccagcaggtgaacagaaccaccctgaccatcacccagccccggcccaccctgaccctgagccaggccccccagcccggccccaggaccccaggcctgctgaaggtgcccggcagcatcgccctgcctgtgcagaccctggtgtctgcccgggccgccgccccaccccagcccagccccccacccaccaagttcatcgtgatgagcagcagcagcagcgcccccagcacccagcaggtgctgagcctgagcaccagcgcccctggcagcggcagcaccaccaccagccctgtgaccaccaccgtgcccagcgtgcagcccatcgtgaagctggtgtccacagccaccacagccccacccagcacagcccccagcggccctggctctgtgcagaagtacatcgtggtgtccctgccccccaccggggagggcaagggcggccccaccagccaccccagccctgtgcccccaccagccagcagccccagccccctgagcggcagcgccctgtgtggcggcaagcaggaggccggggacagccccccaccagcccctggcacccccaaggccaacggcagccagcccaacagcggcagcccccagcctgccccctag

SEQ ID NO: 172564 - DNA, 231 bp, synthetic construct
  misc_feature 1..231: note = Description of Artificial Sequence: Synthetic coding sequence
  source 1..231: mol_type = other DNA
atggccgaggagaagaagctgaagctgagcaacacagtgctgcccagcgagagcatgaaggtggtggccgagagcatgggcatcgcccagatccaggaggagacctgccagctgctgacagatgaggtgtcctaccgcatcaaggagatcgcccaggatgccctgaagttcatgcacatgggcaagaggcagaagctgaccaccagtgacattgattatgccctgaagtag

SEQ ID NO: 172565 - DNA, 1806 bp, synthetic construct
  misc_feature 1..1806: note = Description of Artificial Sequence: Synthetic coding sequence
  source 1..1806: mol_type = other DNA
atgcacatgggcaagaggcagaagctgaccaccagtgacatcgactatgccctgaagctgaagaatgtggagcccctgtatggcttccacgcccaggagttcatccccttccgctttgccagcggcggcggccgggagctgtacttctatgaggagaaggaggtggacctgagtgacatcatcaacacccccctgccccgggtgcccctggatgtgtgcctgaaggcccccaaggagcagcagaaggccgaggccacagagcccctgaagagcgccaagccaggccaggaggaggatggccccctgaagggcaagggccagggcgccaccacagcagatggcaagggcaaggagaagaaggccccacccctgctggagggcgcccccctgcggctgaagcccaggagcatccacgagctgtctgtggagcagcagctgtactacaaggagatcacagaggcctgtgtgggcagctgtgaggccaagagagctgaggccctgcagagcatcgccacagaccccggcctgtaccagatgctgccccgcttcagcaccttcatcagcgagggcgtgcgggtgaatgtggtgcagaacaacctggccctgctgatctacctgatgaggatggtgaaggccctgatggacaaccccaccctgtacctggagaagtatgtgcatgagctgatcccagctgtgatgacctgcatcgtgtcccggcagctgtgcctgcggccagatgtggacaaccactgggccctgcgggactttgctgcccggctggtggcccagatctgcaagcacttcagcaccaccaccaacaacatccagagccgcatcaccaagaccttcaccaagtcctgggtggatgagaagaccccctggaccaccaggtatggcagcattgctggcctggccgagctgggccatgatgtgatcaagaccctcatcctgccccggctgcagcaggagggggagcgcatccgctctgtgctggatggccctgtgctgagcaacatcgaccgcatcggggctgaccacgtgcagagcctgctgctgaagcactgtgcccctgtgctggccaagctgcggcccccaccagacaaccaggatgcctacagagctgagtttggcagcctgggccccctgctgtgcagccaggtggtgaaggcccgggcccaggccgccctgcaggcccagcaggtgaacagaaccaccctgaccatcacccagccccggcccaccctgaccctgagccaggccccccagcccggccccaggaccccaggcctgctgaaggtgcccggcagcatcgccctgcctgtgcagaccctggtgtctgcccgggccgccgccccaccccagcccagccccccacccaccaagttcatcgtgatgagcagcagcagcagcgcccccagcacccagcaggtgctgagcctgagcaccagcgcccctggcagcggcagcaccaccaccagccctgtgaccaccaccgtgcccagcgtgcagcccatcgtgaagctggtgtccacagccaccacagccccacccagcacagcccccagcggccctggctctgtgcagaagtacatcgtggtgtccctgccccccaccggggagggcaagggcggccccaccagccaccccagccctgtgcccccaccagccagcagccccagccccctgagcggcagcgccctgtgtggcggcaagcaggaggccggggacagccccccaccagcccctggcacccccaaggccaacggcagccagcccaacagcggcagcccccagcctgccccctag

SEQ ID NO: 172566 - DNA, 45 bp, synthetic construct
  misc_feature 1..45: note = Description of Artificial Sequence: Synthetic coding sequence
  source 1..45: mol_type = other DNA
atggccgaggagaagaagctgaagctgagcaacacagtgctgtag

SEQ ID NO: 172567 - DNA, 2145 bp, synthetic construct
  misc_feature 1..2145: note = Description of Artificial Sequence: Synthetic coding sequence
  source 1..2145: mol_type = other DNA
atgaccaagaggcggctgcagaccatcacagcctgcctgcagctgcgggagggcagccccagcctgcaccggggcctgcaccccagccgggaggagaagagggacagcaggatggccgaggagaagaagctgaagctgagcaacacagtgctgcccagcgagagcatgaaggtggtggccgagagcatgggcatcgcccagatccaggaggagacctgccagctgctgacagatgaggtgtcctaccgcatcaaggagatcgcccaggatgccctgaagttcatgcacatgggcaagaggcagaagctgaccaccagtgacatcgactatgccctgaagctgaagaatgtggagcccctgtatggcttccacgcccaggagttcatccccttccgctttgccagcggcggcggccgggagctgtacttctatgaggagaaggaggtggacctgagtgacatcatcaacacccccctgccccgggtgcccctggatgtgtgcctgaaggcccactggctgagcattgagggctgccagcctgccatccctgagaaccccccaccagcccccaaggagcagcagaaggccgaggccacagagcccctgaagagcgccaagccaggccaggaggaggatggccccctgaagggcaagggccagggcgccaccacagcagatggcaagggcaaggagaagaaggccccacccctgctggagggcgcccccctgcggctgaagcccaggagcatccacgagctgtctgtggagcagcagctgtactacaaggagatcacagaggcctgtgtgggcagctgtgaggccaagagagctgaggccctgcagagcatcgccacagatcctggcctgtaccagatgctgccccgcttcagcaccttcatcagcgagggcgtgcgggtgaatgtggtgcagaacaacctggccctgctgatctacctgatgaggatggtgaaggccctgatggacaaccccaccctgtacctggagaagtatgtgcatgagctgatcccagctgtgatgacctgcatcgtgtcccggcagctgtgcctgcggccagatgtggacaaccactgggccctgcgggactttgctgcccggctggtggcccagatctgcaagcacttcagcaccaccaccaacaacatccagagccgcatcaccaagaccttcaccaagtcctgggtggatgagaagaccccctggaccaccaggtatggcagcattgctggcctggccgagctgggccatgatgtgatcaagaccctcatcctgccccggctgcagcaggagggggagcgcatccgctctgtgctggatggccctgtgctgagcaacatcgacagaattggagctgaccacgtgcagagcctgctgctgaagcactgtgcccctgtgctggccaagctgcggcccccaccagacaaccaggatgcctacagagctgagtttggcagcctgggccccctgctgtgcagccaggtggtgaaggcccgggcccaggccgccctgcaggcccagcaggtgaacagaaccaccctgaccatcacccagccccggcccaccctgaccctgagccaggccccccagcccggccccaggaccccaggcctgctgaaggtgcccggcagcatcgccctgcctgtgcagaccctggtgtctgcccgggctgctgccccaccccagcccagccccccacccaccaagttcatcgtgatgagcagcagcagcagcgcccccagcacccagcaggtgctgagcctgagcaccagcgcccctggcagcggcagcaccaccaccagccctgtgaccaccaccgtgcccagcgtgcagcccatcgtgaagctggtgtccacagccaccacagccccacccagcacagcccccagcggccctggctctgtgcagaagtacatcgtggtgtccctgcccccaactggagagggcaaaggaggccccaccagccaccccagccctgtgcccccaccagccagcagccccagccccctgagcggcagcgccctgtgtggcggcaagcaggaggccggggacagccccccaccagcccctggcacccccaaggccaacggcagccagcccaacagcggcagcccccagcctgccccctag

SEQ ID NO: 172568 - DNA, 702 bp, synthetic construct
  misc_feature 1..702: note = Description of Artificial Sequence: Synthetic coding sequence
  source 1..702: mol_type = other DNA
atggccgaggagaagaagctgaagctgagcaacacagtgctgcccagcgagagcatgaaggtggtggccgagagcatgggcatcgcccagatccaggaggagacctgccagctgctgacagatgaggtgtcctaccgcatcaaggagatcgcccaggatgccctgaagttcatgcacatgggcaagaggcagaagctgaccaccagtgacattgattatgccctgaagctgaagaatgtggagcccctgtatggcttccacgcccaggagttcatccccttccgctttgccagcggcggcggccgggagctgtacttctatgaggagaaggaggtggacctgagtgacatcatcaacacccccctgccccgggtgcccctggatgtgtgcctgaaggcccccaaggagcagcagaaggccgaggccacagagcccctgaagagcgccaagccaggccaggaggaggatggccccctgaagggcaagggccagggcgccaccacagcagatggcaagggcaaggagaagaaggccccacccctgctggagggcgcccccctgcggctgaagcccaggagcatccacgagctgtctgtggagcagcagctgtactacaaggagatcacagaggcctgtgtgggcagctgtgaggccaagagagctgaggccctgcagagcatcgccacagatcctggcctgtag

SEQ ID NO: 172569 - DNA, 405 bp, synthetic construct
  misc_feature 1..405: note = Description of Artificial Sequence: Synthetic coding sequence
  source 1..405: mol_type = other DNA
atggccgaggagaagaagctgaagctgagcaacacagtgctgcccagcgagagcatgaaggtggtggccgagagcatgggcatcgcccagatccaggaggagacctgccagctgctgacagatgaggtgtcctaccgcatcaaggagatcgcccaggatgccctgaagttcatgcacatgggcaagaggcagaagctgaccaccagtgacattgattatgccctgaagctgaagaatgtggagcccctgtatggcttccacgcccaggagttcatccccttccgctttgccagcggcggcggccgggagctgtacttctatgaggagaaggaggtggacctgagtgacatcatcaacacccccctgccccgggtgcccctggatgtgtgcctgaaggcccactag

SEQ ID NO: 172570 - DNA, 345 bp, synthetic construct
  misc_feature 1..345: note = Description of Artificial Sequence: Synthetic coding sequence
  source 1..345: mol_type = other DNA
atggccgaggagaagaagctgaagctgagcaacacagtgctgcccagcgagagcatgaaggtggtggccgagagcatgggcatcgcccagatccaggaggagacctgccagctgctgacagatgaggtgtcctaccgcatcaaggagatcgcccaggatgccctgaagttcatgcacatgggcaagaggcagaagctgaccaccagtgacattgattatgccctgaagctgaagaatgtggagcccctgtatggcttccacgcccaggagttcatccccttccgctttgccagcggcggcggccgggagctgtacttctatgaggagaaggaggtggacctgtag

SEQ ID NO: 172571 - DNA, 2034 bp, synthetic construct; identical to SEQ ID NO: 172563
  misc_feature 1..2034: note = Description of Artificial Sequence: Synthetic coding sequence
  source 1..2034: mol_type = other DNA

SEQ ID NO: 172572 - DNA, 2034 bp, synthetic construct; identical to SEQ ID NO: 172563
  misc_feature 1..2034: note = Description of Artificial Sequence: Synthetic coding sequence
  source 1..2034: mol_type = other DNA

SEQ ID NO: 172573 - DNA, 30 bp, synthetic construct; identical to SEQ ID NO: 101777
  misc_feature 1..30: note = Description of Artificial Sequence: Synthetic coding sequence
  source 1..30: mol_type = other DNA

SEQ ID NO: 172574 - DNA, 2205 bp, synthetic construct
  misc_feature 1..2205: note = Description of Artificial Sequence: Synthetic coding sequence
  source 1..2205: mol_type = other DNA
atggacatccgccacagcgagttcctgccctgcctgcactgccccccatttgtgggccccctgcctgtgagccacgtgtccttcagcagcgcctgccctgtgcccctgcccggcagccccagcctgcaccggggcctgcaccccagccgggaggagaagagggacagcaggatggccgaggagaagaagctgaagctgagcaacacagtgctgcccagcgagagcatgaaggtggtggccgagagcatgggcatcgcccagatccaggaggagacctgccagctgctgacagatgaggtgtcctaccgcatcaaggagatcgcccaggatgccctgaagttcatgcacatgggcaagaggcagaagctgaccaccagtgacatcgactatgccctgaagctgaagaatgtggagcccctgtatggcttccacgcccaggagttcatccccttccgctttgccagcggcggcggccgggagctgtacttctatgaggagaaggaggtggacctgagtgacatcatcaacacccccctgccccgggtgcccctggatgtgtgcctgaaggcccactggctgagcattgagggctgccagcctgccatccctgagaaccccccaccagcccccaaggagcagcagaaggccgaggccacagagcccctgaagagcgccaagccaggccaggaggaggatggccccctgaagggcaagggccagggcgccaccacagcagatggcaagggcaaggagaagaaggccccacccctgctggagggcgcccccctgcggctgaagcccaggagcatccacgagctgtctgtggagcagcagctgtactacaaggagatcacagaggcctgtgtgggcagctgtgaggccaagagagctgaggccctgcagagcatcgccacagatcctggcctgtaccagatgctgccccgcttcagcaccttcatcagcgagggcgtgcgggtgaatgtggtgcagaacaacctggccctgctgatctacctgatgaggatggtgaaggccctgatggacaaccccaccctgtacctggagaagtatgtgcatgagctgatcccagctgtgatgacctgcatcgtgtcccggcagctgtgcctgcggccagatgtggacaaccactgggccctgcgggactttgctgcccggctggtggcccagatctgcaagcacttcagcaccaccaccaacaacatccagagccgcatcaccaagaccttcaccaagtcctgggtggatgagaagaccccctggaccaccaggtatggcagcattgctggcctggccgagctgggccatgatgtgatcaagaccctcatcctgccccggctgcagcaggagggggagcgcatccgctctgtgctggatggccctgtgctgagcaacatcgacagaattggagctgaccacgtgcagagcctgctgctgaagcactgtgcccctgtgctggccaagctgcggcccccaccagacaaccaggatgcctacagagctgagtttggcagcctgggccccctgctgtgcagccaggtggtgaaggcccgggcccaggccgccctgcaggcccagcaggtgaacagaaccaccctgaccatcacccagccccggcccaccctgaccctgagccaggccccccagcccggccccaggaccccaggcctgctgaaggtgcccggcagcatcgccctgcctgtgcagaccctggtgtctgcccgggctgctgccccaccccagcccagccccccacccaccaagttcatcgtgatgagcagcagcagcagcgcccccagcacccagcaggtgctgagcctgagcaccagcgcccctggcagcggcagcaccaccaccagccctgtgaccaccaccgtgcccagcgtgcagcccatcgtgaagctggtgtccacagccaccacagccccacccagcacagcccccagcggccctggctctgtgcagaagtacatcgtggtgtccctgcccccaactggagagggcaaaggaggccccaccagccaccccagccctgtgcccccaccagccagcagccccagccccctgagcggcagcgccctgtgtggcggcaagcaggaggccggggacagccccccaccagcccctggcacccccaaggccaacggcagccagcccaacagcggcagcccccagcctgccccctag

SEQ ID NO: 172575 - DNA, 768 bp, synthetic construct
  misc_feature 1..768: note = Description of Artificial Sequence: Synthetic coding sequence
  source 1..768: mol_type = other DNA
atggccgaggagaagaagctgaagctgagcaacacagtgctgcccagcgagagcatgaaggtggtggccgagagcatgggcatcgcccagatccaggaggagacctgccagctgctgacagatgaggtgtcctaccgcatcaaggagatcgcccaggatgccctgaagttcatgcacatgggcaagaggcagaagctgaccaccagtgacattgattatgccctgaagctgaagaatgtggagcccctgtatggcttccacgcccaggagttcatccccttccgctttgccagcggcggcggccgggagctgtacttctatgaggagaaggaggtggacctgagtgacatcatcaacacccccctgccccgggtgcccctggatgtgtgcctgaaggcccactggctgagcattgagggctgccagcctgccatcccagaaaatcctcctccagcccccaaggagcagcagaaggccgaggccacagagcccctgaagagcgccaagccaggccaggaggaggatggccccctgaagggcaagggccagggcgccaccacagcagatggcaagggcaaggagaagaaggccccacccctgctggagggcgcccccctgcggctgaagcccaggagcatccacgagctgtctgtggagcagcagctgtactacaaggagatcacagaggcctgtgtgggcagctgtgaggccaagagagctgaggccctgcagagcatcgccacagaccccggcctgtaccagatgtag

SEQ ID NO: 172576 - DNA, 1050 bp, synthetic construct
  misc_feature 1..1050: note = Description of Artificial Sequence: Synthetic coding sequence
  source 1..1050: mol_type = other DNA
atgagcaagagcaaggatgatgcccctcatgagctggagagccagttcatcctgcggctgcccccagaatatgccagcacagtgagaagagctgtgcagagcggccacgtgaacctgaaggaccggctgaccatcgagctgcacccagatggaagacatggaattgtgcgggtggacagagtgcccctggccagcaagctggtggacctgccctgtgtgatggagagcctgaagaccatcgacaagaagaccttctacaagacagctgacatctgccagatgctggtgtccacagtggatggagacctgtacccacctgtggaggagcctgtggccagcacagaccccaaggccagcaagaagaaggacaaggacaaggagaagaagttcatctggaaccacggcatcaccctgcccctgaagaatgtgaggaagaggcgcttcaggaagacagccaagaagaagtacatcgagagcccagatgtggagaaggaggtgaagaggctgctgagcacagatgctgaggccgtgtccacccgctgggagatcatcgccgaggatgagaccaaggaggccgagaaccagggcctggacatcagcagccctggcatgagcggccaccggcagggccatgacagcctggagcatgatgagctgcgggagatcttcaatgacctgagcagcagcagtgaagatgaagatgagacccagcaccaggatgaggaggacatcaacatcatcgacacagaggaggacctggagcggcagctgcaggacaagctgaatgaaagtgatgagcagcaccaggagaatgaaggcaccaaccagctggtgatgggcatccagaagcagattgacaacatgaagggcaagctgcaggagacccaggaccgggccaagaggcaggaggacctgatcatgaaggtggagaacctggccctgaagaaccgcttccaggccgtgctggatgagctgaagcagaaggaggaccgggagaaggagcagctgagcagcctgcaggaggagctggagagcctgctggagaagtag

SEQ ID NO: 172577 - DNA, 909 bp, synthetic construct
  misc_feature 1..909: note = Description of Artificial Sequence: Synthetic coding sequence
  source 1..909: mol_type = other DNA
atgtctgagagccaggatgaggtgcctgatgaggtggagaaccagttcatcctgcggctgcccctggagcacgcctgcaccgtgaggaacctggcccggagccagagcgtgaagatgaaggacaagctgaagattgacctgctgcctgatggaagacatgctgtggtggaggtggaggatgtgcccctggccgccaagctggtggacctgccctgcgtcatcgagagcctgcggaccctggacaagaagaccttctacaagacagctgacatcagccagatgctggtgtgcacagcagatggagacatccacctgagccctgaggagcctgctgccagcacagaccccaacatcgtgaggaagaaggagcggggccgggaggagaagtgtgtgtggaagcacggcatcaccccacccctgaagaatgtgaggaagaagcgcttcaggaagacccagaagaaggtgcctgatgtgaaggagatggagaagagcagcttcacagagtacatcgagagcccagatgtggagaatgaggtgaagaggctgctgcggagtgatgctgaggccgtgtccacccgctgggaggtgattgctgaagatggcaccaaggagattgagagccagggcagcatccctggcttcctgatcagcagcggcatgagcagccacaagcagggccacaccagctctgtgatggagatccagaagcagatcgagaagaaggagaagaagctgcacaagatccagaacaaggcccagaggcagaaggacctgatcatgaaggtggagaacctgaccctgaagaaccacttccagagcgtgctggagcagctggagctgcaggagaagcagaagaatgagaagctgatcagcctgcaggagcagctgcagcgcttcctgaagaagtag

SEQ ID NO: 172578 - DNA, 1131 bp, synthetic construct
  misc_feature 1..1131: note = Description of Artificial Sequence: Synthetic coding sequence
  source 1..1131: mol_type = other DNA
atgtctgagagccaggatgaggtgcctgatgaggtggagaaccagttcatcctgcggctgcccctggagcacgcctgcaccgtgaggaacctggcccggagccagagcgtgaagatgaaggacaagctgaagattgacctgctgcctgatggaagacatgctgtggtggaggtggaggatgtgcccctggccgccaagctggtggacctgccctgcgtcatcgagagcctgcggaccctggacaagaagaccttctacaagacagctgacatcagccagatgctggtgtgcacagcagatggagacatccacctgagccctgaggagcctgctgccagcacagaccccaacatcgtgaggaagaaggagcggggccgggaggagaagtgtgtgtggaagcacggcatcaccccacccctgaagaatgtgaggaagaagcgcttcaggaagacccagaagaaggtgcctgatgtgaaggagatggagaagagcagcttcacagagtacatcgagagcccagatgtggagaatgaggtgaagaggctgctgcggagtgatgctgaggccgtgtccacccgctgggaggtgattgctgaagatggcaccaaggagattgagagccagggcagcatccctggcttcctgatcagcagcggcatgagcagccacaagcagggccacaccagcagtgaatatgacatgctgcgggagatgttcagtgacagccgcagcaacaatgatgatgatgaagatgaagatgatgaagatgaagatgaagatgaagatgaagatgaagatgaggacaaggaggaggaggaggaggactgcagcgaggagtacctggagcggcagctgcaggccgagttcatcgagagcggccagtaccgggccaatgaaggcaccagcagcatcgtgatggagatccagaagcagatcgagaagaaggagaagaagctgcacaagatccagaacaaggcccagaggcagaaggacctgatcatgaaggtggagaacctgaccctgaagaaccacttccagagcgtgctggagcagctggagctgcaggagaagcagaagaatgagaagctgatcagcctgcaggagcagctgcagcgcttcctgaagaagtag

SEQ ID NO: 172579 - DNA, 909 bp, synthetic construct; identical to SEQ ID NO: 172577
  misc_feature 1..909: note = Description of Artificial Sequence: Synthetic coding sequence
  source 1..909: mol_type = other DNA

SEQ ID NO: 172580 - DNA, 1389 bp, synthetic construct
  misc_feature 1..1389: note = Description of Artificial Sequence: Synthetic coding sequence
  source 1..1389: mol_type = other DNA
atggagtgcccagagggccagctgcccatcagcagtgaaaatgacagcacccccaccgtgtccaccagcgaggtgaccagccagcaggagccccagatcctggtggaccggggcagcgagaccacctatgagagcagcgctgacattgctggagatgagggcacccagatcccagcagatgaggacacccagacagatgctgacagcagcgcccaggccgccgcccaggcccctgagaacttccaggagggcaaggacatgtctgagagccaggatgaggtgcctgatgaggtggagaaccagttcatcctgcggctgcccctggagcacgcctgcaccgtgaggaacctggcccggagccagagcgtgaagatgaaggacaagctgaagattgacctgctgcctgatggaagacatgctgtggtggaggtggaggatgtgcccctggccgccaagctggtggacctgccctgcgtcatcgagagcctgcggaccctggacaagaagaccttctacaagacagctgacatcagccagatgctggtgtgcacagcagatggagacatccacctgagccctgaggagcctgctgccagcacagaccccaacatcgtgaggaagaaggagcggggccgggaggagaagtgtgtgtggaagcacggcatcaccccacccctgaagaatgtgaggaagaagcgcttcaggaagacccagaagaaggtgcctgatgtgaaggagatggagaagagcagcttcacagagtacatcgagagcccagatgtggagaatgaggtgaagaggctgctgcggagtgatgctgaggccgtgtccacccgctgggaggtgattgctgaagatggcaccaaggagattgagagccagggcagcatccctggcttcctgatcagcagcggcatgagcagccacaagcagggccacaccagcagtgaatatgacatgctgcgggagatgttcagtgacagccgcagcaacaatgatgatgatgaagatgaagatgatgaagatgaagatgaagatgaagatgaagatgaagatgaggacaaggaggaggaggaggaggactgcagcgaggagtacctggagcggcagctgcaggccgagttcatcgagagcggccagtaccgggccaatgaaggcaccagcagcatcgtgatggagatccagaagcagatcgagaagaaggagaagaagctgcacaagatccagaacaaggcccagaggcagaaggacctgatcatgaaggtggagaacctgaccctgaagaaccacttccagagcgtgctggagcagctggagctgcaggagaagcagaagaatgagaagctgatcagcctgcaggagcagctgcagcgcttcctgaagaagtag

SEQ ID NO: 172581 - DNA, 1548 bp, synthetic construct
  misc_feature 1..1548: note = Description of Artificial Sequence: Synthetic coding sequence
  source 1..1548: mol_type = other DNA
atgggcaactgggtggtgaaccactggttctctgtgctcttcctggtggtgtggctgggcctgaatgtgttcctgtttgtggatgccttcctgaagtatgagaaggctgacaagtactactacaccaggaagatcctgggcagcaccctggcctgtgcccgggccagcgccctgtgcctgaacttcaacagcaccctcatcctgctgcctgtgtgcaggaacctgctgtccttcctgcggggcacctgcagcttctgcagcaggaccctgaggaagcagctggaccacaacctgaccttccacaagctggtggcctacatgatctgcctgcacacagccatccacatcatcgcccacctgttcaactttgactgctacagccgcagccggcaggccacagatggcagcctggccagcatcctgagcagcctgagccatgatgagaagaagggcggctcctggctgaaccccatccagagcaggaacaccaccgtggagtatgtgaccttcaccagcattgctggcctgactggagtcatcatgaccatcgccctgatcctgatggtgaccagcgccacagagttcatcagaagaagctactttgaggtgttctggtacacccaccacctgttcatcttctacatcctgggcctgggcatccatggaattggaggcatcgtgcggggccagacagaggagagcatgaatgaaagccaccccaggaaatgtgccgagagctttgagatgtgggatgaccgggacagccactgccggcggcccaagtttgagggccaccccccagagagctggaagtggatcctggcccctgtgatcctgtacatctgtgagcgcatcctgcgcttctaccgcagccagcagaaggtggtgatcaccaaggtggtgatgcaccccagcaaggtgctggagctgcagatgaacaagaggggcttctccatggaggtgggccagtacatctttgtgaactgccccagcatcagcctgctggagtggcaccccttcaccctgaccagcgcccctgaggaggacttcttcagcatccacatccgggccgccggggactggacagaaaatctcatccgggcctttgagcagcagtacagccccatccccagaattgaggtggatggcccctttggaacagcctctgaagatgtgttccagtatgaggtggccgtgctggtgggcgccggcattggagtgaccccatttgccagcatcctgaagagcatctggtacaagttccagtgtgccgaccacaacctgaagaccaagaaggtgggccacgccgccctgaactttgacaaggccacagacatcgtgacaggcctgaagcagaagaccagctttggccggcccatgtgggacaatgagttcagcaccatcgccaccagccaccccaagtctgtggtgggcgtcttcctgtgtggccccaggaccctggccaagagcctgaggaagtgctgccaccgctacagcagcctggaccccaggaaggtgcagttctacttcaacaaggagaacttctag

SEQ ID NO: 172582 - DNA, 795 bp, synthetic construct; identical to SEQ ID NO: 156631
  misc_feature 1..795: note = Description of Artificial Sequence: Synthetic coding sequence
  source 1..795: mol_type = other DNA

SEQ ID NO: 172583 - DNA, 510 bp, synthetic construct
  misc_feature 1..510: note = Description of Artificial Sequence: Synthetic coding sequence
  source 1..510: mol_type = other DNA
atgtgccacaggaagccaggcaccccaggagtgggcaagaccaccctgggcaaggagctggccagcaagagcggcctgaagtacatcaacgtgggggacctggcccgggaggagcagctgtatgatggctatgatgaggagtatgactgccccatcctggatgaagatagagtggtggatgagctggacaaccagatgagggagggcggcgtcatcgtggactaccacggctgtgacttcttccctgagcgctggttccacatcgtgtttgtgctgaggacagacaccaacgtgctgtatgaaaggctggagacccggggctacaatgagaagaagctgacagacaacatccagtgtgagatcttccaggtgctgtatgaggaggccacagccagctacaaggaggagatcgtgcaccagctgcccagcaacaagccagaggagctggagaacaacgtggaccagatcctgaagtggattgagcagtggatcaaggaccacaacagctag

SEQ ID NO: 172584 - DNA, 519 bp, synthetic construct
  misc_feature 1..519: note = Description of Artificial Sequence: Synthetic coding sequence
  source 1..519: mol_type = other DNA
atgctgctgcccaacatcctgctgaccggcaccccaggagtgggcaagaccaccctgggcaaggagctggccagcaagagcggcctgaagtacatcaacgtgggggacctggcccgggaggagcagctgtatgatggctatgatgaggagtatgactgccccatcctggatgaggacagagtggtggatgagctggacaaccagatgagggagggcggcgtgattgtggactaccacggctgtgacttcttccctgagcgctggttccacatcgtgtttgtgctgaggacagacaccaacgtgctgtatgagcggctggagacccggggctacaatgagaagaagctgacagacaacatccagtgtgagatcttccaggtgctgtatgaggaggccacagccagctacaaggaggagatcgtgcaccagctgcccagcaacaagccagaggagctggagaacaacgtggaccagatcctgaagtggattgagcagtggatcaaggaccacaacagctag

SEQ ID NO: 172585 - DNA, 597 bp, synthetic construct
  misc_feature 1..597: note = Description of Artificial Sequence: Synthetic coding sequence
  source 1..597: mol_type = other DNA
atggagagcggcaagacagccagccccaagtccatgcccaaggatgcccagatgatggcccagatcctgaaggacatgggcatcacagaatatgagcccagggtcatcaaccagatgctggagtttgccttccgctacgtgaccaccatcctggatgatgccaagatctacagcagccacgccaagaaggccaccgtggatgctgatgatgtgcggctggccatccagtgcagagctgaccagagcttcaccagccccccaccccgggacttcctgctggacatcgcccggcagaggaaccagacccccctgcccctcatcaagccctacagcggcccccggctgcccccagaccgctactgcctgacagcccccaactaccgcctgaagagcctgcagaagaaggccagcaccagcgctggccgcatcaccgtgccccggctgtctgtgggctctgtgaccagccggcccagcacccccaccctgggcacccccaccccccagaccatgtctgtgtccaccaaggtgggcacccccatgagcctgaccggccagcgcttcaccgtgcagatgcccaccagccagagccctgcctag

SEQ ID NO: 172586 - DNA, 411 bp, synthetic construct
  misc_feature 1..411: note = Description of Artificial Sequence: Synthetic coding sequence
  source 1..411: mol_type = other DNA
atggagagcggcaagacagccagccccaagtccatgcccaaggatgcccagatgatggcccagatcctgaaggacatgggcatcacagaatatgagcccagggtcatcaaccagatgctggagtttgccttccgctacgtgaccaccatcctggatgatgccaagatctacagcagccacgccaagaaggccaccgtggatgctgatgatgtgcggctggccatccagtgcagagctgaccagagcttcaccagccccccaccccgggacttcctgctggacatcgcccggcagaggaaccagacccccctgcccctcatcaagccctacagcggcccccggctgcccccagaccgctactgcctgacagcccccaactaccgcctgaagagcctgcagaagaaggcctag

SEQ ID NO: 172587 - DNA, 795 bp, synthetic construct; identical to SEQ ID NO: 156631
  misc_feature 1..795: note = Description of Artificial Sequence: Synthetic coding sequence
  source 1..795: mol_type = other DNA

SEQ ID NO: 172588 - DNA, 309 bp, synthetic construct
  misc_feature 1..309: note = Description of Artificial Sequence: Synthetic coding sequence
  source 1..309: mol_type = other DNA
atggagagcggcaagacagccagccccaagtccatgcccaaggatgcccagatgatggcccagatcctgaaggacatgggcatcacagaatatgagcccagggtcatcaaccagatgctggagtttgccttccgctacgtgaccaccatcctggatgatgccaagatctacagcagccacgccaagaaggccaccgtggatgctgatgatgtgcggctggccatccagtgcagagctgaccagagcttcaccagccccccaccccgggacttcctgctggacatcgcccggcagaggaaccagacctag

SEQ ID NO: 172589 - DNA, 501 bp, synthetic construct
  misc_feature 1..501: note = Description of Artificial Sequence: Synthetic coding sequence
  source 1..501: mol_type = other DNA
atggagagcggcaagacagccagccccaagtccatgcccaaggatgcccagatgatggcccagatcctgaaggacatgggcatcacagaatatgagcccagggtcatcaaccagatgctggagtttgccttccgctacgtgaccaccatcctggatgatgccaagatctacagcagccacgccaagaaggccaccgtggatgctgatgatgtgcggctggccatccagtgcagagctgaccagagcttcaccagccccccaccccgggacttcctgctggacatcgcccggcagaggaaccagacccccctgcccctcatcaagccctacagcggcccccggctgcccccagaccgctactgcctgacagcccccaactaccgcctgaagagcctgcagaagaaggccagcaccagcgctggccgcatcaccgtgccccggctgtctgtgggctctgtgaccagccggcccagcacccccaccctgggcacccccacctag

SEQ ID NO: 172590 - DNA, 384 bp, synthetic construct
  misc_feature 1..384: note = Description of Artificial Sequence: Synthetic coding sequence
  source 1..384: mol_type = other DNA
atggagagcggcaagacagccagccccaagtccatgcccaaggatgcccagatgatggcccagatcctgaaggacatgggcatcacagaatatgagcccagggtcatcaaccagatgctggagtttgccttccgctacgtgaccaccatcctggatgatgccaagatctacagcagccacgccaagaaggccaccgtggatgctgatgatgtgcggctggccatccagtgcagagctgaccagagcttcaccagccccccaccccgggacttcctgctggacatcgcccggcagaggaaccagacccccctgcccctcatcaagccctacagcggcccccggctgcccccagaccgctactgcctgacagcccccaactactag

SEQ ID NO: 172591 - DNA, 756 bp, synthetic construct
  misc_feature 1..756: note = Description of Artificial Sequence: Synthetic coding sequence
  source 1..756: mol_type = other DNA
atggagagcggcaagatggccccacccaagaatgcccccagagatgccctggtgatggcccagatcctgaaggacatgggcatcacagaatatgagcccagggtcatcaaccagatgctggagtttgccttccgctacgtgaccaccatcctggatgatgccaagatctacagcagccacgccaagaagcccaacgtggatgctgatgatgtgcggctggccatccagtgcagagctgaccagagcttcaccagccccccaccccgggacttcctgctggacatcgcccggcagaagaaccagacccccctgcccctcatcaagccctatgccggcccccggctgcccccagaccgctactgcctgacagcccccaactaccgcctgaagagcctcatcaagaagggccccaaccagggccgcctggtgccccggctgtctgtgggcgctgtgagcagcaagcccaccacccccaccatcgccaccccccagacagtgtctgtgcccaacaaggtggccacccccatgtctgtgaccagccagcgcttcaccgtgcagatcccccccagccagagcacccctgtgaagcctgtgcctgccaccacagctgtgcagaatgtgctgatcaaccccagcatgattggccccaagaacatcctgatcaccaccaacatggtgagcagccagaacacagccaatgaggccaaccccctgaagaggaagcatgaagatgatgatgacaatgacatcatgtag

SEQ ID NO: 172592 - DNA, 879 bp, synthetic construct
  misc_feature 1..879: note = Description of Artificial Sequence: Synthetic coding sequence
  source 1..879: mol_type = other DNA
atgcccctgcacgtgaagtggcccttccctgctgtgccccccctgacctggaccctggccagctctgtggtgatgggcctggtgggcacctacagctgcttctggaccaagtacatgaaccacctgactgtgcacaaccgggaggtgctgtatgagctgattgagaagaggggccctgccacccccctcatcaccgtgagcaaccaccagagctgcatggatgacccccacctgtggggcatcctgaagctgcggcacatctggaacctgaagctgatgcgctggaccccagctgctgctgacatctgcttcaccaaggagctgcacagccacttcttcagcctgggcaaatgtgtgcctgtgtgcagaggagctgagttcttccaggctgaaaatgaaggaaaaggagtgctggacaccggccgccacatgcctggagctgggaagaggcgggagaagggagatggagtgtaccagaagggcatggacttcatcctggagaagctgaaccacggggactgggtgcacatcttccctgagggcaaggtgaacatgagcagcgagttcctgcgcttcaagtggggcatcggccgcctgattgctgagtgccacctgaaccccatcatcctgcccctgtggcacgtgggcatgaatgatgtgctgcccaacagccccccctacttccccaggtttggccagaagatcaccgtgctgattggcaagcccttcagcgccctgcctgtgctggagcggctgcgggcagagaacaagtctgctgtggagatgaggaaggccctgacagacttcatccaggaggagttccagcacctgaagacccaggccgagcagctgcacaaccacctgcagcccggccgctag

SEQ ID NO: 172593 - DNA, 789 bp, synthetic construct
  misc_feature 1..789: note = Description of Artificial Sequence: Synthetic coding sequence
  source 1..789: mol_type = other DNA
atgcccctgcacgtgaagtggcccttccctgctgtgccccccctgacctggaccctggccagctctgtggtgatgggcctggtgggcacctacagctgcttctggaccaagtacatgaaccacctgactgtgcacaaccgggaggtgctgtatgagctgattgagaagaggggccctgccacccccctcatcaccgtgagcaaccaccagagctgcatggatgacccccacctgtggggcatcctgaagctgcggcacatctggaacctgaagctgatgcgctggaccccagctgctgctgacatctgcttcaccaaggagctgcacagccacttcttcagcctgggcaaatgtgtgcctgtgtgcagaggagatggagtgtaccagaagggcatggacttcatcctggagaagctgaaccacggggactgggtgcacatcttccctgagggcaaggtgaacatgagcagcgagttcctgcgcttcaagtggggcatcggccgcctgattgctgagtgccacctgaaccccatcatcctgcccctgtggcacgtgggcatgaatgatgtgctgcccaacagccccccctacttccccaggtttggccagaagatcaccgtgctgattggcaagcccttcagcgccctgcctgtgctggagcggctgcgggcagagaacaagtctgctgtggagatgaggaaggccctgacagacttcatccaggaggagttccagcacctgaagacccaggccgagcagctgcacaaccacctgcagcccggccgctag

SEQ ID NO: 172594 - DNA, 837 bp, synthetic construct
  misc_feature 1..837: note = Description of Artificial Sequence: Synthetic coding sequence
  source 1..837: mol_type = other DNA
atgcccctgcacgtgaagtggcccttccctgctgtgccccccctgacctggaccctggccagctctgtggtgatgggcctggtgggcacctacagctgcttctggaccaagtacatgaaccacctgactgtgcacaaccgggaggtgctgtatgagctgattgagaagaggggccctgccacccccctcatcaccgtgagcaaccaccagagctgcatggatgacccccacctgtggggcatcctgaagctgcggcacatctggaacctgaagctgatgcgctggaccccagctgctgctgacatctgcttcaccaaggagctgcacagccacttcttcagcctgggcaaatgtgtgcctgtgtgcagaggagctgagttcttccaggctgaaaatgaaggaaaaggagtgctggacaccggccgccacatgcctggagctgggaagaggcgggagaagggagatggagtgtaccagaagggcatggacttcatcctggagaagctgaaccacggggactgggtgcacatcttccctgagggcatcggccgcctgattgctgagtgccacctgaaccccatcatcctgcccctgtggcacgtgggcatgaatgatgtgctgcccaacagccccccctacttccccaggtttggccagaagatcaccgtgctgattggcaagcccttcagcgccctgcctgtgctggagcggctgcgggcagagaacaagtctgctgtggagatgaggaaggccctgacagacttcatccaggaggagttccagcacctgaagacccaggccgagcagctgcacaaccacctgcagcccggccgctag

SEQ ID NO: 172595 - DNA, 747 bp, synthetic construct
  misc_feature 1..747: note = Description of Artificial Sequence: Synthetic coding sequence
  source 1..747: mol_type = other DNA
atgcccctgcacgtgaagtggcccttccctgctgtgccccccctgacctggaccctggccagctctgtggtgatgggcctggtgggcacctacagctgcttctggaccaagtacatgaaccacctgactgtgcacaaccgggaggtgctgtatgagctgattgagaagaggggccctgccacccccctcatcaccgtgagcaaccaccagagctgcatggatgacccccacctgtggggcatcctgaagctgcggcacatctggaacctgaagctgatgcgctggaccccagctgctgctgacatctgcttcaccaaggagctgcacagccacttcttcagcctgggcaaatgtgtgcctgtgtgcagaggagatggagtgtaccagaagggcatggacttcatcctggagaagctgaaccacggggactgggtgcacatcttccctgagggcatcggccgcctgattgctgagtgccacctgaaccccatcatcctgcccctgtggcacgtgggcatgaatgatgtgctgcccaacagccccccctacttccccaggtttggccagaagatcaccgtgctgattggcaagcccttcagcgccctgcctgtgctggagcggctgcgggcagagaacaagtctgctgtggagatgaggaaggccctgacagacttcatccaggaggagttccagcacctgaagacccaggccgagcagctgcacaaccacctgcagcccggccgctag

SEQ ID NO: 172596 - DNA, 798 bp, synthetic construct
  misc_feature 1..798: note = Description of Artificial Sequence: Synthetic coding sequence
  source 1..798: mol_type = other DNA
atgcccctgcacgtgaagtggcccttccctgctgtgccccccctgacctggaccctggccagctctgtggtgatgggcctggtgggcacctacagctgcttctggaccaagtacatgaaccacctgactgtgcacaaccgggaggtgctgtatgagctgattgagaagaggggccctgccacccccctcatcaccgtgagcaaccaccagagctgcatggatgacccccacctgtggggcatcctgaagctgcggcacatctggaacctgaagctgatgcgctggaccccagctgctgctgacatctgcttcaccaaggagctgcacagccacttcttcagcctgggcaaatgtgtgcctgtgtgcagaggagctgagttcttccaggctgaaaatgaaggaaaaggagtgctggacaccggccgccacatgcctggagctgggaagaggcgggagaagggcaaggtgaacatgagcagcgagttcctgcgcttcaagtggggcatcggccgcctgattgctgagtgccacctgaaccccatcatcctgcccctgtggcacgtgggcatgaatgatgtgctgcccaacagccccccctacttcccccgcttcggccagaagatcaccgtgctgattggcaagcccttcagcgccctgcctgtgctggagcggctgcgggcagagaacaagtctgctgtggagatgaggaaggccctgacagacttcatccaggaggagttccagcacctgaagacccaggccgagcagctgcacaaccacctgcagcctggaagatag

SEQ ID NO: 172597 - DNA, 7629 bp, synthetic construct
  misc_feature 1..7629: note = Description of Artificial Sequence: Synthetic coding sequence
  source 1..7629: mol_type = other DNA
atggtggccctgagcctgaagatctgtgtgcgccactgcaatgtggtgaagaccatgcagtttgagcccagcacagctgtgtatgatgcctgcagggtcatccgggagcgggtgcctgaggcccagacaggccaggccagtgactatggcctcttcctgagtgatgaggaccccaggaagggcatctggctggaggccggccgcaccctggactactacatgctgagaaatggagacatcctggagtacaagaagaagcagaggccccagaagatccgcatgctggatggctctgtgaagacagtgatggtggatgacagcaagacagtgggggagctgctggtgaccatctgcagcagaattggcatcaccaactatgaggagtacagcctcatccaggagaccatcgaggagaagaaggaggagggcaccggcaccctgaagaaggacaggaccctgctgagagatgagaggaagatggagaagctgaaggccaagctgcacacagatgatgacctgaactggctggaccacagcaggaccttccgggagcagggcgtggatgaaaatgagaccctgctgctgcggaggaagttcttctacagcgaccagaatgtggacagccgggaccctgtgcagctgaacctgctgtatgtgcaggccagagatgacatcctgaatggcagccaccctgtgtcctttgagaaggcctgtgaatttggaggcttccaggcccagatccagtttggcccccacgtggagcacaagcacaagccaggcttcctggacctgaaggagttcctgcccaaggagtacatcaagcagagaggagctgagaagaggatcttccaggagcacaagaactgtggggagatgtctgaaattgaggccaaggtgaagtatgtgaagctggcccggagcctgcggacctatggagtgtccttcttcctggtgaaggagaagatgaagggcaagaacaagctggtgccccggctgctgggcatcaccaaggacagcgtgatgagggtggatgagaagaccaaggaggtgctgcaggagtggcccctgaccaccgtgaagcgctgggccgccagccccaagagcttcaccctggactttggagagtaccaggagagctactacagcgtgcagaccacagaaggagagcagatcagccagctgattgctggctacatcgacatcatcctgaagaagaagcagagcaaggaccgcttcggcctggagggagatgaggagagcaccatgctggaggagagcgtgagccccaagaagagcaccatcctgcagcagcagttcaacagaacaggcaaggccgagcacggctctgtggccctgcctgctgtgatgaggagcggcagcagcggccctgagaccttcaacgtgggctccatgcccagcccccagcagcaggtgatggtgggccagatgcaccggggccacatgccacccctgaccagcgcccagcaggccctgatgggcaccatcaacacctccatgcatgctgtgcagcaggcccaggatgacctgtctgagctggacagcctgccccccctgggccaggacatggccagccgggtgtgggtgcagaacaaggtggatgagagcaagcatgagatccacagccaggtggatgccatcacagctggaacagcctctgtggtgaacctgacagctggggaccctgctgacacagactacacagctgtgggctgtgccatcaccaccatcagcagcaacctgacagagatgagcaagggcgtgaagctgctggccgccctgatggatgatgaggtgggcagcggggaggacctgctgcgggccgcccggaccctggccggggctgtgtctgacctgctgaaggctgtgcagcccaccagcggggagccccggcagacagtgctgacagctgctggcagcatcggccaggccagcggggacctgctgcggcagatcggggagaatgaaacagatgagcgcttccaggatgtgctgatgagcctggccaaggctgtggccaatgctgctgccatgctggtgctgaaggccaagaatgtggcccaggtggctgaagatactgtgctgcagaacagagtgattgctgctgccacccagtgtgccctgagcaccagccagctggtggcctgtgccaaggtggtgagccccaccatcagcagccctgtgtgccaggagcagctgattgaggccggcaagctggtggacagatctgtggagaactgtgtgcgggcctgccaggccgccaccacagacagcgagctgctgaagcaggtgtctgctgctgcctctgtggtgtcccaggccctgcatgacctgctgcagcacgtgcggcagtttgccagcagaggagagcccatcggccgctatgaccaggccacagacaccatcatgtgtgtgacagagagcatcttcagctccatgggagatgctggggagatggtgcggcaggcccgggtgctggcccaggccaccagtgacctggtgaatgccatgagaagtgatgctgaggccgagattgacatggagaacagcaagaagctgctggccgccgccaagctgctggccgacagcacagccaggatggtggaggccgccaagggagctgctgccaacccagaaaatgaagaccagcagcagaggctgcgggaggccgctgagggcctgcgggtggccaccaatgctgctgcccagaatgccatcaagaagaagatcgtgaaccggctggaggtggccgccaagcaggccgctgctgctgccacccagaccatcgccgccagccagaatgctgctgtgagcaacaagaacccagctgcccagcagcagctggtgcagagctgcaaggctgtggccgaccacatcccccagctggtgcagggcgtgcggggcagccaggcccaggccgaggacctgagcgcccagctggccctgatcatcagcagccagaacttcctgcagcccggcagcaagatggtgtcctctgccaaggctgctgtgcccaccgtgtctgaccaggccgccgccatgcagctgagccagtgtgccaagaacctggccaccagcctggccgagctgaggacagccagccagaaggcccacgaggcctgtggccccatggagattgacagcgccctgaacacagtgcagaccctgaagaatgagctgcaggatgccaagatggctgctgtggagagccagctgaagcccctgcccggggagaccctggagaagtgtgcccaggacctgggcagcaccagcaaggctgtgggcagctccatggcccagctgctgacctgtgccgcccagggcaatgagcactacacaggagtggccgcccgggagacagcccaggccctgaagaccctggcccaggccgcccggggcgtggccgccagcaccacagatcctgctgctgcccacgccatgctggacagcgccagagatgtgatggagggcagcgccatgctgatccaggaggccaagcaggccctgattgcccctggagatgctgagcggcagcagaggctggcccaggtggccaaggctgtgagccacagcctgaacaactgtgtgaactgcctgcccggccagaaggatgtggatgtggccctgaagagcatcggggagagcagcaagaagctgctggtggacagcctgccccccagcaccaagcccttccaggaggcccagagcgagctgaaccaggccgctgctgacctgaaccagagcgctggggaggtggtgcacgccacccggggccagagcggggagctggccgccgccagcggcaagttcagtgatgactttgatgagttcctggatgctggcatcgagatggccggccaggcccagaccaaggaggaccagatccaggtgattggcaacctgaagaacatctccatggccagcagcaagctgctgctggccgccaagagcctgtctgtggaccccggggccccaaatgccaagaacctgctggccgccgccgcccgggctgtgacagagagcatcaaccagctgatcaccctgtgcacccagcaggcccctggccagaaggaatgtgacaatgccctgcgggagctggagaccgtgaagggcatgctggacaaccccaatgaacctgtgtctgacctgagctactttgactgcattgaatctgtgatggagaacagcaaggtgctgggggagagcatggccggcatcagccagaatgccaagacaggagacctgcctgccttcggggagtgtgtgggcatcgccagcaaggccctgtgtggcctgacagaagctgctgcccaggccgcctacctggtgggcatcagtgaccccaacagccaggccggccaccagggcctggtggaccccatccagtttgcccgggccaaccaggccatccagatggcctgccagaacctggtggaccccggcagcagccccagccaggtgctgtctgctgccaccatcgtggccaagcacaccagcgccctgtgcaatgcctgcagaattgccagcagcaagacagccaaccctgtggccaagaggcactttgtgcagagcgccaaggaggtggccaacagcacagccaacctggtgaagaccatcaaggccctggatggagacttcagcgaggacaacagaaataaatgtcgcatcgccacagcccccctcatcgaggccgtggagaacctgacagcctttgccagcaaccctgagtttgtgtccatcccagcccagatcagcagcgagggcagccaggcccaggagcccatcctggtgtctgccaagaccatgctggagagcagcagctacctgatcagaacagcccggagcctggccatcaaccccaaggacccccccacctggagcgtgctggccggccacagccacacagtgtctgacagcatcaagagcctcatcaccagcatccgggacaaggcccctggccagcgggagtgtgactacagcattgatggcatcaaccgctgcatccgggacatcgagcaggccagcctggccgctgtgtcccagagcctggccaccagagatgacatctctgtggaggccctgcaggagcagctgacctctgtggtgcaggagatcggccacctgattgaccccatcgccacagctgcccggggggaggccgcccagctgggccacaaggtgacccagctggccagctactttgagcccctcatcctggccgctgtgggcgtggccagcaagatcctggaccaccagcagcagatgacagtgctggaccagaccaagaccctggccgagagcgccctgcagatgctgtatgctgccaaggagggcggcggcaaccccaaggcccagcacacccatgatgccatcacagaggccgcccagctgatgaaggaggccgtggatgacatcatggtgaccctgaatgaggccgccagcgaggtgggcctggtgggcggcatggtggatgccatcgccgaggccatgagcaagctggatgagggcaccccacctgagcccaagggcacctttgtggactaccagaccaccgtggtgaagtacagcaaggccatcgctgtgacagcccaggagatgatgaccaagtctgtgaccaaccctgaggagctgggcggcctggccagccagatgaccagtgactatggccacctggccttccagggccagatggctgctgccacagctgagcctgaggagatcggcttccagatccgcaccagggtgcaggacctgggccacggctgcatcttcctggtgcagaaggccggggccctgcaggtgtgccccacagacagctacaccaagcgggagctgattgaatgtgcccgggctgtgacagagaaggtgtccctggtgctgagcgccctgcaggccggcaacaagggcacccaggcctgcatcacagctgccacagctgtgtctggcatcatcgctgacctggacaccaccatcatgtttgccacagctggcaccctgaatgctgagaacagcgagacctttgctgaccaccgggagaacatcctgaagacagccaaggccctggtggaggacaccaagctgctggtgtctggggccgccagcaccccagacaagctggcccaggccgcccagagcagcgctgccaccatcacccagctggccgaggtggtgaagctgggcgccgccagcctgggcagtgatgatcctgagacccaggtggtgctgatcaatgccatcaaggatgtggccaaggccctgagtgacctgatcagcgccaccaagggggccgccagcaagcctgtggatgaccccagcatgtaccagctgaagggggccgccaaggtgatggtgaccaacgtgaccagcctgctgaagacagtgaaggctgtggaggatgaggccacccggggcacccgggccctggaggccaccatcgagtgcatcaagcaggagctgactgtgttccagagcaaggatgtgcctgagaagaccagcagccctgaggagagcatccgcatgaccaagggcatcaccatggccacagccaaggctgtggccgccggcaacagctgccggcaggaggatgtgattgccacagccaacctgagcaggaaggctgtgtctgacatgctgacagcctgcaagcaggccagcttccacccagatgtgtctgatgaggtgaggacccgggccctgcgcttcggcacagaatgtaccctgggctacctggacctgctggagcacgtgctggtgatcctgcagaagcccaccccagagttcaagcagcagctggccgccttcagcaagagggtggccggggctgtgacagagctgatccaggccgctgaggccatgaagggcacagagtgggtggaccctgaggaccccaccgtgattgctgagacagagctgctgggcgccgccgccagcattgaagctgctgccaagaagctggagcagctgaagccccgggccaagcccaagcaggctgatgagaccctggactttgaggagcagatcctggaggccgccaagagcattgctgctgccaccagcgccctggtgaagagcgccagcgctgcccagcgggagctggtggcccagggcaaggtgggcagcatcccagccaatgctgctgatgatggccagtggagccagggcctcatctctgctgccaggatggtggccgccgccaccagcagcctgtgtgaggccgccaatgcctctgtgcagggccacgccagcgaggagaagctgatcagcagcgccaagcaggtggccgccagcacagcccagctgctggtggcctgcaaggtgaaggctgaccaggacagcgaggccatgaggcggctgcaggccgctggaaatgctgtgaagagggccagtgacaacctggtgcgggccgcccagaaggccgccttcggcaaggcagatgatgatgatgtggtggtgaagaccaagtttgtgggcggcatcgcccagatcatcgccgcccaggaggagatgctgaagaaggagcgggagctggaggaggccaggaagaagctggcccagatccggcagcagcagtacaagttcctgcccacagagctgagagaagatgagggctag

SEQ ID NO: 172598 - DNA, 7629 bp, synthetic construct; identical to SEQ ID NO: 172597
  misc_feature 1..7629: note = Description of Artificial Sequence: Synthetic coding sequence
  source 1..7629: mol_type = other DNA

SEQ ID NO: 172599 - DNA, 5190 bp, synthetic construct
  misc_feature 1..5190: note = Description of Artificial Sequence: Synthetic coding sequence
  source 1..5190: mol_type = other DNA
atgaaggtgtccaccctgcgggagagcagcgccatggccagccccctgccccgggagatggaggaggagctggtgcccactggaagtgagcccggggacacccgggccaagccccctgtgaagcccaagccccgggccctgcctgccaagccagccctgcctgccaagcccagcctgctggtgcctgtgggccccaggcctccccggggccccctggccgagctgcccagcgccaggaagatgaacatgctggccggcccccagccctacggcggcagcaagaggcccctgccctttgcccccaggcctgctgtggaggccagcactggaggagaggccacccaggagaccgggaaggaggaggccggcaaggaggagcccccacccctgaccccaccagcccgctgtgccgcccctggaggagtgaggaaggccccagcccccttccggcctgccagcgagagatttgctgccaccaccgtggaggagatcctggccaagatggagcagcccaggaaggaggtgctggccagcccagaccggctgtggggcagccggctgaccttcaaccatgatggcagcagccgctatggccccaggacctacggcaccaccacagcccccagagatgaagatggcagcaccctcttccggggctggagccaggagggccctgtgaagagccctgcagaatgtcgggaggagcacagcaagaccccagaggagaggagcctgcccagcgacctggccttcaacggggacctggccaaggccgccagcagcgagctgcctgctgacatcagcaagccctggatccccagcagccctgcccccagcagtgaaaatggaggccctgccagccctggcctgcctgctgaggccagcggcagcggccctggcagcccccacctgcaccccccagacaagagcagcccctgccacagccagctgctggaggcccagaccccagaggccagccaggccagcccctgcccagctgtgaccccatctgcccccagcgctgccctgcctgatgagggcagccgccacacccccagccctggcctgcctgctgagggcgcccctgaggccccccggcccagcagccccccacctgaggtgctggagccccacagcctggaccagcccccagccaccagcccccggcccctcatcgaggtgggggagctgctggacctgaccaggaccttccccagcggcggggaggaggaggccaagggagatgcccacctgcggcccaccagcctggtgcagaggcgcttcagcgagggcgtgctgcagagccccagccaggaccaggagaagctgggcggcagcctggccgccctgccccagggccagggcagccagctggccctggaccggccctttggagctgagagcaactggagcctgagccagagctttgagtggaccttccccacccggcccagcggcctgggcgtgtggaggctggacagccccccacccagccccatcacagaggccagcgaggccgctgaggccgctgaggccggcaacctggccgtgagcagccgggaggagggcgtgtcccagcagggccagggcgccggcagcgcccccagcggcagcggcagctcctgggtgcagggagatgaccccagcatgagcctgacccagaagggagatggagagagccagccccagtttcctgctgtgcccctggagcccctgcccaccacagagggcaccccaggcctgcccctgcagcaggccgaggagagatatgagagccaggagcccctggccggccaggagagccccctgcccctggccacccgggaggccgccctgcccatcctggagcctgtgctgggccaggagcagcctgctgccccagaccagccctgtgtgctgtttgctgatgcccctgagcccggccaggccctgcctgtggaggaggaggccgtgaccctggcccgggcagagaccacccaggccaggacagaggcccaggacctgtgccgggccagccctgagcccccaggccctgagagcagcagccgctggctggatgacctgctggccagccccccaccttctgggggcggggccaggagaggagctggagctgagctgaaggacacccagagccccagcacctgcagcgagggcctgctgggctggagccagaaggacctgcagagcgagtttggcatcactggagacccccagcccagcagcttcagccccagctcctggtgccagggcgccagccaggactatggcctgggcggggccagccccaggggggaccccggcctgggggagcgggactggaccagcaaatatggccagggcgctggggagggcagcacccgggagtgggccagccgctgtggcatcggccaggaggagatggaggccagcagcagccaggaccagagcaaggtgtctgcccctggggtgctgacagcccaggacagagtggtgggcaagccagcccagctgggcacccagaggagccaggaggctgatgtgcaggactgggagttcaggaagagggacagccagggcacctacagcagcagagatgctgagctgcaggaccaggagtttgggaagagggacagcctgggcacctacagcagcagagatgtgtccctgggggactgggagtttgggaagagggacagcctgggcgcctatgccagccaggatgccaatgagcagggccaggacctgggcaagagggaccaccacggccgctacagcagccaggatgctgatgagcaggactgggagttccagaagagagatgtgtccctgggcacctacggcagcagagctgctgagccccaggagcaggagtttgggaagagcgcctggatccgggactacagcagcggcggcagcagcaggaccctggatgcccaggacaggagctttggcacccggcccctgagcagcggcttcagccctgaggaggcccagcagcaggatgaggagtttgagaagaagatccccagcgtggaggacagcctgggggagggcagcagagatgctggccggcctggagagcggggcagcggcggcctcttcagccccagcacagcccacgtgcctgatggagccctgggccagagggaccagagctcctggcagaacagtgatgccagccaggaggtgggcggccaccaggagcggcagcaggccggggcccagggccctggcagcgctgacctggaggatggagagatgggcaagaggggctgggtgggggagttcagcctgtctgtgggcccccagcgggaggccgccttcagccctggccagcaggactggagccgggacttctgcatcgaggccagcgagaggagctaccagtttggcatcattggaaatgacagagtgtctggagctggcttcagccccagcagcaagatggagggcggccactttgtgcccccaggcaagaccacagctggctctgtggactggacagaccagctgggcctgaggaacctggaggtgagcagctgtgtgggcagcggcggcagcagcgaggcccgggagagcgctgtgggccagatgggctggagcggcggcctgagcctgcgggacatgaacctgaccggctgcctggagagcggcggcagcgaggagcccggcggcatcggcgtgggggagaaggactggaccagtgatgtgaatgtgaagagcaaggacctggccgaggtgggggagggcggcggccacagccaggcccgggagagcggcgtgggccagacagactggagcggcgtggaggccggggagttcctgaagagccgggagcggggcgtgggccaggccgactggaccccagacctgggcctgaggaacatggcccctggagctgtgtgcagccctggagagagcaaggagctgggcgtgggccagatggactggggcaacaacctgggcctgcgggacctggaggtgacctgtgaccctgacagcggcggcagccagggcctgcggggctgcggcgtgggccagatggactggacccaggacctggccccccagaatgtggagctgtttggagcccccagcgaggcccgggagcacggcgtgggcggcgtgtcccagtgcccagagcccggcctgcggcacaacggcagcctgagccctggcctggaggcccgggaccccctggaggcccgggagctgggcgtgggggagaccagcggccctgagacccagggcgaggactacagcagcagcagcctggagccccaccctgctgaccccggcatggagaccggggaggccctgagctttggagccagccctggccgctgcccagcccggcccccacccagcggcagccagggcctgctggaggagatgctggccgccagcagcagcaaggctgtggcccggcgggagagcgctgccagcggcctgggcggcctgctggaggaggagggcgctggggccggggccgcccaggaggaggtgctggagcccggccgggacagcccccccagctggaggccccagccagatggagaggccagccagacagaagatgtggatggcacctggggcagcagcgctgcccgctggagcgaccagggccctgcccagaccagccggcggcccagccagggccccccagcccggagccccagccaggacttctccttcatcgaggacacagagatcctggacagcgccatgtaccgcagccgggccaacctgggcaggaagaggggccaccgggcccctgtgatccggcctgggggcaccctgggcctgtctgaggccgctgacagtgatgcccacctgttccaggacagcacagagccccgggccagccgggtgcccagcagtgatgaggaggtggtggaggagccccagagcaggaggaccaggatgagcctgggcaccaagggcctgaaggtgaacctcttccctggcctgagccccagcgccctgaaggccaagctgcggcccaggaacagatctgctgaggagggggagctggccgagagcaagagcagccagaaggagagcgctgtgcagaggagcaagagctgcaaggtgcccggcctgggcaagcccctgaccctgccccccaagccagagaagagcagcggcagcgagggcagcagccccaactggctgcaggccctgaagctgaagaagaagaaggtgtag

SEQ ID NO: 172600 - DNA, 432 bp, synthetic construct
  misc_feature 1..432: note = Description of Artificial Sequence: Synthetic coding sequence
  source 1..432: mol_type = other DNA
atgaaggtgtccaccctgcgggagagcagcgccatggccagccccctgccccgggagatggaggaggagctggtgcccactggaagtgagcccggggacacccgggccaagccccctgtgaagcccaagccccgggccctgcctgccaagccagccctgcctgccaagcccagcctgctggtgcctgtgggccccaggcctccccggggccccctggccgagctgcccagcgccaggaagatgaacatgctggccggcccccagccctacggcggcagcaagaggcccctgccctttgcccccaggcctgctgtggaggccagcactggaggagaggccacccaggagaccgggaaggaggaggccggcaaggaggagcccccacccctgaccccaccagcccgctgtgccgcccctggaggagtgaggtag

SEQ ID NO: 172601 - DNA, 5190 bp, synthetic construct; identical to SEQ ID NO: 172599
  misc_feature 1..5190: note = Description of Artificial Sequence: Synthetic coding sequence
  source 1..5190: mol_type = other DNA

SEQ ID NO: 172602 - DNA, 3006 bp, synthetic construct
  misc_feature 1..3006: note = Description of Artificial Sequence: Synthetic coding sequence
  source 1..3006: mol_type = other DNA
atgcccagcaccaacagagctggcagcctgaaggaccctgagattgctgagctgttcttcaaggaggaccctgagaagctgttcacagacctgcgggagatcggccacggcagctttggagctgtgtactttgccagagatgtgaggaccaatgaggtggtggccatcaagaagatgagctacagcggcaagcagagcacagagaagtggcaggacatcatcaaggaggtgaagttcctgcagaggatcaagcaccccaacagcattgagtacaagggctgctacctgcgggagcacacagcctggctggtgatggagtactgcctgggcagcgccagtgacctgctggaggtgcacaagaagcccctgcaggaggtggagattgctgccatcacccatggagccctgcagggcctggcctacctgcacagccacaccatgatccaccgggacatcaaggccggcaacatcctgctgacagagcccggccaggtgaagctggccgactttggcagcgcctccatggccagccctgccaacagctttgtgggcaccccctactggatggcccctgaggtgatcctggccatggatgagggccagtatgatggcaaggtggatgtgtggagcctgggcatcacctgcatcgagctggccgagaggaagcccccactcttcaacatgaatgccatgtctgccctgtaccacatcgcccagaatgaaagccccaccctgcagagcaatgagtggagcgactacttcaggaactttgtggacagctgcctgcagaagatcccccaggaccggcccaccagcgaggagctgctgaagcacatctttgtgctgcgggagaggcctgagaccgtgctgattgacctgatccagaggaccaaggatgctgtgcgggagctggacaacctgcagtacaggaagatgaagaagctgctcttccaggaggcccacaacggccctgctgtggaggcccaggaggaggaggaggagcaggaccatggagtgggccgcacaggcaccgtgaacagcgtgggcagcaaccagagcatccccagcatgagcatcagcgccagcagccagagcagctctgtgaacagcctgcctgatgtgtctgatgacaagtctgagctggacatgatggagggggaccacacagtgatgagcaacagcagcgtcatccacctgaagccagaggaggagaactaccgggaggagggggaccccaggacccgggccagtgacccccagagccccccccaggtgagccgccacaagagccactacagaaaccgggagcactttgccaccatcagaacagccagcctggtgacccggcagatgcaggagcacgagcaggacagcgagctgcgggagcagatgagcggctacaagaggatgaggcggcagcaccagaagcagctgatgaccctggagaacaagctgaaggccgagatggatgagcaccggctgcggctggacaaggacctggagacccagaggaacaactttgctgctgagatggagaagctgatcaagaagcaccaggccgccatggagaaggaggccaaggtgatgagcaatgaggagaagaagttccagcagcacatccaggcccagcagaagaaggagctgaacagcttcctggagagccagaagcgggagtacaagctgaggaaggagcagctgaaggaggagctgaatgaaaaccagagcacccccaagaaggagaagcaggagtggctgagcaagcagaaggagaacatccagcacttccaggccgaggaggaggccaacctgctgcggcggcagaggcagtacctggagctggagtgccgccgcttcaagaggaggatgctgctgggccgccacaacctggagcaggacctggtgcgggaggagctgaacaagaggcagacccagaaggacctggagcacgccatgctgctgcggcagcacgagagcatgcaggagctggagttccgccacctgaacaccatccagaagatgagatgtgagctgatccggctgcagcaccagacagagctgaccaaccagctggagtacaacaagagaagagagcgggagctgcggaggaagcacgtgatggaggtgcggcagcagcccaagagcctgaagagcaaggagctgcagatcaagaagcagttccaggacacctgcaagatccagacccggcagtacaaggccctgaggaaccacctgctggagaccacccccaagtctgagcacaaggctgtgctgaagaggctgaaggaggagcagaccaggaagctggccatcctggccgagcagtatgaccacagcatcaatgagatgctgagcacccaggccctgcggctggatgaggcccaggaggccgagtgccaggtgctgaagatgcagctgcagcaggagctggagctgctgaatgcctaccagagcaagatcaagatgcaggccgaggcccagcacgaccgggagctgcgggagctggagcagagggtgtccctgcggcgggccctgctggagcagaagattgaggaggagatgctggccctgcagaatgaaagaacagagcgcatccgcagcctgctggagcggcaggcccgggagattgaggcctttgacagcgagagcatgaggctgggcttcagcaacatggtgctgagcaacctgagccctgaggccttcagccacagctacccaggggccagcggctggagccacaaccccactggaggccctggcccccactggggccaccccatgggcggccccccccaggcctggggccaccccatgcagggcggcccccagccctggggccaccccagcggccccatgcagggcgtgccccggggcagctccatgggcgtgaggaacagcccccaggccctgcggaggacagccagcggcggccgcacagagcagggcatgagccgcagcacctctgtgaccagccagatcagcaatggcagccacatgagctacacctag

SEQ ID NO: 172603 - DNA, 2562 bp, synthetic construct
  misc_feature 1..2562: note = Description of Artificial Sequence: Synthetic coding sequence
  source 1..2562: mol_type = other DNA
atgcccagcaccaacagagctggcagcctgaaggaccctgagattgctgagctgttcttcaaggaggaccctgagaagctgttcacagacctgcgggagatcggccacggcagctttggagctgtgtactttgccagagatgtgaggaccaatgaggtggtggccatcaagaagatgagctacagcggcaagcagagcacagagaagtggcaggacatcatcaaggaggtgaagttcctgcagaggatcaagcaccccaacagcattgagtacaagggctgctacctgcgggagcacacagcctggctggtgatggagtactgcctgggcagcgccagtgacctgctggaggtgcacaagaagcccctgcaggaggtggagattgctgccatcacccatggagccctgcagggcctggcctacctgcacagccacaccatgatccaccgggacatcaaggccggcaacatcctgctgacagagcccggccaggtgaagctggccgactttggcagcgcctccatggccagccctgccaacagctttgtgggcaccccctactggatggcccctgaggtgatcctggccatggatgagggccagtatgatggcaaggtggatgtgtggagcctgggcatcacctgcatcgagctggccgagaggaagcccccactcttcaacatgaatgccatgtctgccctgtaccacatcgcccagaatgaaagccccaccctgcagagcaatgagtggagcgactacttcaggaactttgtggacagctgcctgcagaagatcccccaggaccggcccaccagcgaggagctgctgaagcacatctttgtgctgcgggagaggcctgagaccgtgctgattgacctgatccagaggaccaaggatgctgtgcgggagctggacaacctgcagtacaggaagatgaagaagctgctcttccaggaggcccacaacggccctgctgtggaggcccaggaggaggaggaggagcaggaccatggagtgggccgcacaggcaccgtgaacagcgtgggcagcaaccagagcatccccagcatgagcatcagcgccagcagccagagcagctctgtgaacagcctgcctgatgtgtctgatgacaagtctgagctggacatgatggagggggaccacacagtgatgagcaacagcagcgtcatccacctgaagccagaggaggagaactaccgggaggagggggaccccaggacccgggccagtgacccccagagccccccccaggtgagccgccacaagagccactacagaaaccgggagcactttgccaccatcagaacagccagcctggtgacccggcagatgcaggagcacgagcaggacagcgagctgcgggagcagatgagcggctacaagaggatgaggcggcagcaccagaagcagctgatgaccctggagaacaagctgaaggccgagatggatgagcaccggctgcggctggacaaggacctggagacccagaggaacaactttgctgctgagatggagaagctgatcaagaagcaccaggccgccatggagaaggaggccaaggtgatgagcaatgaggagaagaagttccagcagcacatccaggcccagcagaagaaggagctgaacagcttcctggagagccagaagcgggagtacaagctgaggaaggagcagctgaaggagagcaaggagctgcagatcaagaagcagttccaggacacctgcaagatccagacccggcagtacaaggccctgaggaaccacctgctggagaccacccccaagtctgagcacaaggctgtgctgaagaggctgaaggaggagcagaccaggaagctggccatcctggccgagcagtatgaccacagcatcaatgagatgctgagcacccaggccctgcggctggatgaggcccaggaggccgagtgccaggtgctgaagatgcagctgcagcaggagctggagctgctgaatgcctaccagagcaagatcaagatgcaggccgaggcccagcacgaccgggagctgcgggagctggagcagagggtgtccctgcggcgggccctgctggagcagaagattgaggaggagatgctggccctgcagaatgaaagaacagagcgcatccgcagcctgctggagcggcaggcccgggagattgaggcctttgacagcgagagcatgaggctgggcttcagcaacatggtgctgagcaacctgagccctgaggccttcagccacagctacccaggggccagcggctggagccacaaccccactggaggccctggcccccactggggccaccccatgggcggccccccccaggcctggggccaccccatgcagggcggcccccagccctggggccaccccagcggccccatgcagggcgtgccccggggcagctccatgggcgtgaggaacagcccccaggccctgcggaggacagccagcggcggccgcacagagcagggcatgagccgcagcacctctgtgaccagccagatcagcaatggcagccacatgagctacacctag

SEQ ID NO: 172604 - DNA, 3150 bp, synthetic construct
  misc_feature 1..3150: note = Description of Artificial Sequence: Synthetic coding sequence
  source 1..3150: mol_type = other DNA
atgcctgctgggggccgggccggcagcctgaaggaccctgatgtggccgagctgttcttcaaggatgatcctgagaagctgttcagtgacctgcgggagatcggccacggcagctttggagctgtgtactttgccagagatgtgagaaattctgaggtggtggccatcaagaagatgagctacagcggcaagcagagcaatgagaagtggcaggacatcatcaaggaggtgcgcttcctgcagaagctgcggcaccccaacaccatccagtaccggggctgctacctgcgggagcacacagcctggctggtgatggagtactgcctgggcagcgccagtgacctgctggaggtgcacaagaagcccctgcaggaggtggagattgctgctgtgacccatggagccctgcagggcctggcctacctgcacagccacaacatgatccacagagatgtgaaggccggcaacatcctgctgtctgagcccggcctggtgaagctgggggactttggcagcgccagcatcatggccccagccaacagctttgtgggcaccccctactggatggcccctgaggtgatcctggccatggatgagggccagtatgatggcaaggtggatgtgtggagcctgggcatcacctgcatcgagctggccgagaggaagcccccactcttcaacatgaatgccatgtctgccctgtaccacatcgcccagaatgaaagccctgtgctgcagagcggccactggagcgagtacttcaggaactttgtggacagctgcctgcagaagatcccccaggaccggcccaccagcgaggtgctgctgaagcacagatttgtgctgcgggagcggccccccaccgtcatcatggacctgatccagaggaccaaggatgctgtgcgggagctggacaacctgcagtacaggaagatgaagaagatcctcttccaggaggcccccaacggccctggagctgaggcccctgaggaggaggaggaggccgagccctacatgcaccgggccggcaccctgaccagcctggagagcagccacagcgtgcccagcatgagcatcagcgccagcagccagagcagctctgtgaacagcctggctgatgccagtgacaatgaggaggaggaggaggaggaggaggaggaggaggaggaggaggagggccctgaggcccgggagatggccatgatgcaggagggggagcacacagtgaccagccacagcagcatcatccaccggctgcccggcagtgacaacctgtatgatgacccctaccagcctgagatcacccccagccccctgcagcccccagctgccccagcccccaccagcaccaccagcagcgcccggcggcgggcctactgcaggaacagagaccactttgccaccatcagaacagccagcctggtgtcccggcagatccaggagcacgagcaggacagcgccctgcgggagcagctgagcggctacaagaggatgaggcggcagcaccagaagcagctgctggccctggagagccggctgcggggggagcgggaggagcacagcgcccggctgcagcgggagctggaggcccagagagctggctttggagctgaggccgagaagctggcccggcggcaccaggccatcggggagaaggaggcccgggccgcccaggccgaggagaggaagttccagcagcacatcctgggccagcagaagaaggagctggccgccctgctggaggcccagaagaggacctacaagctgaggaaggagcagctgaaggaggagctgcaggagaaccccagcacccccaagcgggagaaggccgagtggctgctgcggcagaaggagcagctgcagcagtgccaggccgaggaggaggccggcctgctgcggcggcagaggcagtactttgagctgcagtgccggcagtacaagaggaagatgctgctggcccggcacagcctggaccaggacctgctgcgggaggacctgaacaagaagcagacccagaaggacctggagtgtgccctgctgctgcggcagcacgaggccacccgggagctggagctgcggcagctgcaggccgtgcagaggaccagggctgagctgacccggctgcagcaccagacagagctgggcaaccagctggagtacaacaagagaagagagcaggagctgcggcagaagcatgctgcccaggtgcggcagcagcccaagagcctgaagagcaaggagctgcagatcaagaagcagttccaggagacctgcaagatccagacccggcagtacaaggccctgcgggcccacctgctggagaccacccccaaggcccagcacaagagcctgctgaagaggctgaaggaggagcagaccaggaagctggccatcctggccgagcagtatgaccagagcatcagcgagatgctgagcagccaggccctgcggctggatgagacccaggaggccgagttccaggccctgcggcagcagctgcagcaggagctggagctgctgaatgcctaccagagcaagatcaagatcagaacagagagccagcacgagcgggagctgcgggagctggagcagagggtggccctgcggcgggccctgctggagcagagggtggaggaggagctgctggccctgcagacaggccgctctgagcgcatccgcagcctgctggagcggcaggcccgggagattgaggcctttgatgctgagagcatgaggctgggcttcagctccatggccctgggcggcatcccagctgaggccgccgcccagggctacccagcccctcctccagccccagcctggcccagcaggcctgtgcccaggtctggggcccactggagccacggccccccacctcctggcatgcctcctccagcctggaggcagcccagcctgctggcccctcctggcccccccaactggctgggcccccccacccagagcggcaccccccggggcggggccctgctgctgctgaggaacagcccccagcccctgcggcgggccgccagcggcggcagcggctctgaaaatgtgggccccccagctgctgctgtgcccggccccctgagccgcagcacctctgtggccagccacatcctgaatggcagcagccacttctacagctag

SEQ ID NO: 172605 - DNA, 3708 bp, synthetic construct
  misc_feature 1..3708: note = Description of Artificial Sequence: Synthetic coding sequence
  source 1..3708: mol_type = other DNA
atgcctgctgggggccgggccggcagcctgaaggaccctgatgtggccgagctgttcttcaaggatgatcctgagaagctgttcagtgacctgcgggagatcggccacggcagctttggagctgtgtactttgccagagatgtgagaaattctgaggtggtggccatcaagaagatgagctacagcggcaagcagagcaatgagaagtggcaggacatcatcaaggaggtgcgcttcctgcagaagctgcggcaccccaacaccatccagtaccggggctgctacctgcgggagcacacagcctggctggtgatggagtactgcctgggcagcgccagtgacctgctggaggtgcacaagaagcccctgcaggaggtggagattgctgctgtgacccatggagccctgcagggcctggcctacctgcacagccacaacatgatccacagagatgtgaaggccggcaacatcctgctgtctgagcccggcctggtgaagctgggggactttggcagcgccagcatcatggccccagccaacagctttgtgggcaccccctactggatggcccctgaggtgatcctggccatggatgagggccagtatgatggcaaggtggatgtgtggagcctgggcatcacctgcatcgagctggccgagaggaagcccccactcttcaacatgaatgccatgtctgccctgtaccacatcgcccagaatgaaagccctgtgctgcagagcggccactggagcgagtacttcaggaactttgtggacagctgcctgcagaagatcccccaggaccggcccaccagcgaggtgctgctgaagcacagatttgtgctgcgggagcggccccccaccgtcatcatggacctgatccagaggaccaaggatgctgtgcgggagctggacaacctgcagtacaggaagatgaagaagatcctcttccaggaggcccccaacggccctggagctgaggcccctgaggaggaggaggaggccgagccctacatgcaccgggccggcaccctgaccagcctggagagcagccacagcgtgcccagcatgagcatcagcgccagcagccagagcagctctgtgaacagcctggctgatgccagtgacaatgaggaggaggaggaggaggaggaggaggaggaggaggaggaggagggccctgaggcccgggagatggccatgatgcaggagggggagcacacagtgaccagccacagcagcatcatccaccggctgcccggcagtgacaacctgtatgatgacccctaccagcctgagatcacccccagccccctgcagcccccagctgccccagcccccaccagcaccaccagcagcgcccggcggcgggcctactgcaggaacagagaccactttgccaccatcagaacagccagcctggtgtcccggcagatccaggagcacgagcaggacagcgccctgcgggagcagctgagcggctacaagaggatgaggcggcagcaccagaagcagctgctggccctggagagccggctgcggggggagcgggaggagcacagcgcccggctgcagcgggagctggaggcccagagagctggctttggagctgaggccgagaagctggcccggcggcaccaggccatcggggagaaggaggcccgggccgcccaggccgaggagaggaagttccagcagcacatcctgggccagcagaagaaggagctggccgccctgctggaggcccagaagaggacctacaagctgaggaaggagcagctgaaggaggagctgcaggagaaccccagcacccccaagcgggagaaggccgagtggctgctgcggcagaaggagcagctgcagcagtgccaggccgaggaggaggccggcctgctgcggcggcagaggcagtactttgagctgcagtgccggcagtacaagaggaagatgctgctggcccggcacagcctggaccaggacctgctgcgggaggacctgaacaagaagcagacccagaaggacctggagtgtgccctgctgctgcggcagcacgaggccacccgggagctggagctgcggcagctgcaggccgtgcagaggaccagggctgagctgacccggctgcagcaccagacagagctgggcaaccagctggagtacaacaagagaagagagcaggagctgcggcagaagcatgctgcccaggtgcggcagcagcccaagagcctgaaggtgcgggccggccagaggcctcctggcctgcccctgcccatccctggggccctgggcccccccaacacaggcacccccatcgagcagcagccctgcagccctggccaggaggccgtgctggaccagaggatgctgggggaggaggaggaggccgtgggggagcggcgcatcctgggcaaggagggcgccaccctggagcccaagcagcagaggatcctgggggaggagagcggggcccccagccccagcccccagaagcacggcagcctggtggatgaggaggtgtggggcctgcctgaggagattgaggagctgcgggtgcccagcctggtgccccaggagaggagcatcgtgggccaggaggaggccggcacctggagcctgtggggcaaggaggatgagagcctgctggatgaggagtttgagctgggctgggtgcagggccctgccctgacccctgtgcctgaggaggaggaggaggaggaggagggcgcccccatcggcaccccccgggaccctggagatggctgccccagcccagacatccccccagagcccccacccacccacctgcggccctgcccagccagccagctgcccggcctgctgagccacggcctgctggccggcctgagctttgctgtgggcagcagcagcggcctgctgcccctgctgctgctgctgctgctgcccctgctggccgcccagggcggcggcggcctgcaggccgccctgctggccctggaggtgggcctggtgggcctgggcgccagctacctgctgctgtgcacagccctgcacctgcccagcagcctcttcctgctgctggcccagggcacagccctgggcgctgtgctgggcctgtcctggaggcggggcctgatgggcgtgcccctgggcctgggcgccgcctggctgctggcctggccaggcctggccctgcccctggtggccatggctgctgggggccgctgggtgcggcagcagggcccccgggtgcggcggggcatcagccggctgtggctgcgggtgctgctgcggctgagccccatggccttccgggccctgcagggctgtggggctgtgggggaccggggcctgtttgccctgtaccccaagaccaacaaggatggcttccgcagccggctgcctgtgcccggccccaggagaagaaaccccaggaccacccagcaccccctggccctgctggcccgggtgtgggtgctgtgcaagggctggaactggaggctggcccgggccagccagggcctggccagccacctgcccccctgggccatccacaccctggcctcctggggcctgctgcggggggagcggcccacccgcatcccccggctgctgcccaggagccagaggcagctgggccccccagccagccggcagcccctgcccggcaccctggccggcagaagaagcaggacccggcagagccgggccctgcccccctggaggtag

SEQ ID NO: 172606 - DNA, 2268 bp, synthetic construct
  misc_feature 1..2268: note = Description of Artificial Sequence: Synthetic coding sequence
  source 1..2268: mol_type = other DNA
atgcctgctgggggccgggccggcagcctgaaggaccctgatgtggccgagctgttcttcaaggatgatcctgagaagctgttcagtgacctgcgggagatcggccacggcagctttggagctgtgtactttgccagagatgtgagaaattctgaggtggtggccatcaagaagatgagctacagcggcaagcagagcaatgagaagtggcaggacatcatcaaggaggtgcgcttcctgcagaagctgcggcaccccaacaccatccagtaccggggctgctacctgcgggagcacacagcctggctggtgatggagtactgcctgggcagcgccagtgacctgctggaggtgcacaagaagcccctgcaggaggtggagattgctgctgtgacccatggagccctgcagggcctggcctacctgcacagccacaacatgatccacagagatgtgaaggccggcaacatcctgctgtctgagcccggcctggtgaagctgggggactttggcagcgccagcatcatggccccagccaacagctttgtgggcaccccctactggatggcccctgaggtgatcctggccatggatgagggccagtatgatggcaaggtggatgtgtggagcctgggcatcacctgcatcgagctggccgagaggaagcccccactcttcaacatgaatgccatgtctgccctgtaccacatcgcccagaatgaaagccctgtgctgcagagcggccactggagcgagtacttcaggaactttgtggacagctgcctgcagaagatcccccaggaccggcccaccagcgaggtgctgctgaagcacagatttgtgctgcgggagcggccccccaccgtcatcatggacctgatccagaggaccaaggatgctgtgcgggagctggacaacctgcagtacaggaagatgaagaagatcctcttccaggaggcccccaacggccctggagctgaggcccctgaggaggaggaggaggccgagccctacatgcaccgggccggcaccctgaccagcctggagagcagccacagcgtgcccagcatgagcatcagcgccagcagccagagcagctctgtgaacagcctggctgatgccagtgacaatgaggaggaggaggaggaggaggaggaggaggaggaggaggaggagggccctgaggcccgggagatggccatgatgcaggagggggagcacacagtgaccagccacagcagcatcatccaccggctgcccggcagtgacaacctgtatgatgacccctaccagcctgagatcacccccagccccctgcagcccccagctgccccagcccccaccagcaccaccagcagcgcccggcggcgggcctactgcaggaacagagaccactttgccaccatcagaacagccagcctggtgtcccggcagatccaggagcacgagcaggacagcgccctgcgggagcagctgagcggctacaagaggatgaggcggcagcaccagaagcagctgctggccctggagagccggctgcggggggagcgggaggagcacagcgcccggctgcagcgggagctggaggcccagagagctggctttggagctgaggccgagaagctggcccggcggcaccaggccatcggggagaaggaggcccgggccgcccaggccgaggagaggaagttccagcagcacatcctgggccagcagaagaaggagctggccgccctgctggaggcccagaagaggacctacaagctgaggaaggagcagctgaaggaggagctgcaggagaaccccagcacccccaagcgggagaaggccgagtggctgctgcggcagaaggagcagctgcagcagtgccaggccgaggaggaggccggcctgctgcggcggcagaggcagtactttgagctgcagtgccggcagtacaagaggaagatgctgctggcccggcacagcctggaccaggacctgctgcgggaggacctgaacaagaagcagacccagaaggacctggagtgtgccctgctgctgcggcagcacgaggccacccgggagctggagctgcggcagctgcaggccgtgcagaggaccagggctgagctgacccggctgcagcaccagacagagctgggcaaccagctggagtacaacaagagaagagagcaggagctgcggcagaagcatgctgcccaggtgcggcagcagcccaagagcctgaagaagaagaccaacaccaacaagatcagcgagaggtag

SEQ ID NO: 172607 - DNA, 3369 bp, synthetic construct
  misc_feature 1..3369: note = Description of Artificial Sequence: Synthetic coding sequence
  source 1..3369: mol_type = other DNA
atgcctgctgggggccgggccggcagcctgaaggaccctgatgtggccgagctgttcttcaaggatgatcctgagaagctgttcagtgacctgcgggagatcggccacggcagctttggagctgtgtactttgccagagatgtgagaaattctgaggtggtggccatcaagaagatgagctacagcggcaagcagagcaatgagaagtggcaggacatcatcaaggaggtgcgcttcctgcagaagctgcggcaccccaacaccatccagtaccggggctgctacctgcgggagcacacagcctggctggtgatggagtactgcctgggcagcgccagtgacctgctggaggtgcacaagaagcccctgcaggaggtggagattgctgctgtgacccatggagccctgcagggcctggcctacctgcacagccacaacatgatccacagagatgtgaaggccggcaacatcctgctgtctgagcccggcctggtgaagctgggggactttggcagcgccagcatcatggccccagccaacagctttgtgggcaccccctactggatggcccctgaggtgatcctggccatggatgagggccagtatgatggcaaggtggatgtgtggagcctgggcatcacctgcatcgagctggccgagaggaagcccccactcttcaacatgaatgccatgtctgccctgtaccacatcgcccagaatgaaagccctgtgctgcagagcggccactggagcgagtacttcaggaactttgtggacagctgcctgcagaagatcccccaggaccggcccaccagcgaggtgctgctgaagcacagatttgtgctgcgggagcggccccccaccgtcatcatggacctgatccagaggaccaaggatgctgtgcgggagctggacaacctgcagtacaggaagatgaagaagatcctcttccaggaggcccccaacggccctggagctgaggcccctgaggaggaggaggaggccgagccctacatgcaccgggccggcaccctgaccagcctggagagcagccacagcgtgcccagcatgagcatcagcgccagcagccagagcagctctgtgaacagcctggctgatgccagtgacaatgaggaggaggaggaggaggaggaggaggaggaggaggaggaggagggccctgaggcccgggagatggccatgatgcaggagggggagcacacagtgaccagccacagcagcatcatccaccggctgcccggcagtgacaacctgtatgatgacccctaccagcctgagatcacccccagccccctgcagcccccagctgccccagcccccaccagcaccaccagcagcgcccggcggcgggcctactgcaggaacagagaccactttgccaccatcagaacagccagcctggtgtcccggcagatccaggagcacgagcaggacagcgccctgcgggagcagctgagcggctacaagaggatgaggcggcagcaccagaagcagctgctggccctggagagccggctgcggggggagcgggaggagcacagcgcccggctgcagcgggagctggaggcccagagagctggctttggagctgaggccgagaagctggcccggcggcaccaggccatcggggagaaggaggcccgggccgcccaggccgaggagaggaagttccagcagcacatcctgggccagcagaagaaggagctggccgccctgctggaggcccagaagaggacctacaagctgaggaaggagcagctgaaggaggagctgcaggagaaccccagcacccccaagcgggagaaggccgagtggctgctgcggcagaaggagcagctgcagcagtgccaggccgaggaggaggccggcctgctgcggcggcagaggcagtactttgagctgcagtgccggcagtacaagaggaagatgctgctggcccggcacagcctggaccaggacctgctgcgggaggacctgaacaagaagcagacccagaaggacctggagtgtgccctgctgctgcggcagcacgaggccacccgggagctggagctgcggcagctgcaggccgtgcagaggaccagggctgagctgacccggctgcagcaccagacagagctgggcaaccagctggagtacaacaagagaagagagcaggagctgcggcagaagcatgctgcccaggtgcggcagcagcccaagagcctgaaggagaggagcatcgtgggccaggaggaggccggcacctggagcctgtggggcaaggaggatgagagcctgctggatgaggagtttgagctgggctgggtgcagggccctgccctgacccctgtgcctgaggaggaggaggaggaggaggagggcgcccccatcggcaccccccgggaccctggagatggctgccccagcccagacatccccccagagcccccacccacccacctgcggccctgcccagccagccagctgcccggcctgctgagccacggcctgctggccggcctgagctttgctgtgggcagcagcagcggcctgctgcccctgctgctgctgctgctgctgcccctgctggccgcccagggcggcggcggcctgcaggccgccctgctggccctggaggtgggcctggtgggcctgggcgccagctacctgctgctgtgcacagccctgcacctgcccagcagcctcttcctgctgctggcccagggcacagccctgggcgctgtgctgggcctgtcctggaggcggggcctgatgggcgtgcccctgggcctgggcgccgcctggctgctggcctggccaggcctggccctgcccctggtggccatggccgccggcggccgctgggtgcggcagcagggcccccgggtgagaagaggcatcagccggctgtggctgcgggtgctgctgcggctgagccccatggccttccgggccctgcagggctgtggggctgtgggggaccggggcctgtttgccctgtaccccaagaccaacaaggatggcttccgcagccggctgcctgtgcccggccccaggagaagaaaccccaggaccacccagcaccccctggccctgctggcccgggtgtgggtgctgtgcaagggctggaactggaggctggcccgggccagccagggcctggccagccacctgcccccctgggccatccacaccctggcctcctggggcctgctgcggggggagcggcccacccgcatcccccggctgctgcccaggagccagaggcagctgggccccccagccagccggcagcccctgcccggcaccctggccggccgccgcagcaggacccggcagagccgggccctgcccccctggaggtag

SEQ ID NO: 172608 - DNA, 1401 bp, synthetic construct
  misc_feature 1..1401: note = Description of Artificial Sequence: Synthetic coding sequence
  source 1..1401: mol_type = other DNA
atgaagagcctgagcctgctgctggccgtggccctgggcctggccacagctgtgtctgctggccctgctgtgattgagtgctggtttgtggaggatgccagcggcaagggcctggccaagaggcctggggccctgctgctgcggcagggccctggagagcccccacccaggccagacctggaccctgagctgtacctgtctgtgcatgaccctgctggggccctgcaggccgccttccgccgctaccccaggggggccccagccccccactgtgagatgagcagatttgtgcccctgcctgccagcgccaagtgggccagcggcctgaccccagcccagaactgcccccgggccctggatggagcctggctgatggtgtccatcagcagccctgtgctgagcctgagcagcctgctgcggccccagcctgagccccagcaggagcctgtgctgatcaccatggccaccgtggagatgggcttccaccacgtgggccaggccgccctggagctgctgacctctgtggtgctgactgtgctgacccacaccccagccccccgggtgcggctgggccaggatgccctgctggacctgagctttgcctacatgccacccaccagcgaggccgccagcagcctggcccctggccccccacccttcggcctggagtggaggcggcagcacctgggcaagggccacctgctgctggccgccaccccaggcctgaatggccagatgcctgctgcccaggagggcgctgtggcctttgctgcctgggatgatgatgagccctggggcccctggacaggaaatggcaccttctggctgccccgggtgcagcccttccaggagggcacctacctggccaccatccacctgccctacctgcagggccaggtgaccctggagctggccgtgtacaagccacccaaggtgtccctgatgcctgccaccctggcccgggccgcccctggagaggcccctcctgagctgctgtgcctggtgagccacttctaccccagcggcggcctggaggtggagtgggagctgcggggcggccctgggggccgcagccagaaggccgagggccagcgctggctgagcgccctgcggcaccacagtgatggctctgtgtccctgagcggccacctgcagcccccacctgtgaccacagagcagcacggggcccgctatgcctgccgcatccaccaccccagcctgcctgccagcggccgctctgctgaggtgaccctggaggtggccggcctgagcggccccagcctggaggacagcgtgggcctcttcctgagcgccttcctgctgctgggcctcttcaaggccctgggctgggccgctgtgtacctgagcacctgcaaggacagcaagaagaaggccgagtag

SEQ ID NO: 172609 - DNA, 1347 bp, synthetic construct
  misc_feature 1..1347: note = Description of Artificial Sequence: Synthetic coding sequence
  source 1..1347: mol_type = other DNA
atgaagagcctgagcctgctgctggccgtggccctgggcctggccacagctgtgtctgctggccctgctgtgattgagtgctggtttgtggaggatgccagcggcaagggcctggccaagaggcctggggccctgctgctgcggcagggccctggagagcccccacccaggccagacctggaccctgagctgtacctgtctgtgcatgaccctgctggggccctgcaggccgccttccgccgctaccccaggggggccccagccccccactgtgagatgagcagatttgtgcccctgcctgccagcgccaagtgggccagcggcctgaccccagcccagaactgcccccgggccctggatggagcctggctgatggtgtccatcagcagccctgtgctgagcctgagcagcctgctgcggccccagcctgagccccagcaggagcctgtgctgatcaccatggccaccgtggtgctgactgtgctgacccacaccccagccccccgggtgcggctgggccaggatgccctgctggacctgagctttgcctacatgccacccaccagcgaggccgccagcagcctggcccctggccccccacccttcggcctggagtggaggcggcagcacctgggcaagggccacctgctgctggccgccaccccaggcctgaatggccagatgcctgctgcccaggagggcgctgtggcctttgctgcctgggatgatgatgagccctggggcccctggacaggaaatggcaccttctggctgccccgggtgcagcccttccaggagggcacctacctggccaccatccacctgccctacctgcagggccaggtgaccctggagctggccgtgtacaagccacccaaggtgtccctgatgcctgccaccctggcccgggccgcccctggagaggcccctcctgagctgctgtgcctggtgagccacttctaccccagcggcggcctggaggtggagtgggagctgcggggcggccctgggggccgcagccagaaggccgagggccagcgctggctgagcgccctgcggcaccacagtgatggctctgtgtccctgagcggccacctgcagcccccacctgtgaccacagagcagcacggggcccgctatgcctgccgcatccaccaccccagcctgcctgccagcggccgctctgctgaggtgaccctggaggtggccggcctgagcggccccagcctggaggacagcgtgggcctcttcctgagcgccttcctgctgctgggcctcttcaaggccctgggctgggccgctgtgtacctgagcacctgcaaggacagcaagaagaaggccgagtag

SEQ ID NO: 172610 - DNA, 1515 bp, synthetic construct
  misc_feature 1..1515: note = Description of Artificial Sequence: Synthetic coding sequence
  source 1..1515: mol_type = other DNA
atgaagagcctgagcctgctgctggccgtggccctgggcctggccacagctgtgtctgctggccctgctgtgattgagtgctggtttgtggaggatgccagcggcaagggcctggccaagaggcctggggccctgctgctgcggcagggccctggagagcccccacccaggccagacctggaccctgagctgtacctgtctgtgcatgaccctgctggggccctgcaggccgccttccgccgctaccccaggggggccccagccccccactgtgagatgagcagatttgtgcccctgcctgccagcgccaagtgggccagcggcctgaccccagcccagaactgcccccgggccctggatggagcctggctgatggtgtccatcagcagccctgtgctgagcctgagcagcctgctgcggccccagcctgagccccagcaggagcctgtgctgatcaccatggccaccgtggtgctgactgtgctgacccacaccccagccccccgggtgcggctgggccaggatgccctgctggacctgagctttgcctacatgccacccaccagcgaggccgccagcagcctggcccctggccccccacccttcggcctggagtggaggcggcagcacctgggcaagggccacctgctgctggccgccaccccaggcctgaatggccagatgcctgctgcccaggagggcgctgtggcctttgctgcctgggatgatgatgagccctggggcccctggacaggaaatggcaccttctggctgcccaccgtgcagcccttccaggagggcacctacctggccaccatccacctgccctacctgcagggccaggtgaccctggagctggccgtgtacaagccacccaaggtgtccctgatgcctgccaccctggcccgggccgcccctggagaggcccctcctgagctgctgtgcctggtgagccacttctaccccagcggcggcctggaggtggagtgggagctgcggggcggccctgggggccgcagccagaaggccgagggccagcgctggctgagcgccctgcggcaccacagtgatggctctgtgtccctgagcggccacctgcagcccccacctgtgaccacagagcagcacggggcccgctatgcctgccgcatccaccaccccagcctgcctgccagcggccgctctgctgaggtgaccctggaggtggccggcctgagcggccccagcctggaggacagcgtgggcctcttcctgagcgccttcctgctgctgggcctcttcaaggccctgggctgggccgctgtgtacctgagcacctgcaaggacagcaagaaggtgcagtgcagcaccagcctgtacctgagcctggtgaccctgagcccccaccccatcagcaagcccatggagggcggctgctggtgtggccggcagaacctgggcctggagttcaccctcatctgggtgaagacctggcactacatcctgactgtgggcctgtttgagcacgccacctag

SEQ ID NO: 172611 - DNA, 1347 bp, synthetic construct
  misc_feature 1..1347: note = Description of Artificial Sequence: Synthetic coding sequence
  source 1..1347: mol_type = other DNA
atgaagagcctgagcctgctgctggccgtggccctgggcctggccacagctgtgtctgctggccctgctgtgattgagtgctggtttgtggaggatgccagcggcaagggcctggccaagaggcctggggccctgctgctgcggcagggccctggagagcccccacccaggccagacctggaccctgagctgtacctgtctgtgcatgaccctgctggggccctgcaggccgccttccgccgctaccccaggggggccccagccccccactgtgagatgagcagatttgtgcccctgcctgccagcgccaagtgggccagcggcctgaccccagcccagaactgcccccgggccctggatggagcctggctgatggtgtccatcagcagccctgtgctgagcctgagcagcctgctgcggccccagcctgagccccagcaggagcctgtgctgatcaccatggccaccgtggtgctgactgtgctgacccacaccccagccccccgggtgcggctgggccaggatgccctgctggacctgagctttgcctacatgccacccaccagcgaggccgccagcagcctggcccctggccccccacccttcggcctggagtggaggcggcagcacctgggcaagggccacctgctgctggccgccaccccaggcctgaatggccagatgcctgctgcccaggagggcgctgtggcctttgctgcctgggatgatgatgagccctggggcccctggacaggaaatggcaccttctggctgcccaccgtgcagcccttccaggagggcacctacctggccaccatccacctgccctacctgcagggccaggtgaccctggagctggccgtgtacaagccacccaaggtgtccctgatgcctgccaccctggcccgggccgcccctggagaggcccctcctgagctgctgtgcctggtgagccacttctaccccagcggcggcctggaggtggagtgggagctgcggggcggccctgggggccgcagccagaaggccgagggccagcgctggctgagcgccctgcggcaccacagtgatggctctgtgtccctgagcggccacctgcagcccccacctgtgaccacagagcagcacggggcccgctatgcctgccgcatccaccaccccagcctgcctgccagcggccgctctgctgaggtgaccctggaggtggccggcctgagcggccccagcctggaggacagcgtgggcctcttcctgagcgccttcctgctgctgggcctcttcaaggccctgggctgggccgctgtgtacctgagcacctgcaaggacagcaagaagaaggccgagtag

SEQ ID NO: 172612 - DNA, 1401 bp, synthetic construct
  misc_feature 1..1401: note = Description of Artificial Sequence: Synthetic coding sequence
  source 1..1401: mol_type = other DNA
atgaagagcctgagcctgctgctggccgtggccctgggcctggccacagctgtgtctgctggccctgctgtgattgagtgctggtttgtggaggatgccagcggcaagggcctggccaagaggcctggggccctgctgctgcggcagggccctggagagcccccacccaggccagacctggaccctgagctgtacctgtctgtgcatgaccctgctggggccctgcaggccgccttccgccgctaccccaggggggccccagccccccactgtgagatgagcagatttgtgcccctgcctgccagcgccaagtgggccagcggcctgaccccagcccagaactgcccccgggccctggatggagcctggctgatggtgtccatcagcagccctgtgctgagcctgagcagcctgctgcggccccagcctgagccccagcaggagcctgtgctgatcaccatggccaccgtggagatgggcttccaccacgtgggccaggccgccctggagctgctgacctctgtggtgctgactgtgctgacccacaccccagccccccgggtgcggctgggccaggatgccctgctggacctgagctttgcctacatgccacccaccagcgaggccgccagcagcctggcccctggccccccacccttcggcctggagtggaggcggcagcacctgggcaagggccacctgctgctggccgccaccccaggcctgaatggccagatgcctgctgcccaggagggcgctgtggcctttgctgcctgggatgatgatgagccctggggcccctggacaggaaatggcaccttctggctgcccaccgtgcagcccttccaggagggcacctacctggccaccatccacctgccctacctgcagggccaggtgaccctggagctggccgtgtacaagccacccaaggtgtccctgatgcctgccaccctggcccgggccgcccctggagaggcccctcctgagctgctgtgcctggtgagccacttctaccccagcggcggcctggaggtggagtgggagctgcggggcggccctgggggccgcagccagaaggccgagggccagcgctggctgagcgccctgcggcaccacagtgatggctctgtgtccctgagcggccacctgcagcccccacctgtgaccacagagcagcacggggcccgctatgcctgccgcatccaccaccccagcctgcctgccagcggccgctctgctgaggtgaccctggaggtggccggcctgagcggccccagcctggaggacagcgtgggcctcttcctgagcgccttcctgctgctgggcctcttcaaggccctgggctgggccgctgtgtacctgagcacctgcaaggacagcaagaagaaggccgagtag

SEQ ID NO: 172613 - DNA, 1515 bp, synthetic construct
  misc_feature 1..1515: note = Description of Artificial Sequence: Synthetic coding sequence
  source 1..1515: mol_type = other DNA
atgaagagcctgagcctgctgctggccgtggccctgggcctggccacagctgtgtctgctggccctgctgtgattgagtgctggtttgtggaggatgccagcggcaagggcctggccaagaggcctggggccctgctgctgcggcagggccctggagagcccccacccaggccagacctggaccctgagctgtacctgtctgtgcatgaccctgctggggccctgcaggccgccttccgccgctaccccaggggggccccagccccccactgtgagatgagcagatttgtgcccctgcctgccagcgccaagtgggccagcggcctgaccccagcccagaactgcccccgggccctggatggagcctggctgatggtgtccatcagcagccctgtgctgagcctgagcagcctgctgcggccccagcctgagccccagcaggagcctgtgctgatcaccatggccaccgtggtgctgactgtgctgacccacaccccagccccccgggtgcggctgggccaggatgccctgctggacctgagctttgcctacatgccacccaccagcgaggccgccagcagcctggcccctggccccccacccttcggcctggagtggaggcggcagcacctgggcaagggccacctgctgctggccgccaccccaggcctgaatggccagatgcctgctgcccaggagggcgctgtggcctttgctgcctgggatgatgatgagccctggggcccctggacaggaaatggcaccttctggctgccccgggtgcagcccttccaggagggcacctacctggccaccatccacctgccctacctgcagggccaggtgaccctggagctggccgtgtacaagccacccaaggtgtccctgatgcctgccaccctggcccgggccgcccctggagaggcccctcctgagctgctgtgcctggtgagccacttctaccccagcggcggcctggaggtggagtgggagctgcggggcggccctgggggccgcagccagaaggccgagggccagcgctggctgagcgccctgcggcaccacagtgatggctctgtgtccctgagcggccacctgcagcccccacctgtgaccacagagcagcacggggcccgctatgcctgccgcatccaccaccccagcctgcctgccagcggccgctctgctgaggtgaccctggaggtggccggcctgagcggccccagcctggaggacagcgtgggcctcttcctgagcgccttcctgctgctgggcctcttcaaggccctgggctgggccgctgtgtacctgagcacctgcaaggacagcaagaaggtgcagtgcagcaccagcctgtacctgagcctggtgaccctgagcccccaccccatcagcaagcccatggagggcggctgctggtgtggccggcagaacctgggcctggagttcaccctcatctgggtgaagacctggcactacatcctgactgtgggcctgtttgagcacgccacctag

SEQ ID NO: 172614 - DNA, 1347 bp, synthetic construct; identical to SEQ ID NO: 172609
  misc_feature 1..1347: note = Description of Artificial Sequence: Synthetic coding sequence
  source 1..1347: mol_type = other DNA

SEQ ID NO: 172615 - DNA, 1515 bp, synthetic construct; identical to SEQ ID NO: 172613
  misc_feature 1..1515: note = Description of Artificial Sequence: Synthetic coding sequence
  source 1..1515: mol_type = other DNA

SEQ ID NO: 172616 - DNA, 1401 bp, synthetic construct; identical to SEQ ID NO: 172608
  misc_feature 1..1401: note = Description of Artificial Sequence: Synthetic coding sequence
  source 1..1401: mol_type = other DNA

SEQ ID NO: 172617 - DNA, 1347 bp, synthetic construct; identical to SEQ ID NO: 172609
  misc_feature 1..1347: note = Description of Artificial Sequence: Synthetic coding sequence
  source 1..1347: mol_type = other DNA

SEQ ID NO: 172618 - DNA, 1515 bp, synthetic construct; identical to SEQ ID NO: 172610
  misc_feature 1..1515: note = Description of Artificial Sequence: Synthetic coding sequence
  source 1..1515: mol_type = other DNA

SEQ ID NO: 172619 - DNA, 609 bp, synthetic construct
  misc_feature 1..609: note = Description of Artificial Sequence: Synthetic coding sequence
  source 1..609: mol_type = other DNA
atgaagagcctgagcctgctgctggccgtggccctgggcctggccacagctgtgtctgctggccctgctgtgattgagtgctggtttgtggaggatgccagcggcaagggcctggccaagaggcctggggccctgctgctgcggcagggccctggagagcccccacccaggccagacctggaccctgagctgtacctgtctgtgcacgtggtgctgactgtgctgacccacaccccagccccccgggtgcggctgggccaggatgccctgctggacctgagctttgcctacatgccacccaccagcgaggccgccagcagcctggcccctggccccccaccatttggcctggagtggaggcggcagcacctgggcaagggccacctgctgctggccgccaccccaggcctgaatggccagatgcctgctgcccaggagggcgctgtggcctttgctgcctgggatgatgatgagccctggggcccctggacaggaaatggcaccttctggctgccccgggtgcagcccttccaggagggcacctacctggccaccatccacctgccctacctgcagggccaggtgaccctggagctggccgtgtactag

SEQ ID NO: 172620 - DNA, 1347 bp, synthetic construct; identical to SEQ ID NO: 172611
  misc_feature 1..1347: note = Description of Artificial Sequence: Synthetic coding sequence
  source 1..1347: mol_type = other DNA

SEQ ID NO: 172621 - DNA, 1401 bp, synthetic construct; identical to SEQ ID NO: 172608
  misc_feature 1..1401: note = Description of Artificial Sequence: Synthetic coding sequence
  source 1..1401: mol_type = other DNA

SEQ ID NO: 172622 - DNA, 609 bp, synthetic construct
  misc_feature 1..609: note = Description of Artificial Sequence: Synthetic coding sequence
  source 1..609: mol_type = other DNA
atgaagagcctgagcctgctgctggccgtggccctgggcctggccacagctgtgtctgctggccctgctgtgattgagtgctggtttgtggaggatgccagcggcaagggcctggccaagaggcctggggccctgctgctgcggcagggccctggagagcccccacccaggccagacctggaccctgagctgtacctgtctgtgcacgtggtgctgactgtgctgacccacaccccagccccccgggtgcggctgggccaggatgccctgctggacctgagctttgcctacatgccacccaccagcgaggccgccagcagcctggcccctggccccccaccatttggcctggagtggaggcggcagcacctgggcaagggccacctgctgctggccgccaccccaggcctgaatggccagatgcctgctgcccaggagggcgctgtggcctttgctgcctgggatgatgatgagccctggggcccctggacaggaaatggcaccttctggctgcccaccgtgcagcccttccaggagggcacctacctggccaccatccacctgccctacctgcagggccaggtgaccctggagctggccgtgtactag

SEQ ID NO: 172623 - DNA, 609 bp, synthetic construct; identical to SEQ ID NO: 172619
  misc_feature 1..609: note = Description of Artificial Sequence: Synthetic coding sequence
  source 1..609: mol_type = other DNA

SEQ ID NO: 172624 - DNA, 609 bp, synthetic construct; identical to SEQ ID NO: 172619
  misc_feature 1..609: note = Description of Artificial Sequence: Synthetic coding sequence
  source 1..609: mol_type = other DNA

SEQ ID NO: 172625 - DNA, 1347 bp, synthetic construct
  misc_feature 1..1347: note = Description of Artificial Sequence: Synthetic coding sequence
  source 1..1347: mol_type = other DNA
atgaagagcctgagcctgctgctggccgtggccctgggcctggccacagctgtgtctgctggccctgctgtgattgagtgctggtttgtggaggatgccagcggcaagggcctggccaagaggcctggggccctgctgctgcggcagggccctggagagcccccacccaggccagacctggaccctgagctgtacctgtctgtgcatgaccctgctggggccctgcaggccgccttccgccgctaccccaggggggccccagccccccactgtgagatgagcagatttgtgcccctgcctgccagcgccaagtgggccagcggcctgaccccagcccagaactgcccccgggccctggatggagcctggctgatggtgtccatcagcagccctgtgctgagcctgagcagcctgctgcggccccagcctgagccccagcaggagcctgtgctgatcaccatggccaccgtggtgctgactgtgctgacccacaccccagccccccgggtgcggctgggccaggatgccctgctggacctgagctttgcctacatgccacccaccagcgaggccgccagcagcctggcccctggccccccacccttcggcctggagtggaggcggcagcacctgggcaagggccacctgctgctggccgccaccccaggcctgaatggccagatgcctgctgcccaggagggcgctgtggcctttgctgcctgggatgatgatgagccctggggcccctggacaggaaatggcaccttctggctgcccaccgtgcagcccttccaggagggcacctacctggccaccatccacctgccctacctgcagggccaggtgaccctggagctggccgtgtacaagccacccaaggtgtccctgatgcctgccaccctggcccgggccgcccctggagaggcccctcctgagctgctgtgcctggtgagccacttctaccccagcggcggcctggaggtggagtgggagctgcggggcggccctgggggccgcagccagaaggccgagggccagcgctggctgagcgccctgcggcaccacagtgatggctctgtgtccctgagcggccacctgcagcccccacctgtgaccacagagcagcacggggcccgctatgcctgccgcatccaccaccccagcctgcctgccagcggccgctctgctgaggtgaccctggaggtggccggcctgagcggccccagcctggaggacagcgtgggcctcttcctgagcgccttcctgctgctgggcctcttcaaggccctgggctgggccgctgtgtacctgagcacctgcaaggacagcaagaagcacgccacctag

SEQ ID NO: 172626 - DNA, 1515 bp, synthetic construct; identical to SEQ ID NO: 172613
  misc_feature 1..1515: note = Description of Artificial Sequence: Synthetic coding sequence
  source 1..1515: mol_type = other DNA

SEQ ID NO: 172627 - DNA, 471 bp, synthetic construct
  misc_feature 1..471: note = Description of Artificial Sequence: Synthetic coding sequence
  source 1..471: mol_type = other DNA
atgaagagcctgagcctgctgctggccgtggccctgggcctggccacagctgtgtctgctggccctgctgtgattgagtgctggtttgtggaggatgccagcggcaagggcctggccaagaggcctggggccctgctgctgcggcagggccctggagagcccccacccaggccagacctggaccctgagctgtacctgtctgtgcatgaccctgctggggccctgcaggccgccttccgccgctaccccaggggggccccagccccccactgtgagatgagcagatttgtgcccctgcctgccagcgccaagtgggccagcggcctgaccccagcccagaactgcccccgggccctggatggagcctggctgatggtgtccatcagctccatgggccacgccatgcctgtggagttcaccatcccagcctgcctgcccagaggagctgccctgcggagcccctggaggtag

SEQ ID NO: 172628 - DNA, 1401 bp, synthetic construct; identical to SEQ ID NO: 172612
  misc_feature 1..1401: note = Description of Artificial Sequence: Synthetic coding sequence
  source 1..1401: mol_type = other DNA

SEQ ID NO: 172629 - DNA, 1086 bp, synthetic construct
  misc_feature 1..1086: note = Description of Artificial Sequence: Synthetic coding sequence
  source 1..1086: mol_type = other DNA
atgaagagcctgagcctgctgctggccgtggccctgggcctggccacagctgtgtctgctggccctgctgtgattgagtgctggtttgtggaggatgccagcggcaagggcctggccaagaggcctggggccctgctgctgcggcagggccctggagagcccccacccaggccagacctggaccctgagctgtacctgtctgtgcacgtggtgctgactgtgctgacccacaccccagccccccgggtgcggctgggccaggatgccctgctggacctgagctttgcctacatgccacccaccagcgaggccgccagcagcctggcccctggccccccaccatttggcctggagtggaggcggcagcacctgggcaagggccacctgctgctggccgccaccccaggcctgaatggccagatgcctgctgcccaggagggcgctgtggcctttgctgcctgggatgatgatgagccctggggcccctggacaggaaatggcaccttctggctgcccaccgtgcagcccttccaggagggcacctacctggccaccatccacctgccctacctgcagggccaggtgaccctggagctggccgtgtacaagccacccaaggtgtccctgatgcctgccaccctggcccgggccgcccctggagaggcccctcctgagctgctgtgcctggtgagccacttctaccccagcggcggcctggaggtggagtgggagctgcggggcggccctgggggccgcagccagaaggccgagggccagcgctggctgagcgccctgcggcaccacagtgatggctctgtgtccctgagcggccacctgcagcccccacctgtgaccacagagcagcacggggcccgctatgcctgccgcatccaccaccccagcctgcctgccagcggccgctctgctgaggtgaccctggaggtggccggcctgagcggccccagcctggaggacagcgtgggcctcttcctgagcgccttcctgctgctgggcctcttcaaggccctgggctgggccgctgtgtacctgagcacctgcaaggacagcaagaagaaggccgagtag

SEQ ID NO: 172630 - DNA, 1347 bp, synthetic construct; identical to SEQ ID NO: 172625
  misc_feature 1..1347: note = Description of Artificial Sequence: Synthetic coding sequence
  source 1..1347: mol_type = other DNA

SEQ ID NO: 172631 - DNA, 471 bp, synthetic construct; identical to SEQ ID NO: 172627
  misc_feature 1..471: note = Description of Artificial Sequence: Synthetic coding sequence
  source 1..471: mol_type = other DNA

SEQ ID NO: 172632 - DNA, 1086 bp, synthetic construct
  misc_feature 1..1086: note = Description of Artificial Sequence: Synthetic coding sequence
  source 1..1086: mol_type = other DNA
atgaagagcctgagcctgctgctggccgtggccctgggcctggccacagctgtgtctgctggccctgctgtgattgagtgctggtttgtggaggatgccagcggcaagggcctggccaagaggcctggggccctgctgctgcggcagggccctggagagcccccacccaggccagacctggaccctgagctgtacctgtctgtgcacgtggtgctgactgtgctgacccacaccccagccccccgggtgcggctgggccaggatgccctgctggacctgagctttgcctacatgccacccaccagcgaggccgccagcagcctggcccctggccccccaccatttggcctggagtggaggcggcagcacctgggcaagggccacctgctgctggccgccaccccaggcctgaatggccagatgcctgctgcccaggagggcgctgtggcctttgctgcctgggatgatgatgagccctggggcccctggacaggaaatggcaccttctggctgccccgggtgcagcccttccaggagggcacctacctggccaccatccacctgccctacctgcagggccaggtgaccctggagctggccgtgtacaagccacccaaggtgtccctgatgcctgccaccctggcccgggccgcccctggagaggcccctcctgagctgctgtgcctggtgagccacttctaccccagcggcggcctggaggtggagtgggagctgcggggcggccctgggggccgcagccagaaggccgagggccagcgctggctgagcgccctgcggcaccacagtgatggctctgtgtccctgagcggccacctgcagcccccacctgtgaccacagagcagcacggggcccgctatgcctgccgcatccaccaccccagcctgcctgccagcggccgctctgctgaggtgaccctggaggtggccggcctgagcggccccagcctggaggacagcgtgggcctcttcctgagcgccttcctgctgctgggcctcttcaaggccctgggctgggccgctgtgtacctgagcacctgcaaggacagcaagaagcacgccacctag

SEQ ID NO: 172633 - DNA, 1347 bp, synthetic construct
  misc_feature 1..1347: note = Description of Artificial Sequence: Synthetic coding sequence
  source 1..1347: mol_type = other DNA
atgaagagcctgagcctgctgctggccgtggccctgggcctggccacagctgtgtctgctggccctgctgtgattgagtgctggtttgtggaggatgccagcggcaagggcctggccaagaggcctggggccctgctgctgcggcagggccctggagagcccccacccaggccagacctggaccctgagctgtacctgtctgtgcatgaccctgctggggccctgcaggccgccttccgccgctaccccaggggggccccagccccccactgtgagatgagcagatttgtgcccctgcctgccagcgccaagtgggccagcggcctgaccccagcccagaactgcccccgggccctggatggagcctggctgatggtgtccatcagcagccctgtgctgagcctgagcagcctgctgcggccccagcctgagccccagcaggagcctgtgctgatcaccatggccaccgtggtgctgactgtgctgacccacaccccagccccccgggtgcggctgggccaggatgccctgctggacctgagctttgcctacatgccacccaccagcgaggccgccagcagcctggcccctggccccccacccttcggcctggagtggaggcggcagcacctgggcaagggccacctgctgctggccgccaccccaggcctgaatggccagatgcctgctgcccaggagggcgctgtggcctttgctgcctgggatgatgatgagccctggggcccctggacaggaaatggcaccttctggctgccccgggtgcagcccttccaggagggcacctacctggccaccatccacctgccctacctgcagggccaggtgaccctggagctggccgtgtacaagccacccaaggtgtccctgatgcctgccaccctggcccgggccgcccctggagaggcccctcctgagctgctgtgcctggtgagccacttctaccccagcggcggcctggaggtggagtgggagctgcggggcggccctgggggccgcagccagaaggccgagggccagcgctggctgagcgccctgcggcaccacagtgatggctctgtgtccctgagcggccacctgcagcccccacctgtgaccacagagcagcacggggcccgctatgcctgccgcatccaccaccccagcctgcctgccagcggccgctctgctgaggtgaccctggaggtggccggcctgagcggccccagcctggaggacagcgtgggcctcttcctgagcgccttcctgctgctgggcctcttcaaggccctgggctgggccgctgtgtacctgagcacctgcaaggacagcaagaagcacgccacctag

SEQ ID NO: 172634 - DNA, 1086 bp, synthetic construct; identical to SEQ ID NO: 172632
  misc_feature 1..1086: note = Description of Artificial Sequence: Synthetic coding sequence
  source 1..1086: mol_type = other DNA

SEQ ID NO: 172635 - DNA, 471 bp, synthetic construct; identical to SEQ ID NO: 172627
  misc_feature 1..471: note = Description of Artificial Sequence: Synthetic coding sequence
  source 1..471: mol_type = other DNA

SEQ ID NO: 172636 - DNA, 1347 bp, synthetic construct; identical to SEQ ID NO: 172633
  misc_feature 1..1347: note = Description of Artificial Sequence: Synthetic coding sequence
  source 1..1347: mol_type = other DNA

SEQ ID NO: 172637 - DNA, 1086 bp, synthetic construct; identical to SEQ ID NO: 172629
  misc_feature 1..1086: note = Description of Artificial Sequence: Synthetic coding sequence
  source 1..1086: mol_type = other DNA

SEQ ID NO: 172638 - DNA, 1347 bp, synthetic construct; identical to SEQ ID NO: 172633
  misc_feature 1..1347: note = Description of Artificial Sequence: Synthetic coding sequence
  source 1..1347: mol_type = other DNA

SEQ ID NO: 172639 - DNA, 1086 bp, synthetic construct; identical to SEQ ID NO: 172632
  misc_feature 1..1086: note = Description of Artificial Sequence: Synthetic coding sequence
  source 1..1086: mol_type = other DNA

SEQ ID NO: 172640 - DNA, 2037 bp, synthetic construct
  misc_feature 1..2037: note = Description of Artificial Sequence: Synthetic coding sequence
  source 1..2037: mol_type = other DNA
atgctgctggaggccgagcggcggcggggcggcggggccgccggggcccggctgctggagcgctacagaagagtgcctggggtgcgggccctgcgggctgacagcgtgctgatcattgaaacagtgcccggcttccccccagcccccccagcccctggggccgcccagatccgggctgctgaggtgctggtgtatggagcccctcctggccgggtgtcccggctgctggagagatttgatcctcctgctgcccccaggagaagaggcagccctgagcgggcccggcccccacctcctcctcctcctccagccccaccccggcccccacctgctgcccccagccccccagctgcccctggcccccggggcggcggggccagccctggggccaggagaagtgacttcctgcagaagacaggcagcaacagcttcaccgtgcacccccggggcctgcacagaggagctggggcccggctgctgagcaatggccacagcgcccctgagcccagggctggccctgccaaccggctggccggcagccccccaggcagcggccagtggaagcccaaggtggagagcggggaccccagcctgcaccccccacccagccctggcacccccagcgccaccccagccagccccccagccagcgccacccccagccagaggcagtgtgtgtctgctgccaccagcaccaatgacagctttgagatccggcctgcccccaagcctgtgatggagaccatccccctgggggacctgcaggcccgggccctggccagcctgcgggccaacagcagaaattccttcatggtgatccccaagagcaaggccagcggggcccctcctcctgagggccggcagagcgtggagctgcccaagggggacctgggccctgccagccccagccaggagctgggcagccagcctgtgcctggaggagatggagccccagccctgggcaagagccccctggaggtggaggcccagtgggccgtggaggagggcgcctgccccaggacagccacagccctggccgaccgggccatccgctggcagaggcccagcagccccccacccttcctgcctgctgccagcgaggaggccgagcctgctgagggcctgcgggtgcccggcctggccaagaacagccgggagtatgtgcggcccggcctgcctgtgaccttcattgatgaggtggacagcgaggaggccccccaggccgccaagctgccctacctgccccacccagcccggcccctgcacccagcccggcccggctgtgtggccgagctgcagccccggggcagcaacaccttcaccgtggtgcccaagaggaagccaggcaccctgcaggaccagcacttcagccaggccaaccgggagccccggccccgggaggccgaggaggaggaggccagctgcctgctgggccccaccctgaagaagcgctaccccaccgtgcatgaaattgaagtcatcggcggctacctggccctgcagaagagctgcctgaccaaggccggcagcagcaggaagaagatgaagatctccttcaatgacaagagcctgcagaccacctttgagtaccccagcgagagcagcctggagcaggaggaggaggtggaccagcaggaggaggaggaggaggaggaggaggaggaggaggaggaggaggagggcagcggcagcgaggagaagccctttgccctcttcctgccccgggccacctttgtgtcctctgtgcggcctgagagcagccggctgcctgagggcagcagcggcctgagcagctacacccccaagcacagcgtggccttcagcaagtggcaggagcaggccctggagcaggccccccgggaggccgagcccccacctgtggaggccatggtgcgctgtggcggcgtggagcgctggggcgagagtgacacccgggccagcccctgtgtgcacatcctgagcagccacttccagctgaccccagccagccagaatgacctgagtgacttccgctctgagcccgccctgtacttctag

SEQ ID NO: 172641 - DNA, 2136 bp, synthetic construct
  misc_feature 1..2136: note = Description of Artificial Sequence: Synthetic coding sequence
  source 1..2136: mol_type = other DNA
atggccgccctgggccggcccggcagcggccccagggctgctgtgcctgcctggaagcgggagatcctggagaggaagagggccaagctggccgccctgggcggcggggccggccctggagctgctgagcctgagcagagggtgctggccgagagcctgggccccctgcgggagaaccccttcatgctgctggaggccgagaggagaagaggaggaggagctgctggggcccggctgctggagcgctaccgccgggtgcctggggtgcgggccctgcgggctgacagcgtgctgatcatcgagaccgtgcccggcttccccccagcccccccagcccctggagctgcccagatccgggctgctgaggtgctggtgtatggagcccctcctggccgggtgtcccggctgctggagagatttgaccccccagctgccccccggcggcggggcagccctgagcgggcccggcccccacctcctcctcctcctccagccccacccaggcctcctcctgctgcccccagccccccagctgcccctggcccccggggcggcggggccagccctggggcccggcggagtgacttcctgcagaagacaggcagcaacagcttcaccgtgcacccccggggcctgcacagaggagctggggcccggctgctgagcaatggccacagcgcccctgagccccgggccggccctgccaaccggctggccggcagccccccaggcagcggccagtggaagcccaaggtggagagcggggaccccagcctgcaccccccacccagccctggcaccccatctgccaccccagccagccccccagccagcgccacccccagccagaggcagtgtgtgtctgctgccaccagcaccaatgacagctttgagatccggcctgcccccaagcctgtgatggagaccatccccctgggggacctgcaggcccgggccctggccagcctgcgggccaacagcaggaacagcttcatggtgatccccaagagcaaggccagcggggcccctcctcctgagggccggcagagcgtggagctgcccaagggggacctgggccctgccagccccagccaggagctgggcagccagcctgtgcctggaggagatggagccccagccctgggcaagagccccctggaggtggaggcccagtgggccgtggaggagggcgcctgccccaggacagccacagccctggccgaccgggccatccgctggcagaggcccagcagccccccacccttcctgcctgctgccagcgaggaggccgagcctgctgagggcctgcgggtgcccggcctggccaagaacagccgggagtatgtgcggcccggcctgcctgtgaccttcattgatgaggtggacagcgaggaggccccccaggccgccaagctgccctacctgccccacccagcccggcccctgcacccagcccggcccggctgtgtggccgagctgcagccccggggcagcaacaccttcaccgtggtgcccaagaggaagccaggcaccctgcaggaccagcacttcagccaggccaaccgggagccccggccccgggaggccgaggaggaggaggccagctgcctgctgggccccaccctgaagaagcgctaccccaccgtgcatgaaattgaggtgattggaggctacctggccctgcagaagagctgcctgaccaaggccggcagcagcaggaagaagatgaagatctccttcaatgacaagagcctgcagaccacctttgagtaccccagcgagagcagcctggagcaggaggaggaggtggaccagcaggaggaggaggaggaggaggaggaggaggaggaggaggaggaggagggcagcggcagcgaggagaagccctttgccctcttcctgccccgggccacctttgtgtcctctgtgcggcctgagagcagccggctgcctgagggcagcagcggcctgagcagctacacccccaagcacagcgtggccttcagcaagtggcaggagcaggccctggagcaggccccccgggaggccgagcccccacctgtggaggccatgctgaccccagccagccagaatgacctgagtgacttccgctctgagcccgccctgtacttctag

SEQ ID NO: 172642 - DNA, 4866 bp, synthetic construct
  misc_feature 1..4866: note = Description of Artificial Sequence: Synthetic coding sequence
  source 1..4866: mol_type = other DNA
atggagtgggtgctggccgaggccctgctgagccagagccgggacccccgggccctgctgggcgccctgtgccagggcgaggccagcgctgagcgggtggagaccctgcgcttcctgctgcagaggctggaggatgaggaggcccggggcagcggcggggccggggccctgcctgaggccgcccgggaggtggccgccggctacctggtgcccctgctgcggagcctgcggggccggcctgctgggggccctgaccccagcctgcagcccaggcacagaagaagagtgctgcgggccgccggggccgccctgcggagctgtgtgcggctggccggccggccccagctggccgccgccctggccgaggaggccctgcgggacctgctggccggctggagggcccctggagctgaggccgctgtggaggtgctggccgctgtgggcccctgcctgcggcccagagaagatggccccctgctggagcgggtggccggcacagctgtggccctggccctgggcggcggcggagatggagatgaagctggccctgcagaagatgctgctgccctggtggccggccgcctgctgcctgtgctggtgcagtgtggcggggccgccctgcgggctgtgtggggcggcctggccgcccctggggccagcctgggcagcggccgggtggaggagaagctgctggtgctgagcgccctggccgagaagctgctgcctgagcccggcggggaccgggcccggggggcccgggaggccggcccagatgcccggcgctgctggaggttctggaggacagtgcaggccggcctgggccaggctgatgccctgaccaggaagagggcccgctacctgctgcagagagctgtggaggtgtctgctgagctgggcgctgactgcacctgtggcccccaggagggcaatggccccagcctcttctggtggagcgagaggaagaaggatgagctgctgaagttctgggagaactacatcctgatcatggagaccctggagggcaaccagatccacgtgatcaagcctgtgctgcccaagctgaacaacctgtttgaatatgctgtgtctgaagaaaatggctgctggctgttccaccccagctggcacatgtgcatctacaagaggatgtttgaaagtgagaacaagatcctgagcaaggagggcgtcatccacttcctggagctgtatgagaccaagatcctgcccttcagccctgagttcagcgagttcatcatcggccccctgatggatgccctgtctgagagcagcctgtacagccgcagccctggccagcccatcggcagctgcagccccctgggcctgaagctgcagaagttcctggtgacctacatcagcctgctgcctgaggagatcaagagcagcttcctgctgaagttcatcaggaagatgaccagccgccactggtgtgctgtgcccatcctcttcctgagcaaggccctggccaacgtgcccaggcacaaggccctgggcattgatggcctgctggccctgagagatgtgatccactgcaccatgatcacccaccagatcctgctgcggggagctgcccagtgctacctgctgcagacagccatgaacctgctggatgtggagaaggtgtccctgagtgatgtgtccaccttcctgatgagcctgcggcaggaggagagcctgggccggggcaccagcctgtggacagagctgtgtgactggctgcgggtgaatgaaagctacttcaagcccagccccacctgcagcagcatcggcctgcacaagaccagcctgaatgcctacgtgaagagcatcgtgcaggagtatgtgaagagcagcgcctgggagactggagagaactgcttcatgccagactggtttgaggccaagctggtgtccctgatggtgctgctggccgtggatgtggagggcatgaagacccagtacagcggcaagcagaggacagaaaatgtgctgcgcatcttcctggaccccctgctggatgtgctgatgaagttcagcaccaatgcctacatgcccctgctgaagacagaccgctgcctgcagctgctgctgaagctgctgaacacctgccgcctgaagggcagcagcgcccaggatgatgaggtgtccacagtgctgcagaacttcttcatgagcaccacagagagcatcagcgagttcatcctgcggcggctgaccatgaatgagctgaacagcgtgtctgacctggaccgctgccacctgtacctgatggtgctgacagagctgatcaacctgcacctgaaggtgggctggaagaggggcaaccccatctggagggtcatcagcctgctgaagaatgccagcatccagcacctgcaggagatggacagcggccaggagcccaccgtgggcagccagatccagagggtggtgtccatggccgccctggccatggtgtgtgaggccatcgaccagaagccagagctgcagctggacagcctgcatgctggccccctggagagcttcctgagcagcctgcagctgaaccagaccctgcagaagccccacgccgaggagcagagcagctatgcccaccccctggagtgcagctctgtgctggaggagagcagcagcagccagggctggggcaagatcgtggcccagtacatccatgaccagtgggtgtgcctgtccttcctgctgaagaagtaccacaccctcatccccaccaccggcagcgagatcctggagcccttcctgcctgctgtgcagatgcccatccgcaccctgcagagcgccctggaggccctgactgtgctgagcagtgaccaggtgctgcccgtcttccactgcctgaaggtgctggtgcccaagctgctgaccagcagcgagagcctgtgcatcgagagctttgacatggcctggaagatcatcagcagcctgagcaacacccagctgatcttctgggccaacctgaaggcctttgtgcagtttgtgtttgacaacaaggtgctgaccatcgccgccaagatcaagggccaggcctacttcaagatcaaggagatcatgtacaagatcatcgagatgtctgccatcaagacaggagtcttcaacaccctcatctcctactgctgccagagctggatcgtgtctgccagcaatgtgtcccagggcagcctgagcagcgccaagaactacagcgagctgatcctggaggcctgcatctttggaacagtgttccggcgggaccagaggctggtgcaggatgtgcagaccttcatcgagaacctgggccatgactgtgccgccaacatcgtgatggagaacaccaagcgggaggaccactacgtgcgcatctgtgctgtgaagttcctgtgcctgctggatggcagcaacatgagccacaagctgttcatcgaggacctggccatcaagctgctggacaaggatgagctggtgtccaagagcaagaagcgctactacgtgaacagcctgcagcaccgggtgaagaacagagtgtggcagaccctgctggtgctcttcccccggctggaccagaacttcctgaatggcatcatcgaccgcatcttccaggccggcttcaccaacaaccaggccagcatcaagtacttcatcgagtggatcatcatcctgatcctgcacaagttcccccagttcctgcccaagttctgggactgcttctcctatggagaggagaacctgaagaccagcatctgcaccttcctggccgtgctgagccacctggacatcatcacccagaacatccctgagaagaagctgatcctgaagcaggccctgattgtggtgctgcagtggtgcttcaaccacaacttctctgtgcggctgtatgccctggtggccctgaagaagctgtggacagtgtgcaaggtgctgtctgtggaggagtttgatgccctgacccctgtgattgagagcagcctgcaccaggtggagagcatgcatggagctggaaatgccaagaagaactggcagaggatccaggagcacttcttctttgccaccttccaccccctgaaggactactgcctggagaccatcttctacatcctgccccggctgagcggcctgattgaagatgagtggatcaccatcgacaagttcacccgcttcacagatgtgcccctggccgccggcttccagtggtacctgagccagacccagctgagcaagctgaagccaggggactggagccagcaggacatcggcaccaacctggtggaggccgacaaccaggccgagtggacagatgtgcagaagaagatcatcccctggaacagccgggtgtctgacctggacctggagctgctcttccaggaccgggccgcccggctgggcaagagcatcagccggctgattgtggtggccagcctgattgacaagcccaccaacctgggcggcctgtgcaggacctgtgaggtgtttggagcctctgtgctggtggtgggcagcctgcagtgcatcagtgacaagcagttccagcacctgtctgtgtctgctgagcagtggctgcccctggtggaggtgaagccaccccagctgattgactacctgcagcagaagaagacagagggctacaccatcattggagtggagcagacagccaagagcctggacctgacccagtactgcttccctgagaagagcctgctgctgctgggcaatgaaagagagggcatcccagccaacctgatccagcagctggatgtgtgtgtggagatcccccagcagggcatcatccgcagcctgaatgtgcacgtgtctggggccctgctgatctgggagtacacccggcagcagctgctgagccacggggacaccaagccctag

SEQ ID NO: 172643 - DNA, 1101 bp, synthetic construct
  misc_feature 1..1101: note = Description of Artificial Sequence: Synthetic coding sequence
  source 1..1101: mol_type = other DNA
atgtctgaggaggagcagggcagcggcaccaccaccggctgcggcctgcccagcattgagcagatgctggccgccaaccctgggaagacccccatcagcctgctgcaggagtatggcacccgcatcggcaagacccctgtgtatgacctgctgaaggccgagggccaggcccaccagcccaacttcaccttccgggtgacagtgggggacaccagctgcaccggccagggccccagcaagaaggccgccaagcacaaggctgctgaggtggccctgaagcacctgaagggcggctccatgctggagcccgccctggaggacagcagcagcttcagccccctggacagcagcctgcctgaggacatccctgtgttcaccgctgctgctgctgccacccctgtgcccagcgtggtgctgaccaggagcccccccatggagctgcagccccctgtgagcccccagcagagcgagtgcaaccctgtgggcgccctgcaggagctggtggtgcagaagggctggaggctgcctgagtacacagtgacccaggagagcggccctgcccacaggaaggagttcaccatgacctgccgggtggagcgcttcatcgagatcggcagcggcaccagcaagaagctggccaagagaaatgctgctgccaagatgctgctgcgggtgcacacagtgcccctggatgccagagatggaaatgaggtggagccagatgatgaccacttcagcattggagtgggcagccggctggatggcctgaggaacagaggccctggctgcacctgggacagcctgagaaattctgtgggggagaagatcctgagcctgcggagctgcagcctgggcagcctgggcgccctgggccctgcctgctgccgggtgctgtctgagctgtctgaggagcaggccttccacgtgtcctacctggacatcgaggagctgagcctgagcggcctgtgccagtgcctggtggagctgagcacccagcctgccaccgtgtgccacggcagcgccaccacccgggaggccgcccggggggaggccgcccggcgggccctgcagtacctgaagatcatggccggcagcaagtag

SEQ ID NO: 172644 - DNA, 1038 bp, synthetic construct
  misc_feature 1..1038: note = Description of Artificial Sequence: Synthetic coding sequence
  source 1..1038: mol_type = other DNA
atgctggccgccaaccctgggaagacccccatcagcctgctgcaggagtatggcaccagaattggcaagacccctgtgtatgacctgctgaaggccgagggccaggcccaccagcccaacttcaccttccgggtgacagtgggggacaccagctgcaccggccagggccccagcaagaaggccgccaagcacaaggctgctgaggtggccctgaagcacctgaagggcggctccatgctggagcccgccctggaggacagcagcagcttcagccccctggacagcagcctgcctgaggacatccctgtgttcaccgctgctgctgctgccacccctgtgcccagcgtggtgctgaccaggagcccccccatggagctgcagccccctgtgagcccccagcagagcgagtgcaaccctgtgggcgccctgcaggagctggtggtgcagaagggctggaggctgcctgagtacacagtgacccaggagagcggccctgcccacaggaaggagttcaccatgacctgccgggtggagcgcttcattgaaattggcagcggcaccagcaagaagctggccaagagaaatgctgctgccaagatgctgctgcgggtgcacacagtgcccctggatgccagagatggaaatgaggtggagccagatgatgaccacttcagcattggagtgggcagccggctggatggcctgaggaacagaggccctggctgcacctgggacagcctgaggaacagcgtgggggagaagatcctgagcctgcggagctgcagcctgggcagcctgggcgccctgggccctgcctgctgccgggtgctgtctgagctgtctgaggagcaggccttccacgtgtcctacctggacatcgaggagctgagcctgagcggcctgtgccagtgcctggtggagctgagcacccagcctgccaccgtgtgccacggcagcgccaccacccgggaggccgcccggggggaggccgcccggcgggccctgcagtacctgaagatcatggccggcagcaagtag

SEQ ID NO: 172645 - DNA, 1038 bp, synthetic construct; identical to SEQ ID NO: 172644
  misc_feature 1..1038: note = Description of Artificial Sequence: Synthetic coding sequence
  source 1..1038: mol_type = other DNA

SEQ ID NO: 172646 - DNA, 1245 bp, synthetic construct
  misc_feature 1..1245: note = Description of Artificial Sequence: Synthetic coding sequence
  source 1..1245: mol_type = other DNA
atgtctgagtacatccgggtgacagaagatgaaaatgatgagcccatcgagatccccagtgaagatgatggcaccgtgctgctgagcacagtgacagcccagtttcctggggcctgtggcctgcgctacagaaatcctgtgtcccagtgcatgagaggagtgcggctggtggagggcatcctgcacgccccagatgctggctggggcaacctggtgtatgtggtgaactaccccaaggacaacaagaggaagatggatgaaacagatgccagcagcgctgtgaaggtgaagagagctgtgcagaagaccagtgacctgattgtgctgggcctgccctggaagaccacagagcaggacctgaaggagtacttcagcacctttggagaggtgctgatggtgcaggtgaagaaggacctgaagacaggccacagcaaaggatttggatttgtgcgcttcacagaatatgagacccaggtgaaggtgatgagccagaggcacatgattgatggccgctggtgtgactgcaagctgcccaacagcaagcagagccaggatgagcccctgcggagcaggaaggtgtttgtgggccgctgcacagaggacatgacagaagatgagctgcgggagttcttcagccagtatggagatgtgatggatgtgttcatccccaagcccttccgggcctttgcctttgtgacctttgctgatgaccagatcgcccagagcctgtgtggggaggacctgatcatcaagggcatctctgtgcacatcagcaatgctgagcccaagcacaacagcaaccggcagctggagaggagcggccgctttggaggcaaccctgggggctttggaaaccagggcggctttggaaacagccggggcggcggggccggcctgggcaacaaccagggcagcaacatgggcggcggcatgaactttggagccttcagcatcaacccagccatgatggctgctgcccaggccgccctgcagagctcctggggcatgatgggcatgctggccagccagcagaaccagagcggccccagcggcaacaaccagaaccagggcaacatgcagcgggagcccaaccaggcctttggaagtggcaacaacagctacagcggcagcaacagcggggccgccatcggctggggcagcgccagcaatgccggcagcggcagcggcttcaacggcggcttcggcagctccatggacagcaagagcagcggctggggcatgtag

SEQ ID NO: 172647 - DNA, 888 bp, synthetic construct
  misc_feature 1..888: note = Description of Artificial Sequence: Synthetic coding sequence
  source 1..888: mol_type = other DNA
atgtctgagtacatccgggtgacagaagatgaaaatgatgagcccatcgagatccccagtgaagatgatggcaccgtgctgctgagcacagtgacagcccagtttcctggggcctgtggcctgcgctacagaaatcctgtgtcccagtgcatgagaggagtgcggctggtggagggcatcctgcacgccccagatgctggctggggcaacctggtgtatgtggtgaactaccccaaggacaacaagaggaagatggatgaaacagatgccagcagcgctgtgaaggtgaagagagctgtgcagaagaccagtgacctgattgtgctgggcctgccctggaagaccacagagcaggacctgaaggagtacttcagcacctttggagaggtgctgatggtgcaggtgaagaaggacctgaagacaggccacagcaaaggatttggatttgtgcgcttcacagaatatgagacccaggtgaaggtgatgagccagaggcacatgattgatggccgctggtgtgactgcaagctgcccaacagcaagcagagccaggatgagcccctgcggagcaggaaggtgtttgtgggccgctgcacagaggacatgacagaagatgagctgcgggagttcttcagccagtatggagatgtgatggatgtgttcatccccaagcccttccgggcctttgcctttgtgacctttgctgatgaccagatcgcccagagcctgtgtggggaggacctgatcatcaagggcatctctgtgcacatcagcaatgctgagcccaagcacaacagcaaccggcagctggagaggagcggccgcttcggcgtgcacctgatcagcaatgtgtatggccgcagcaccagcctgaaggtggtgctgtag

SEQ ID NO: 172648 - DNA, 897 bp, synthetic construct
  misc_feature 1..897: note = Description of Artificial Sequence: Synthetic coding sequence
  source 1..897: mol_type = other DNA
atgccccagatgctggccggggagatctggtgcatgctgagcaccatccagaaggtgaagaaggacctgaagacaggccacagcaaaggatttggatttgtgcgcttcacagaatatgagacccaggtgaaggtgatgagccagaggcacatgattgatggccgctggtgtgactgcaagctgcccaacagcaagcagagccaggatgagcccctgcggagcaggaaggtgtttgtgggccgctgcacagaggacatgacagaagatgagctgcgggagttcttcagccagtatggagatgtgatggatgtgttcatccccaagcccttccgggcctttgcctttgtgacctttgctgatgaccagatcgcccagagcctgtgtggggaggacctgatcatcaagggcatctctgtgcacatcagcaatgctgagcccaagcacaacagcaaccggcagctggagaggagcggccgctttggaggcaaccctgggggctttggaaaccagggcggctttggaaacagccggggcggcggggccggcctgggcaacaaccagggcagcaacatgggcggcggcatgaactttggagccttcagcatcaacccagccatgatggctgctgcccaggccgccctgcagagctcctggggcatgatgggcatgctggccagccagcagaaccagagcggccccagcggcaacaaccagaaccagggcaacatgcagcgggagcccaaccaggcctttggaagtggcaacaacagctacagcggcagcaacagcggggccgccatcggctggggcagcgccagcaatgccggcagcggcagcggcttcaacggcggcttcggcagctccatggacagcaagagcagcggctggggcatgtag

SEQ ID NO: 172649 - DNA, 1533 bp, synthetic construct
  misc_feature 1..1533: note = Description of Artificial Sequence: Synthetic coding sequence
  source 1..1533: mol_type = other DNA
atggctgctgacagtgatgatggagctgtgtctgccccagctgccagtgatggaggagtgtccaagagcaccaccagcggggaggagctggtggtgcaggtgcctgtggtggatgtgcagagcaacaacttcaaggagatgtggcccagcctgctgctggccatcaagacagccaactttgtggccgtggacacagagctgagcggcctgggggacaggaagagcctgctgaaccagtgcatcgaggagcgctacaaggctgtgtgccacgccgcccggaccaggagcatcctgagcctgggcctggcctgcttcaagaggcagcctgacaagggggagcacagctacctggcccaggtgttcaacctgaccctgctgtgcatggaggagtatgtgattgagcccaagtctgtgcagttcctgatccagcacggcttcaacttcaaccagcagtatgcccagggcatcccctaccacaagggaaatgacaagggagatgagagccagagccagagcgtgaggaccctcttcctggagctgatccgggcccggcggcccctggtgctgcacaacggcctgattgacctggtgttcctgtaccagaacttctacgcccacctgcctgagagcctgggcaccttcaccgctgacctgtgtgagatgtttcctgctggcatctatgacaccaagtatgctgctgagttccacgccaggtttgtggccagctacctggagtatgccttcagaaaatgtgagcgggagaatggcaagcagagagctgctggcagcccccacctgaccctggagttctgcaactaccccagctccatgagggaccacatcgactaccgctgctgcctgcccccagccacccaccggccccaccccaccagcatctgtgacaacttcagcgcctacggctggtgccccctgggcccccagtgcccccagagccatgacatcgacctgatcatcgacacagatgaggccgctgctgaggacaagagaagaagaagaagaagaagagagaagaggaagagggccctgctgaacctgcccggcacccagaccagcggggaggccaaggatggcccccccaagaagcaggtgtgtggggacagcatcaagccagaggagacagagcaggaggtggccgcagatgagaccaggaacctgccccacagcaagcagggcaacaagaatgacctggagatgggcatcaaggccgcccggcctgagattgctgaccgggccaccagcgaggtgcccggcagccaggccagccccaaccctgtgcctggagatggcctgcaccgggccggctttgatgccttcatgacaggctacgtgatggcctacgtggaggtgtcccagggcccccagccctgcagcagcggcccctggctgcctgagtgccacaacaaggtgtacctgagcggcaaggctgtgcccctgactgtggccaagagccagttcagccgcagcagcaaggcccacaaccagaagatgaagctgacctggggcagcagctag

SEQ ID NO: 172650 - DNA, 1293 bp, synthetic construct
  misc_feature 1..1293: note = Description of Artificial Sequence: Synthetic coding sequence
  source 1..1293: mol_type = other DNA
atggctgctgacagtgatgatggagctgtgtctgccccagctgccagtgatggagctgagtgggcctggggccaggaggagtttgctgagcctggagagcacagctacctggcccaggtgttcaacctgaccctgctgtgcatggaggagtatgtgattgagcccaagtctgtgcagttcctgatccagcacggcttcaacttcaaccagcagtatgcccagggcatcccctaccacaagggaaatgacaagggagatgagagccagagccagagcgtgaggaccctcttcctggagctgatccgggcccggcggcccctggtgctgcacaacggcctgattgacctggtgttcctgtaccagaacttctacgcccacctgcctgagagcctgggcaccttcaccgctgacctgtgtgagatgtttcctgctggcatctatgacaccaagtatgctgctgagttccacgccaggtttgtggccagctacctggagtatgccttcagaaaatgtgagcgggagaatggcaagcagagagctgctggcagcccccacctgaccctggagttctgcaactaccccagctccatgagggaccacatcgactaccgctgctgcctgcccccagccacccaccggccccaccccaccagcatctgtgacaacttcagcgcctacggctggtgccccctgggcccccagtgcccccagagccatgacatcgacctgatcatcgacacagatgaggccgctgctgaggacaagagaagaagaagaagaagaagagagaagaggaagagggccctgctgaacctgcccggcacccagaccagcggggaggccaaggatggcccccccaagaagcaggtgtgtggggacagcatcaagccagaggagacagagcaggaggtggccgcagatgagaccaggaacctgccccacagcaagcagggcaacaagaatgacctggagatgggcatcaaggccgcccggcctgagattgctgaccgggccaccagcgaggtgcccggcagccaggccagccccaaccctgtgcctggagatggcctgcaccgggccggctttgatgccttcatgacaggctacgtgatggcctacgtggaggtgtcccagggcccccagccctgcagcagcggcccctggctgcctgagtgccacaacaaggtgtacctgagcggcaaggctgtgcccctgactgtggccaagagccagttcagccgcagcagcaaggcccacaaccagaagatgaagctgacctggggcagcagctag

SEQ ID NO: 172651 - DNA, 1263 bp, synthetic construct
  misc_feature 1..1263: note = Description of Artificial Sequence: Synthetic coding sequence
  source 1..1263: mol_type = other DNA
atgaccatggagaagggcatgagcagtggagagggcctgcccagccgcagcagccaggtgtctgctgggaagatcacagccaaggagctggagaccaagcagagctacaaggagaagagaggaggctttgtgctggtgcacgccggggccggctaccacagcgagagcaaggccaaggagtacaagcacgtgtgcaagagggcctgccagaaggccatcgagaagctgcaggccggggccctggccacagatgctgtgacagctgccctggtggagctggaggacagccccttcaccaatgccggcatgggcagcaacctgaacctgctgggggagattgaatgtgatgccagcatcatggatggcaagagcctgaactttggagctgtgggcgccctgagcggcatcaagaaccctgtgtctgtggccaaccggctgctgtgtgagggccagaagggcaagctgtctgctggccgcatccccccctgcttcctggtgggggagggcgcctaccgctgggccgtggaccacggcatccccagctgcccccccaacatcatgaccacccgcttcagcctggccgccttcaagaggaacaagaggaagctggagctggccgagcgggtggacacagacttcatgcagctgaagaagaggcggcagagcagcgagaaggaaaatgattctggcaccctggacacagtgggcgctgtggtggtggaccacgagggcaatgtggccgctgctgtgagcagcggcggcctggccctgaagcaccctggccgggtgggccaggccgccctgtatggctgcggctgctgggccgagaacacaggagcccacaacccctacagcacagctgtgtccaccagcggctgtggggagcacctggtgaggaccatcctggccagagaatgtagccacgccctgcaggctgaagatgcccaccaggccctgctggagaccatgcagaacaagttcatcagcagccccttcctggcctctgaagatggagtgctgggcggcgtcatcgtgctgcggagctgccgctgcagcgctgagccagacagcagccagaacaagcagaccctgctggtggagttcctgtggagccacaccacagagagcatgtgtgtgggctacatgtctgcccaggacggcaaggccaagacccacatcagccggctgcccccaggagctgtggccggccagagcgtggccatcgagggcggcgtgtgccgcctggagagccctgtgaactag

SEQ ID NO: 172652 - DNA, 918 bp, synthetic construct
  misc_feature 1..918: note = Description of Artificial Sequence: Synthetic coding sequence
  source 1..918: mol_type = other DNA
atgaccatggagaagggcatgagcagtggagagggcctgcccagccgcagcagccaggtgtctgctgggaagatcacagccaaggagctggagaccaagcagagctacaaggagaagagaggaggctttgtgctggtgcacgccggggccggctaccacagcgagagcaaggccaaggagtacaagcacgtgtgcaagagggcctgccagaaggacagccccttcaccaatgccggcatgggcagcaacctgaacctgctgggggagattgaatgtgatgccagcatcatggatggcaagagcctgaactttggagctgtgggcgccctgagcggcatcaagaaccctgtgtctgtggccaaccggctgctgtgtgagggccagaagggcaagctgtctgctggccgcatccccccctgcttcctggtgggggagggcgcctaccgctgggccgtggaccacggcatccccagctgcccccccaacatcatgaccacccgcttcagcctggccgccttcaagaggaacaagaggaagctggagctggccgagcgggtggacacagacttcatgcagctgaagaagaggcggcagagcagcgagaaggaaaatgacagcggcaccctggacacagtgggcgctgtggtggtggaccacgagggcaatgtggccgctgctgtgtcctctgggggcctggccctgaagcaccctggccgggtgggccaggccgccctgtatggctgcggctgctgggccgagaacacaggagcccacaacccctacagcacagctgtgtccaccagcggctgtggggagcacctggtgaggaccatcctggcccgggagtgcagccacgccctgcaggccgaggatgcccaccaggccctgctggagaccatgcagaacaagttcatctag

SEQ ID NO: 172653 - DNA, 333 bp, synthetic construct
  misc_feature 1..333: note = Description of Artificial Sequence: Synthetic coding sequence
  source 1..333: mol_type = other DNA
tgaaaaatcacagccaaggagctggagaccaagcagagctacaaggagaagagaggaggctttgtgctggtgcacgccggggccggctaccacagcgagagcaaggccaaggagtacaagcacgtgtgcaagagggcctgccagaaggccatcgagaagctgcaggccggggccctggccacagatgctgtgacagctgccctggtggagctggagctgatgtggaagggccagttccaggtgctgtgtgtgctgaccaacctcttcctggacatcatcaagaaccccaccaagaccaagttcaagaccatcagcaatgtgaaggtgtactag

SEQ ID NO: 172654 - DNA, 918 bp, synthetic construct; identical to SEQ ID NO: 172652
  misc_feature 1..918: note = Description of Artificial Sequence: Synthetic coding sequence
  source 1..918: mol_type = other DNA

SEQ ID NO: 172655 - DNA, 438 bp, synthetic construct
  misc_feature 1..438: note = Description of Artificial Sequence: Synthetic coding sequence
  source 1..438: mol_type = other DNA
atgaccatggagaagggcatgagcagtggagagggcctgcccagccgcagcagccaggtgtctgctgggaagatcacagccaaggagctggagaccaagcagagctacaaggagaagagaggaggctttgtgctggtgcacgccggggccggctaccacagcgagagcaaggccaaggagtacaagcacgtgtgcaagagggcctgccagaaggccatcgagaagctgcaggccggggccctggccacagatgctgtgacagctgccctggtggagctggaggatgtggagagcatcctgtgtgccccctactggctggagaatgtgcacatgctgtacaagctgaggatgctgaccaagccctgctggaggctgtgcaagaccagcctgtctgtgcacctgagcctgcctgtgaagatggcctgcctggccgagtag

SEQ ID NO: 172656 - DNA, 390 bp, synthetic construct
  misc_feature 1..390: note = Description of Artificial Sequence: Synthetic coding sequence
  source 1..390: mol_type = other DNA
atgaccatggagaagggcatgagcagtggagagggcctgcccagccgcagcagccaggtgtctgctgggaagatcacagccaaggagctggagaccaagcagagctacaaggagaagagaggaggctttgtgctggtgcacgccggggccggctaccacagcgagagcaaggccaaggagtacaagcacgtgtgcaagagggcctgccagaaggccatcgagaagctgcaggccggggccctggccacagatgctgtgacagctgccctggtggagctggaggtgtacacccacagctacacctcctggagctgcatccagcccagcatccacgtgctgctggtgaagaggcagaggaagagccccctgccccgcatcagcaccttctag

SEQ ID NO: 172657 - DNA, 1443 bp, synthetic construct
  misc_feature 1..1443: note = Description of Artificial Sequence: Synthetic coding sequence
  source 1..1443: mol_type = other DNA
atgctgctgtgcacagcccggctggtgggcctgcagctgctgatcagctgctgctgggcctttgcctgccacagcacagagagcagcccagacttcaccctgcccggggactacctgctggccggcctcttccccctgcacagcggctgcctgcaggtgcgccacaggcctgaggtgaccctgtgtgacaggagctgcagcttcaatgaacatggctaccacctgttccaggccatgaggctgggcgtggaggagatcaacaacagcacagccctgctgcccaacatcaccctgggctaccagctgtatgatgtgtgcagcgacagcgccaacgtgtatgccaccctgcgggtgctgagcctgcccggccagcaccacatcgagctgcagggcgacctgctgcactacagccccaccgtgctggccgtcatcggccctgacagcaccaacagagctgccaccacagctgccctgctgagccccttcctggtgcccatgatctcctatgctgccagcagcgagaccctgtctgtgaagaggcagtaccccagcttcctgcggaccatccccaatgacaagtaccaggtggagaccatggtgctgctgctgcagaagtttggctggacctggatcagcctggtgggcagcagtgatgattatggccagctgggcgtgcaggccctggagaaccaggccaccggccagggcatctgcatcgccttcaaggacatcatgcccttcagcgcccaggtgggagatgagaggatgcagtgcctgatgaggcacctggcccaggccggggccaccgtggtggtggtgttcagcagccggcagctggcccgggtcttctttgagagcgtggtgctgaccaacctgaccgggaaggtgtgggtggccagcgaggcctgggccctgagccgccacatcaccggggtgcccggcatccagagaattggcatggtgctgggcgtggccatccagaagagagctgtgcccggcctgaaggcctttgaggaggcctatgcccgggctgacaagaaggccccccggccctgccacaagggctcctggtgcagcagcaaccagctgtgccgggagtgccaggccttcatggcccacaccatgcccaagctgaaggccttctccatgagcagcgcctacaatgcctacagagctgtgtatgctgtggcccacggcctgcaccagctgctgggctgtgccagcggggcctgcagccggggccgggtgtacccctggcagaccagcacagatgccagcctggtgggcaagaagagcggccacctgcgggaggcccggcctgccagccgggccctgtggtgcttctggctgtgtgtgtccacccccctgggctgctgctggcagctgacccgctgctgctgctgctgctgcctgggcctgctggcctgcctgcccggcacctag

SEQ ID NO: 172658 - DNA, 2526 bp, synthetic construct
  misc_feature 1..2526: note = Description of Artificial Sequence: Synthetic coding sequence
  source 1..2526: mol_type = other DNA
atgctgctgtgcacagcccggctggtgggcctgcagctgctgatcagctgctgctgggcctttgcctgccacagcacagagagcagcccagacttcaccctgcccggggactacctgctggccggcctcttccccctgcacagcggctgcctgcaggtgcgccacaggcctgaggtgaccctgtgtgacaggagctgcagcttcaatgaacatggctaccacctgttccaggccatgaggctgggcgtggaggagatcaacaacagcacagccctgctgcccaacatcaccctgggctaccagctgtatgatgtgtgcagcgacagcgccaacgtgtatgccaccctgcgggtgctgagcctgcccggccagcaccacatcgagctgcagggcgacctgctgcactacagccccaccgtgctggccgtcatcggccctgacagcaccaacagagctgccaccacagctgccctgctgagccccttcctggtgcccatgatctcctatgctgccagcagcgagaccctgtctgtgaagaggcagtaccccagcttcctgcggaccatccccaatgacaagtaccaggtggagaccatggtgctgctgctgcagaagtttggctggacctggatcagcctggtgggcagcagtgatgattatggccagctgggcgtgcaggccctggagaaccaggccaccggccagggcatctgcatcgccttcaaggacatcatgcccttcagcgcccaggtgggagatgagaggatgcagtgcctgatgaggcacctggcccaggccggggccaccgtggtggtggtgttcagcagccggcagctggcccgggtcttctttgagagcgtggtgctgaccaacctgaccgggaaggtgtgggtggccagcgaggcctgggccctgagccgccacatcaccggggtgcccggcatccagagaattggcatggtgctgggcgtggccatccagaagagagctgtgcccggcctgaaggcctttgaggaggcctatgcccgggctgacaagaaggccccccggccctgccacaagggctcctggtgcagcagcaaccagctgtgccgggagtgccaggccttcatggcccacaccatgcccaagctgaaggccttctccatgagcagcgcctacaatgcctacagagctgtgtatgctgtggcccacggcctgcaccagctgctgggctgtgccagcggggcctgcagccggggccgggtgtacccctggcagctgctggagcagatccacaaggtgcacttcctgctgcacaaggacacagtggccttcaatgacaacagagaccccctgagcagctacaacatcatcgcctgggactggaatggccccaagtggaccttcaccgtgctgggcagcagcacctggagccctgtgcagctgaacatcaatgagaccaagatccagtggcacggcaaggacaaccaggtgcccaagtctgtgtgcagcagtgactgcctggagggccaccagagggtggtgacaggcttccaccactgctgctttgaatgtgtgccctgtggggccggcaccttcctgaacaagagtgacctgtaccgctgccagccctgtgggaaggaggagtgggcccctgagggcagccagacctgcttccccaggacagtggtgttcctggccctgcgggagcacacctcctgggtgctgctggccgccaacaccctgctgctgctgctgctgctgggcacagctggcctgtttgcctggcacctggacacccctgtggtgcgctctgctgggggccgcctgtgcttcctgatgctgggcagcctggccgccggcagcggcagcctgtatggcttctttggagagcccaccaggcctgcctgcctgctgcggcaggccctgtttgccctgggcttcaccatcttcctgagctgcctgactgtgcgctccttccagctgatcatcatcttcaagttcagcaccaaggtgcccaccttctaccacgcctgggtgcagaaccacggggccggcctgtttgtgatgatcagcagcgctgcccagctgctgatctgcctgacctggctggtggtgtggacccccctgcctgcccgggagtaccagcgcttcccccacctggtgatgctggagtgcacagagaccaacagcctgggcttcatcctggccttcctgtacaacggcctgctgagcatcagcgcctttgcctgcagctacctgggcaaggacctgcctgagaactacaatgaggccaagtgtgtgaccttcagcctgctcttcaactttgtgtcctggatcgccttcttcaccacagcctctgtgtatgatggcaagtacctgcctgctgccaacatgatggccggcctgagcagcctgagcagcggctttggaggctacttcctgcccaagtgctacgtgatcctgtgcaggccagacctgaacagcacagagcacttccaggccagcatccaggactacacccggcgctgtggcagcacctag

SEQ ID NO: 172659 - DNA, 1764 bp, synthetic construct
  misc_feature 1..1764: note = Description of Artificial Sequence: Synthetic coding sequence
  source 1..1764: mol_type = other DNA
atgctgctgtgcacagcccggctggtgggcctgcagctgctgatcagctgctgctgggcctttgcctgccacagcacagagagcagcccagacttcaccctgcccggggactacctgctggccggcctcttccccctgcacagcggctgcctgcaggtgcgccacaggcctgaggtgaccctgtgtgacaggagctgcagcttcaatgaacatggctaccacctgttccaggccatgaggctgggcgtggaggagatcaacaacagcacagccctgctgcccaacatcaccctgggctaccagctgtatgatgtgtgcagcgacagcgccaacgtgtatgccaccctgcgggtgctgagcctgcccggccagcaccacatcgagctgcagggcgacctgctgcactacagccccaccgtgctggccgtcatcggccctgacagcaccaacagagctgccaccacagctgccctgctgagccccttcctggtgcccatgctgctggagcagatccacaaggtgcacttcctgctgcacaaggacacagtggccttcaatgacaacagagaccccctgagcagctacaacatcatcgcctgggactggaatggccccaagtggaccttcaccgtgctgggcagcagcacctggagccctgtgcagctgaacatcaatgagaccaagatccagtggcacggcaaggacaaccaggtgcccaagtctgtgtgcagcagtgactgcctggagggccaccagagggtggtgacaggcttccaccactgctgctttgaatgtgtgccctgtggggccggcaccttcctgaacaagagtgacctgtaccgctgccagccctgtgggaaggaggagtgggcccctgagggcagccagacctgcttccccaggacagtggtgttcctggccctgcgggagcacacctcctgggtgctgctggccgccaacaccctgctgctgctgctgctgctgggcacagctggcctgtttgcctggcacctggacacccctgtggtgcgctctgctgggggccgcctgtgcttcctgatgctgggcagcctggccgccggcagcggcagcctgtatggcttctttggagagcccaccaggcctgcctgcctgctgcggcaggccctgtttgccctgggcttcaccatcttcctgagctgcctgactgtgcgctccttccagctgatcatcatcttcaagttcagcaccaaggtgcccaccttctaccacgcctgggtgcagaaccacggggccggcctgtttgtgatgatcagcagcgctgcccagctgctgatctgcctgacctggctggtggtgtggacccccctgcctgcccgggagtaccagcgcttcccccacctggtgatgctggagtgcacagagaccaacagcctgggcttcatcctggccttcctgtacaacggcctgctgagcatcagcgcctttgcctgcagctacctgggcaaggacctgcctgagaactacaatgaggccaagtgtgtgaccttcagcctgctcttcaactttgtgtcctggatcgccttcttcaccacagcctctgtgtatgatggcaagtacctgcctgctgccaacatgatggccggcctgagcagcctgagcagcggctttggaggctacttcctgcccaagtgctacgtgatcctgtgcaggccagacctgaacagcacagagcacttccaggccagcatccaggactacacccggcgctgtggcagcacctag

SEQ ID NO: 172660 - DNA, 921 bp, synthetic construct
  misc_feature 1..921: note = Description of Artificial Sequence: Synthetic coding sequence
  source 1..921: mol_type = other DNA
atgaggctgggcgtggaggagatcaacaacagcacagccctgctgcccaacatcaccctgggctaccagctgtatgatgtgtgcagcgacagcgccaacgtgtatgccaccctgcgggtgctgagcctgcccggccagcaccacatcgagctgcagggcgacctgctgcactacagccccaccgtgctggccgtcatcggccctgacagcaccaacagagctgccaccacagctgccctgctgagccccttcctggtgcccatgctgctggagcagatccacaaggtgcacttcctgctgcacaaggacacagtggccttcaatgacaacagagaccccctgagcagctacaacatcatcgcctgggactggaatggccccaagtggaccttcaccgtgctgggcagcagcacctggagccctgtgcagctgaacatcaatgagaccaagatccagtggcacggcaaggacaaccaggtgcccaagtctgtgtgcagcagtgactgcctggagggccaccagagggtggtgacaggcttccaccactgctgctttgaatgtgtgccctgtggggccggcaccttcctgaacaagagtgacctgtaccgctgccagccctgtgggaaggaggagtgggcccctgagggcagccagacctgcttccccaggacagtggtgttcctggccctgcgggagcacacctcctgggtgctgctggccgccaacaccctgctgctgctgctgctgctgggcacagctggcctgtttgcctggcacctggacacccctgtggtgcgctctgctgggggccgcctgtgcttcctgatgctgggcagcctggccgccggcagcggcagcctgtatggcttctttggagagcccagcctgcccctggtgagccccagcagctgcccagcctag

SEQ ID NO: 172661 - DNA, 2520 bp, synthetic construct
  misc_feature 1..2520: note = Description of Artificial Sequence: Synthetic coding sequence
  source 1..2520: mol_type = other DNA
atgggcccccgggccaagaccatcagcagcctcttcttcctgctgtgggtgctggccgagccagcagaaaattctgacttctacctgcccggggactacctgctgggcggcctcttcagcctgcacgccaacatgaagggcatcgtgcacctgaacttcctgcaggtgcccatgtgcaaggagtatgaggtgaaggtgattggctacaacctgatgcaggccatgagatttgctgtggaggagatcaacaatgacagcagcctgctgcccggggtgctgctgggctatgagatcgtggatgtgtgctacatcagcaacaacgtgcagcctgtgctgtacttcctggcccacgaggacaacctgctgcccatccaggaggactacagcaactacatcagccgggtggtggccgtgattggaccagacaacagcgagagcgtgatgacagtggccaacttcctgagcctcttcctgctgccccagatcacctacagcgccatcagtgatgagctgcgggacaaggtgcgcttccctgccctgctgcggaccacccccagcgctgaccaccacatcgaggccatggtgcagctgatgctgcacttccgctggaactggatcatcgtgctggtgtccagtgacacctacggccgggacaatggccagctgctgggggagcgggtggcccggcgggacatctgcatcgccttccaggagaccctgcccaccctgcagcccaaccagaacatgaccagcgaggagcggcagaggctggtgaccatcgtggacaagctgcagcagagcacagcccgggtggtggtggtgttctccccagacctgaccctgtaccacttcttcaatgaggtgctgcggcagaacttcaccggggctgtgtggatcgccagcgagagctgggccatcgaccctgtgctgcacaacctgacagagctgcggcacctgggcaccttcctgggcatcaccatccagagcgtgcccatccctggcttcagcgagttccgggagtggggcccccaggccggccccccacccctgagcaggaccagccagagctacacctgcaaccaggagtgtgacaactgcctgaatgccaccctgtccttcaacaccatcctgcggctgagcggggagcgggtggtgtacagcgtgtacagcgctgtgtatgctgtggcccacgccctgcacagcctgctgggctgtgacaagagcacctgcaccaagagggtggtgtacccctggcagctgctggaggagatctggaaggtgaacttcaccctgctggaccaccagatcttctttgacccccagggagatgtggccctgcacctggagatcgtgcagtggcagtgggacaggagccagaaccccttccagagcgtggccagctactaccccctgcagaggcagctgaagaacatccaggacatctcctggcacaccatcaacaacaccatccccatgtccatgtgcagcaagcgctgccagagcggccagaagaagaagcctgtgggcatccacgtgtgctgctttgagtgcatcgactgcctgcccggcaccttcctgaaccacacagaagatgaatatgagtgccaggcctgccccaacaatgagtggagctaccagagcgagaccagctgcttcaagaggcagctggtgttcctggagtggcatgaggcccccaccatcgctgtggccctgctggccgccctgggcttcctgagcaccctggccatcctggtgatcttctggaggcacttccagacccccatcgtgcgctctgctgggggccccatgtgcttcctgatgctgaccctgctgctggtggcctacatggtggtgcctgtgtatgtgggcccccccaaggtgtccacctgcctgtgccggcaggccctcttccccctgtgcttcaccatctgcatcagctgcatcgctgtgcgctccttccagatcgtgtgtgccttcaagatggccagccgcttcccccgggcctacagctactgggtgcgctaccagggcccctacgtgtccatggccttcatcaccgtgctgaagatggtgattgtggtgattggcatgctggccaccggcctgagccccaccaccaggacagatcctgatgaccccaagatcaccatcgtgtcctgcaaccccaactacagaaacagcctgctcttcaacaccagcctggacctgctgctgtctgtggtgggcttctcctttgcctacatgggcaaggagctgcccaccaactacaatgaggccaagttcatcaccctgtccatgaccttctacttcaccagctctgtgtccctgtgcaccttcatgtctgcctacagcggcgtgctggtgaccatcgtggacctgctggtgacagtgctgaacctgctggccatcagcctgggctacttcggccccaagtgctacatgatcctcttctacccagagaggaacaccccagcctacttcaacagcatgatccagggctacaccatgagaagagactag

SEQ ID NO: 172662 - DNA, 2559 bp, synthetic construct
  misc_feature 1..2559: note = Description of Artificial Sequence: Synthetic coding sequence
  source 1..2559: mol_type = other DNA
atgctgggccctgctgtgctgggcctgagcctgtgggccctgctgcaccctggcactggagcccccctgtgcctgagccagcagctgaggatgaagggggactatgtgctgggcggcctcttccccctgggggaggccgaggaggccggcctgcggagcaggacccggcccagcagccctgtgtgcacccgcttcagcagcaatggcctgctgtgggccctggccatgaagatggctgtggaggagatcaacaacaagagtgacctgctgcccggcctgcggctgggctatgacctgtttgacacctgcagcgagcctgtggtggccatgaagcccagcctgatgttcctggccaaggccggcagccgggacattgctgcctactgcaactacacccagtaccagccccgggtgctggccgtcatcggcccccacagcagcgagctggccatggtgacaggcaagttcttctccttcttcctgatgccccaggtgtcctatggagcctccatggagctgctgagcgcccgggagaccttccccagcttcttcagaacagtgcccagcgacagagtgcagctgacagctgctgctgagctgctgcaggagtttggctggaactgggtggccgccctgggcagtgatgatgaatatggccggcagggcctgagcatcttcagcgccctggccgccgcccggggcatctgcatcgcccacgagggcctggtgcccctgcccagggcagatgacagccggctgggcaaggtgcaggatgtgctgcaccaggtgaaccagagctctgtgcaggtggtgctgctgtttgcctctgtgcatgctgcccacgccctcttcaactacagcatcagcagccggctgagccccaaggtgtgggtggccagcgaggcctggctgaccagtgacctggtgatgggcctgcccggcatggcccagatgggcaccgtgctgggcttcctgcagagaggagcccagctgcacgagttcccccagtatgtgaagacccacctggccctggccacagatcctgccttctgcagcgccctgggggagcgggagcagggcctggaggaggatgtggtgggccagcgctgcccccagtgtgactgcatcaccctgcagaatgtgtctgctggcctgaaccaccaccagaccttctctgtgtatgctgctgtgtacagcgtggcccaggccctgcacaacaccctgcagtgcaatgccagcggctgcccagcccaggaccctgtgaagccctggcagctgctggagaacatgtacaacctgaccttccacgtgggcggcctgcccctgcgctttgacagcagtggaaatgtggacatggagtatgacctgaagctgtgggtgtggcagggctctgtgccccggctgcatgatgtgggccgcttcaacggcagcctgaggacagagcggctgaagatccgctggcacaccagtgacaaccagaagcctgtgagccgctgcagccggcagtgccaggagggccaggtgagaagagtgaagggcttccacagctgctgctatgactgtgtggactgtgaggccggcagctaccggcagaacccagatgacatcgcctgcaccttctgtggccaggatgagtggagccctgagaggagcacccgctgcttcagaagaagaagccgcttcctggcctggggcgagcctgctgtgctgctgctgctgctgctgctgagcctggccctgggcctggtgctggccgccctgggcctgtttgtgcaccaccgggacagccccctggtgcaggccagcggcggccccctggcctgcttcggcctggtgtgcctgggcctggtgtgcctgtctgtgctgctcttccctggccagcccagccctgcccgctgcctggcccagcagcccctgagccacctgcccctgaccggctgcctgagcaccctcttcctgcaggccgctgagatctttgtggagagcgagctgcccctgtcctgggccgaccggctgagcggctgcctgcggggcccctgggcctggctggtggtgctgctggccatgctggtggaggtggccctgtgcacctggtacctggtggccttccccccagaggtggtgacagactggcacatgctgcccacagaggccctggtgcactgcaggaccaggtcctgggtgtcctttggcctggcccacgccaccaatgccaccctggccttcctgtgcttcctgggcaccttcctggtgcgcagccagcccggctgctacaacagagcccggggcctgacctttgccatgctggcctacttcatcacctgggtgtcctttgtgcccctgctggccaacgtgcaggtggtgctgcggcctgctgtgcagatgggcgccctgctgctgtgtgtgctgggcatcctggccgccttccacctgccccgctgctacctgctgatgaggcagcccggcctgaacaccccagagttcttcctgggcggcggccctggagatgcccagggccagaatgatggcaacacaggcaaccagggcaagcatgaatag

SEQ ID NO: 172663 - DNA, 876 bp, synthetic construct
  misc_feature 1..876: note = Description of Artificial Sequence: Synthetic coding sequence
  source 1..876: mol_type = other DNA
atgatccccatccagctgactgtgttcttcatgatcatctacgtgctggagagcctgaccatcatcgtgcagagcagcctcatcgtggccgtgctgggccgggagtggctgcaggtgcggcggctgatgcctgtggacatgatcctgatcagcctgggcatcagccgcttctgcctgcagtgggcctccatgctgaacaacttctgcagctacttcaacctgaactacgtgctgtgcaacctgaccatcacctgggagttcttcaacatcctgaccttctggctgaacagcctgctgaccgtcttctactgcatcaaggtgtcctccttcacccaccacatcttcctgtggctgcgctggaggatcctgcggctcttcccctggatcctgctgggcagcctgatgatcacctgtgtgaccatcatccccagcgccatcggcaactacatccagatccagctgctgaccatggagcacctgcccaggaacagcacagtgacagacaagctggagaacttccaccagtaccagttccaggcccacacagtggccctggtgatccccttcatcctcttcctggccagcaccatcttcctgatggccagcctgaccaagcagatccagcaccacagcacaggccactgcaaccccagcatgaaggcccgcttcaccgccctgcggagcctggccgtgctcttcatcgtgttcaccagctacttcctgaccatcctgatcaccatcatcggcaccctgtttgacaagcgctgctggctgtgggtgtgggaggcctttgtgtatgccttcatcctgatgcacagcaccagcctgatgctgagcagccccaccctgaagaggatcctgaagggcaagtgctag

SEQ ID NO: 172664 - DNA, 900 bp, synthetic construct
  misc_feature 1..900: note = Description of Artificial Sequence: Synthetic coding sequence
  source 1..900: mol_type = other DNA
atgatgtgcttcctgctgatcatcagcagcatcctggtggtgtttgcctttgtgctgggcaatgtggccaacggcttcatcgccctggtgaatgtgattgactgggtgaacaccaggaagatcagcagcgctgagcagatcctgacagccctggtggtgagccgcatcggcctgctgtgggtgatgctgttcctgtggtacgccaccgtcttcaacagcgccctgtatggcctggaggtgcgcatcgtggccagcaatgcctgggccgtgaccaaccacttctccatgtggctggccgccagcctgagcatcttctgcctgctgaagatcgccaacttcagcaacctgatcagcctgcacctgaagaagaggatcaagtctgtggtgctggtgatcctgctgggccccctggtgttcctgatctgcaacctggccgtcatcaccatggatgagcgggtgtggaccaaggagtatgagggcaatgtgacctggaagatcaagctgagaaatgccatccacctgagcagcctgactgtgaccaccctggccaacctgatccccttcaccctgagcctcatctgcttcctgctgctgatctgcagcctgtgcaagcacctgaagaagatgaggctgcacagcaagggcagccaggaccccagcaccaaggtgcacatcaaggccctgcagacagtgaccagcttcctgatgctgtttgccatctacttcctgtgcatcatcaccagcacctggaacctgcggacccagcagagcaagctggtgctgctgctgtgccagacagtggccatcatgtaccccagcttccacagcttcatcctgatcatgggcagcaggaagctgaagcagaccttcctgtctgtgctgtggcagatgaccaggtag

SEQ ID NO: 172665 - DNA, 930 bp, synthetic construct
  misc_feature 1..930: note = Description of Artificial Sequence: Synthetic coding sequence
  source 1..930: mol_type = other DNA
atgatgtccttcctgcacatcgtgttcagcatcctggtggtggtggccttcatcctgggcaactttgccaacggcttcatcgccctgatcaacttcatcgcctgggtgaagaggcagaagatcagcagcgctgaccagatcatcgccgccctggccgtgtcccgggtgggcctgctgtgggtgatcctgctgcactggtacagcacagtgctgaaccccaccagcagcaacctgaaggtgatcatcttcatcagcaatgcctgggccgtgaccaaccacttcagcatctggctggccaccagcctgagcatcttctacctgctgaagatcgtgaacttcagccgcctcatcttccaccacctgaagaggaaggccaagtctgtggtgctggtgattgtgctgggcagcctcttcttcctggtgtgccacctggtgatgaagcacacctacatcaacgtgtggacagaagaatgtgagggcaatgtgacctggaagatcaagctgagaaatgccatgcacctgagcaacctgactgtggccatgctggccaacctgatccccttcaccctgaccctcatctccttcctgctgctgatctacagcctgtgcaagcacctgaagaagatgcagctgcacggcaagggcagccaggaccccagcaccaagatccacatcaaggccctgcagacagtgaccagcttcctgatcctgctggccatctacttcctgtgcctgatcatctccttctggaacttcaagatgaggcccaaggagatcgtgctgatgctgtgccaggccttcggcatcatctaccccagcttccacagcttcatcctgatctggggcaacaagaccctgaagcagaccttcctgtctgtgctgtggcaggtgacctgctgggccaagggccagaaccagagcaccccctag

SEQ ID NO: 172666 - DNA, 951 bp, synthetic construct
  misc_feature 1..951: note = Description of Artificial Sequence: Synthetic coding sequence
  source 1..951: mol_type = other DNA
atgatgggcctgacagaaggagtcttcctgatcctgagcggcacccagttcaccctgggcatcctggtgaactgcttcatcgagctggtgaatggcagctcctggttcaagaccaagaggatgagcctgagtgacttcatcatcaccaccctggccctgctgcgcatcatcctgctgtgcatcatcctgacagacagcttcctgattgagttcagccccaacacccatgacagcggcatcatcatgcagatcattgatgtgtcctggaccttcaccaaccacctgagcatctggctggccacctgcctgggcgtgctgtactgcctgaagatcgccagcttcagccaccccaccttcctgtggctgaagtggagggtgtcccgggtgatggtgtggatgctgctgggcgccctgctgctgagctgtggcagcacagccagcctcatcaatgagttcaagctgtacagcgtcttccggggcatcgaggccaccagaaatgtgacagagcacttcaggaagaagaggtctgagtactacctgatccacgtgctgggcaccctgtggtacctgcccccactcatcgtgtccctggccagctacagcctgctgatcttcagcctgggccgccacacccggcagatgctgcagaatggcaccagcagccgggaccccaccacagaggcccacaagagggccatccgcatcatcctgtccttcttcttcctgttcctgctgtacttcctggccttcctgattgccagctttggaaacttcctgcccaagaccaagatggccaagatgattggagaggtgatgaccatgttctacccagctggccacagcttcatcctgatcctgggcaacagcaagctgaagcagacctttgtggtgatgctgcgctgtgagagcggccacctgaagccaggcagcaagggccccatcttctcctag

SEQ ID NO: 172667 - DNA, 960 bp, synthetic construct
  misc_feature 1..960: note = Description of Artificial Sequence: Synthetic coding sequence
  source 1..960: mol_type = other DNA
atgatcaccttcctgcccatcatcttcagcatcctgattgtggtgatctttgtgattggcaactttgccaacggcttcatcgccctggtgaacagcattgagtgggtgaagaggcagaagatcagctttgtggaccagatcctgacagccctggccgtgtcccgggtgggcctgctgtgggtgctgctgctgcactggtacgccacccagctgaacccagccttctacagcgtggaggtgcgcatcacagcctacaacgtgtgggccgtgaccaaccacttcagctcctggctggccaccagcctgtccatgttctacctgctgcgcatcgccaacttcagcaacctgatcttcctgcgcatcaagagaagagtgaagtctgtggtgctggtgatcctgctgggccccctgctcttcctggtgtgccacctgtttgtgatcaacatggatgagaccgtgtggaccaaggagtatgagggcaatgtgacctggaagatcaagctgcggagcgccatgtaccacagcaacatgaccctgaccatgctggccaactttgtgcccctgaccctgaccctcatctccttcctgctgctgatctgcagcctgtgcaagcacctgaagaagatgcagctgcacggcaagggcagccaggaccccagcaccaaggtgcacatcaaggccctgcagacagtgaccagcttcctgctgctgtgtgccatctacttcctgtccatgatcatctctgtgtgcaactttggccgcctggagaagcagcctgtgttcatgttctgccaggccatcatcttctcctaccccagcacccaccccttcatcctgatcctgggcaacaagaagctgaagcagatcttcctgtctgtgctgcggcacgtgcgctactgggtgaaggacaggagcctgcggctgcaccgcttcaccaggggggccctgtgtgtgttctag

SEQ ID NO: 172668 - DNA, 930 bp, synthetic construct
  misc_feature 1..930: note = Description of Artificial Sequence: Synthetic coding sequence
  source 1..930: mol_type = other DNA
atgaccaccttcatccccatcatcttcagctctgtggtggtggtgctgtttgtgattggcaactttgccaacggcttcatcgccctggtgaacagcattgagcgggtgaagaggcagaagatcagctttgctgaccagatcctgacagccctggccgtgtcccgggtgggcctgctgtgggtgctgctgctgaactggtacagcacagtgttcaacccagccttctacagcgtggaggtgaggaccacagcctacaacgtgtgggccgtgacaggccacttcagcaactggctggccaccagcctgagcatcttctacctgctgaagatcgccaacttcagcaacctgatcttcctgcacctgaagagaagagtgaagagcgtcatcctggtgatgctgctgggccccctgctcttcctggcctgccagctgtttgtgatcaacatgaaggagatcgtgaggaccaaggagtatgagggcaacctgacctggaagatcaagctgcggtctgctgtgtacctgagtgatgccaccgtgaccaccctgggcaacctggtgcccttcaccctgaccctgctgtgcttcctgctgctgatctgcagcctgtgcaagcacctgaagaagatgcagctgcacggcaagggcagccaggaccccagcaccaaggtgcacatcaaggccctgcagaccgtcatcttcttcctgctgctgtgtgctgtgtacttcctgagcatcatgatctctgtgtggagctttggcagcctggagaacaagcctgtgttcatgttctgcaaggccatccgcttctcctaccccagcatccaccccttcatcctgatctggggcaacaagaagctgaagcagaccttcctgtctgtgctgcggcaggtgcgctactgggtgaagggggagaagcccagcagcccctag

SEQ ID NO: 172669 - DNA, 1002 bp, synthetic construct
  misc_feature 1..1002: note = Description of Artificial Sequence: Synthetic coding sequence
  source 1..1002: mol_type = other DNA
atgctgaccctgacccgcatcagaacagtgtcctatgaggtgcgcagcaccttcctgttcatctctgtgctggagtttgctgtgggcttcctgaccaatgcctttgtgttcctggtgaacttctgggatgtggtgaagaggcaggccctgagcaacagcgactgtgtgctgctgtgcctgagcatcagccgcctcttcctgcacggcctgctcttcctgagcgccatccagctgacccacttccagaagctgtctgagcccctgaaccacagctaccaggccatcatcatgctgtggatgattgccaaccaggccaacctgtggctggccgcctgcctgagcctgctgtactgcagcaagctgatccgcttcagccacaccttcctgatctgcctggcctcctgggtgtccaggaagatcagccagatgctgctgggcatcatcctgtgcagctgcatctgcaccgtgctgtgtgtgtggtgcttcttcagccggccccacttcaccgtgaccaccgtgctcttcatgaacaacaacacccggctgaactggcagatcaaggacctgaacctcttctacagcttcctgttctgctacctgtggagcgtgccccccttcctgctcttcctggtgagcagcggcatgctgactgtgtccctgggccgccacatgaggaccatgaaggtgtacaccaggaacagccgggaccccagcctggaggcccacatcaaggccctgaagagcctggtgtccttcttctgcttcttcgtcatcagcagctgtgccgccttcatctctgtgcccctgctgatcctgtggagggacaagattggagtgatggtgtgtgtgggcatcatggccgcctgccccagcggccacgccgccatcctgatctctggaaatgccaagctgcggcgggctgtgatgaccatcctgctgtgggcccagagcagcctgaaggtgcgggctgaccacaaggctgacagcaggaccctgtgctag

SEQ ID NO: 172670 - DNA, 900 bp, synthetic construct
  misc_feature 1..900: note = Description of Artificial Sequence: Synthetic coding sequence
  source 1..900: mol_type = other DNA
atgctgcggctcttctacttcagcgccatcatcgccagcgtcatcctgaactttgtgggcatcatcatgaacctcttcatcaccgtggtgaactgcaagacctgggtgaagagccaccgcatcagcagcagtgaccgcatcctcttcagcctgggcatcacccgcttcctgatgctgggcctcttcctggtgaacaccatctactttgtgagcagcaacacagagaggtctgtgtacctgagcgccttctttgtgctgtgcttcatgttcctggacagcagctctgtgtggtttgtgaccctgctgaacatcctgtactgtgtgaagatcaccaacttccagcacagcgtcttcctgctgctgaagaggaacatcagccccaagatcccccggctgctgctggcctgtgtgctgatcagcgccttcaccacctgcctgtacatcaccctgagccaggccagccccttccctgagctggtgaccaccaggaacaacaccagcttcaacatcagcgagggcatcctgagcctggtggtgtccctggtgctgagcagcagcctgcagttcatcatcaacgtgaccagcgccagcctgctgatccacagcctgcggcggcacatccagaagatgcagaagaatgccaccggcttctggaacccccagacagaggcccacgtgggcgccatgaagctgatggtgtacttcctgatcctgtacatcccctacagcgtggccaccctggtgcagtacctgcccttctacgccggcatggacatgggcaccaagagcatctgcctgatctttgccaccctgtacagccctggccacagcgtgctgatcatcatcacccaccccaagctgaagaccacagccaagaagatcctgtgcttcaagaagtag

SEQ ID NO: 172671 - DNA, 972 bp, synthetic construct
  misc_feature 1..972: note = Description of Artificial Sequence: Synthetic coding sequence
  source 1..972: mol_type = other DNA
atggccaccgtgaacacagatgccacagacaaggacatcagcaagttcaaggtgaccttcaccctggtggtgtctggaattgagtgcatcaccggcatcctgggcagcggcttcatcacagccatctatggagctgagtgggcccggggcaagaccctgcccactggagaccgcatcatgctgatgctgtccttcagccggctgctgctgcagatctggatgatgctggagaacatcttcagcctgctcttccgcatcgtgtacaaccagaacagcgtgtacatcctcttcaaggtgatcaccgtcttcctgaaccacagcaacctgtggtttgctgcctggctgaaggtgttctactgcctgagaattgccaacttcaaccaccccctcttcttcctgatgaagaggaagatcatcgtgctgatgccctggctgctgcggctgtctgtgctggtgtccctgtccttctccttccccctgagcagagatgtgttcaacgtgtatgtgaacagcagcatccccatccccagcagcaacagcacagagaagaagtacttcagcgagaccaacatggtgaacctggtgttcttctacaacatgggcatctttgtgcccctcatcatgttcatcctggccgccaccctgctgatcctgagcctgaagaggcacaccctgcacatgggcagcaatgccaccggcagccgggaccccagcatgaaggcccacatcggggccatcaaggccaccagctacttcctgatcctgtacatcttcaatgccatcgccctcttcctgagcaccagcaacatctttgacacctacagctcctggaacatcctgtgcaagatcatcatggccgcctacccagctggccacagcgtgcagctgatcctgggcaaccctggcctgcggcgggcctggaagcgcttccagcaccaggtgcccctgtacctgaagggccagaccctgtag

SEQ ID NO: 172672 - DNA, 924 bp, synthetic construct
  misc_feature 1..924: note = Description of Artificial Sequence: Synthetic coding sequence
  source 1..924: mol_type = other DNA
atgcaggccgccctgacagccttctttgtgctgctcttcagcctgctgagcctgctgggcattgctgccaacggcttcatcgtgctggtgctgggccgggagtggctgcgctatggccgcctgctgcccctggacatgatcctgatcagcctgggcgccagccgcttctgcctgcagctggtgggcaccgtgcacaacttctactacagcgcccagaaggtggagtacagcggcggcctgggccggcagttcttccacctgcactggcacttcctgaacagcgccaccttctggttctgctcctggctgtctgtgctcttctgtgtgaagatcgccaacatcacccacagcaccttcctgtggctgaagtggaggtttcctggctgggtgccctggctgctgctgggctctgtgctgatctccttcatcatcaccctgctcttcttctgggtgaactaccctgtgtaccaggagttcctgatcaggaagttcagcggcaacatgacctacaagtggaacacccgcatcgagacctactacttccccagcctgaagctggtgatctggagcatccccttcagcgtcttcctggtgtccatcatgctgctgatcaacagcctgcggcggcacacccagaggatgcagcacaacggccacagcctgcaggaccccagcacccaggcccacacccgggccctgaagagcctcatctccttcctgatcctgtatgccctgtccttcctgagcctcatcattgatgctgccaagttcatctccatgcagaatgacttctactggccctggcagattgctgtgtacctgtgcatctctgtgcaccccttcatcctgatcttcagcaacctgaagctgcggagcgtcttcagccagctgctgctgctggcccggggcttctgggtggcctag

SEQ ID NO: 172673 - DNA, 945 bp, synthetic construct
  misc_feature 1..945: note = Description of Artificial Sequence: Synthetic coding sequence
  source 1..945: mol_type = other DNA
atggccacagagctggacaagatcttcctgatcctggccatcgccgagttcatcatctccatgctgggcaatgtgttcatcggcctggtgaactgcagcgagggcatcaagaaccagaaggtgttttctgctgacttcatcctgacctgcctggccatcagcaccatcggccagctgctggtgatcctgtttgacagcttcctggtgggcctggccagccacctgtacaccacctaccgcctgggcaagacagtcatcatgctgtggcacatgaccaaccacctgaccacctggctggccacctgcctgagcatcttctacttcttcaagatcgcccacttcccccacagcctcttcctgtggctgcgctggaggatgaatggcatgattgtgatgctgctgatcctgagcctcttcctgctgatctttgacagcctggtgctggagatcttcatcgacatcagcctgaacatcatcgacaagagcaacctgaccctgtacctggatgagagcaagaccctgtatgacaagctgagcatcctgaagaccctgctgagcctgaccagcttcatccccttcagcctcttcctgaccagcctgctcttcctgttcctgagcctggtgcgccacaccaggaacctgaagctgagcagcctgggcagccgggacagcagcacagaggcccaccggcgggccatgaagatggtgatgtccttcctgttcctgttcatcgtgcacttcttcagcctgcaggtggccaacggcatcttcttcatgctgtggaacaacaagtacatcaagtttgtgatgctggccctgaatgccttccccagctgccacagcttcatcctgatcctgggcaacagcaagctgcggcagacagctgtgcggctgctgtggcacctgaggaactacaccaagaccccaaatgccctgcccctgtag

SEQ ID NO: 172674 - DNA, 930 bp, synthetic construct
  misc_feature 1..930: note = Description of Artificial Sequence: Synthetic coding sequence
  source 1..930: mol_type = other DNA
atgatcaccttcctgcccatcatcttcagcagcctggtggtggtgacctttgtgattggcaactttgccaacggcttcatcgccctggtgaacagcattgagtggttcaagaggcagaagatcagctttgctgaccagatcctgacagccctggccgtgtcccgggtgggcctgctgtgggtgctgctgctgaactggtacagcacagtgctgaacccagccttcaacagcgtggaggtgaggaccacagcctacaacatctgggccgtcatcaaccacttcagcaactggctggccaccaccctgagcatcttctacctgctgaagatcgccaacttcagcaacttcatcttcctgcacctgaagagaagagtgaagagcgtcatcctggtgatgctgctgggccccctgctcttcctggcctgccacctgtttgtgatcaacatgaatgagatcgtgaggaccaaggagtttgagggcaacatgacctggaagatcaagctgaagagcgccatgtacttcagcaacatgacagtgaccatggtggccaacctggtgcccttcaccctgaccctgctgtccttcatgctgctgatctgcagcctgtgcaagcacctgaagaagatgcagctgcacggcaagggcagccaggaccccagcaccaaggtgcacatcaaggccctgcagaccgtcatctccttcctgctgctgtgtgccatctacttcctgagcatcatgatctctgtgtggagctttggcagcctggagaacaagcctgtgttcatgttctgcaaggccatccgcttctcctaccccagcatccaccccttcatcctgatctggggcaacaagaagctgaagcagaccttcctgagcgtcttctggcagatgagatactgggtgaagggggagaagaccagcagcccctag

SEQ ID NO: 172675 - DNA, 930 bp, synthetic construct
  misc_feature 1..930: note = Description of Artificial Sequence: Synthetic coding sequence
  source 1..930: mol_type = other DNA
atgatcaccttcctgcccatcatcttcagcatcctgattgtggtgacctttgtgattggcaactttgccaacggcttcatcgccctggtgaacagcattgagtggttcaagaggcagaagatcagctttgctgaccagatcctgacagccctggccgtgtcccgggtgggcctgctgtgggtgctggtgctgaactggtacgccacagagctgaacccagccttcaacagcattgaggtgcgcatcacagcctacaacgtgtgggccgtcatcaaccacttcagcaactggctggccaccagcctgagcatcttctacctgctgaagatcgccaacttcagcaacctgatcttcctgcacctgaagagaagagtgaagtctgtggtgctggtgatcctgctgggccccctgctcttcctggtgtgccacctgtttgtgatcaacatgaaccagatcatctggaccaaggagtatgagggcaacatgacctggaagatcaagctgcggagcgccatgtacctgagcaacaccaccgtgaccatcctggccaacctggtgcccttcaccctgaccctcatctccttcctgctgctgatctgcagcctgtgcaagcacctgaagaagatgcagctgcacggcaagggcagccaggaccccagcatgaaggtgcacatcaaggccctgcagacagtgaccagcttcctgctgctgtgtgccatctacttcctgagcatcatcatgtctgtgtggagctttgagagcctggagaacaagcctgtgttcatgttctgtgaggccatcgccttctcctaccccagcacccaccccttcatcctgatctggggcaacaagaagctgaagcagaccttcctgtctgtgctgtggcacgtgcgctactgggtgaagggggagaagcccagcagcagctag

SEQ ID NO: 172676 - DNA, 900 bp, synthetic construct
  misc_feature 1..900: note = Description of Artificial Sequence: Synthetic coding sequence
  source 1..900: mol_type = other DNA
atgctgtctgctggcctgggcctgctgatgctggtggccgtggtggagttcctgattggcctgattggaaatggcagcctggtggtgtggagcttccgggagtggatcaggaagttcaactggagcagctacaacctgatcatcctgggcctggccggctgccgcttcctgctgcagtggctgatcatcctggacctgagcctcttccccctcttccagagcagccgctggctgcgctacctgagcatcttctgggtgctggtgtcccaggccagcctgtggtttgccaccttcctgagcgtcttctactgcaagaagatcaccacctttgacaggcctgcctacctgtggctgaagcagagggcctacaacctgagcctgtggtgcctgctgggctacttcatcatcaacctgctgctgactgtgcagatcggcctgaccttctaccaccccccccagggcaacagcagcatccgctacccctttgagagctggcagtacctgtatgccttccagctgaacagcggcagctacctgcccctggtggtgttcctggtgagcagcggcatgctgattgtgtccctgtacacccaccacaagaagatgaaggtgcacagcgctggaagaagagatgtgcgggccaaggcccacatcacagccctgaagagcctgggctgcttcctgctgctgcacctggtgtacatcatggccagccccttcagcatcaccagcaagacctaccccccagacctgacctctgtgttcatctgggagaccctgatggccgcctaccccagcctgcacagcctcatcctgatcatgggcatcccccgggtgaagcagacctgccagaagatcctgtggaagacagtgtgtgcccggcgctgctggggcccctag

SEQ ID NO: 172677 - DNA, 900 bp, synthetic construct
  misc_feature 1..900: note = Description of Artificial Sequence: Synthetic coding sequence
  source 1..900: mol_type = other DNA
atgatcaccttcctgtacatcttcttcagcatcctgatcatggtgctgtttgtgctgggcaactttgccaacggcttcatcgccctggtgaacttcatcgactgggtgaagaggaagaagatcagcagcgctgaccagatcctgacagccctggccgtgagccgcatcggcctgctgtgggccctgctgctgaactggtacctgactgtgctgaacccagccttctacagcgtggagctgcgcatcaccagctacaatgcctgggtggtgaccaaccacttctccatgtggctggccgccaacctgagcatcttctacctgctgaagatcgccaacttcagcaacctgctcttcctgcacctgaagagaagagtgcgcagcgtcatcctggtgatcctgctgggcaccctcatcttcctggtgtgccacctgctggtggccaacatggatgagagcatgtgggccgaggagtatgagggcaacatgaccgggaagatgaagctgaggaacacagtgcacctgagctacctgactgtgaccaccctgtggagcttcatccccttcaccctgagcctcatctccttcctgatgctgatctgcagcctgtgcaagcacctgaagaagatgcagctgcacggggagggcagccaggacctgagcaccaaggtgcacatcaaggccctgcagaccctcatctccttcctgctgctgtgtgccatcttcttcctgttcctgattgtgtctgtgtggagcccccggcggctgagaaatgaccctgtggtgatggtgtccaaggctgtgggcaacatctacctggcctttgacagcttcatcctgatctggaggaccaagaagctgaagcacaccttcctgctgatcctgtgccagatccgctgctag

SEQ ID NO: 172678 - DNA, 957 bp, synthetic construct
  misc_feature 1..957: note = Description of Artificial Sequence: Synthetic coding sequence
  source 1..957: mol_type = other DNA
atgaatggagaccacatggtgctgggcagctctgtgacagacaagaaggccatcatcctggtgaccatcctgctgctgctgcggctggtggccatcgctggaaatggcttcatcacagctgccctgggcgtggagtgggtgctgcggaggatgctgctgccctgtgacaagctgctggtgtccctgggcgccagccgcttctgcctgcagagcgtggtgatgggcaagaccatctacgtgttcctgcaccccatggccttcccctacaaccctgtgctgcagttcctggccttccagtgggacttcctgaatgctgccaccctgtggagcagcacctggctgtctgtgttctactgtgtgaagatcgccaccttcacccaccctgtgttcttctggctgaagcacaagctgagcggctggctgccctggatgctgttcagctctgtgggcctgagcagcttcaccaccatcctcttcttcatcggcaaccacaggatgtaccagaactacctgaggaaccacctgcagccctggaatgtgactggagacagcatccgcagctactgtgagaagttctacctgttccccctgaagatgatcacctggaccatgcccacagctgtgttcttcatctgcatgatcctgctgatcaccagcctgggccgccacaggaagaaggccctgctgaccaccagcggcttccgggagcccagcgtgcaggcccacatcaaggccctgctggccctgctgagctttgccatgctgttcatctcctacttcctgagcctggtgttttctgctgctggcatcttcccccccctggacttcaagttctgggtgtgggagagcgtcatctacctgtgtgccgctgtgcaccccatcatcctgctcttcagcaactgccgcctgcgggctgtgctgaagagccgccgcagcagccgctgtggcaccccctag

SEQ ID NO: 172679 - DNA, 1314 bp, synthetic construct
  misc_feature 1..1314: note = Description of Artificial Sequence: Synthetic coding sequence
  source 1..1314: mol_type = other DNA
atgcccaagttcaaggccgcccggggcgtgggcggccaggagaagcacgcccccctggccgaccagatcctggccggaaatgctgtgcgggccggcgtgcgggagaagagaagaggccggggcaccggggaggccgaggaggagtatgtgggcccccggctgagccgccgcatcctgcagcaggcccggcagcagcaggaggagctggaggccgagcacggcactggagacaagccagctgccccccgggagaggaccacccggctgggccccaggatgccccaggacggcagtgatgatgaagatgaggagtggcccaccctggagaaggccgccaccatgacagctgctggccaccacgccgaggtggtggtggaccctgaagatgagcgggccatcgagatgttcatgaacaagaaccccccagcccggaggaccctggccgacatcatcatggagaagctgacagagaagcagacagaggtggagaccgtgatgtctgaggtgtctggcttccccatgccccagctggacccccgggtgctggaggtgtacagaggagtgcgggaggtgctgagcaagtacagaagtggcaagctgcccaaggccttcaagatcatcccagccctgagcaactgggagcagatcctgtatgtgacagagcctgaggcctggacagctgctgccatgtaccaggccacccgcatctttgccagcaacctgaaggagaggatggcccagcgcttctacaacctggtgctgctgccccgggtgagagatgatgtggccgagtacaagaggctgaacttccacctgtacatggccctgaagaaggccctcttcaagccaggggcctggttcaagggcatcctgatccccctgtgtgagagcggcacctgcaccctgcgggaggccatcatcgtgggcagcatcatcaccaagtgcagcatccctgtgctgcacagcagcgctgccatgctgaagattgctgagatggagtacagcggggccaacagcatcttcctgcggctgctgctggacaagaagtatgccctgccctacagagtgctggatgccctggtgttccacttcctgggcttcagaacagagaagcgggagctgcctgtgctgtggcaccagtgcctgctgaccctggtgcagcgctacaaggctgacctggccacagaccagaaggaggccctgctggagctgctgcggctgcagccccacccccagctgagccctgagatccggcgggagctgcagagcgctgtgcccagagatgtggaggatgtgcccatcaccgtggagtag

SEQ ID NO: 172680 - DNA, 951 bp, synthetic construct
  misc_feature 1..951: note = Description of Artificial Sequence: Synthetic coding sequence
  source 1..951: mol_type = other DNA
atggaccagaacaacagcctgcccccctatgcccagggcctggccagcccccagggcgccatgaccccaggcatccccatcttcagccccatgatgccctacggcaccggcctgaccccccagcccatccagaacaccaacagcctgagcatcctggaggagcagcagaggcagcagcagcagcagcagcagcagcagcagcagcagcagcagcaggccgtggccgctgctgctgtgcagcagagcaccagccagcaggccacccagggcaccagcggccaggccccccagctgttccacagccagaccctgaccacagcccccctgcccggcaccacccccctgtaccccagccccatgacccccatgacccccatcaccccagccaccccagccagcgagagcagcggcatcgtgccccagctgcagaacatcgtgtccacagtgaacctgggctgcaagctggacctgaagaccatcgccctgcgggccagaaatgctgagtacaaccccaagagatttgctgctgtgatcatgaggatccgggagcccaggaccacagccctgatcttcagcagcggcaagatggtgtgcacaggagccaagtctgaggagcagagccggctggccgccaggaaatatgcccgggtggtgcagaagctgggcttccctgccaagttcctggacttcaagatccagaacatggtgggcagctgtgatgtgaagttccccatccggctggagggcctggtgctgacccaccagcagttcagcagctatgagcctgagctgtttcctggcctcatctacaggatgatcaagcccagaattgtgctgctgatctttgtgtctgggaaggtggtgctgaccggggccaaggtgcgggcagagatctatgaggcctttgagaacatctaccccatcctgaagggcttcaggaagaccacctag

SEQ ID NO: 172681 - DNA, 1020 bp, synthetic construct; identical to SEQ ID NO: 154797
  misc_feature 1..1020: note = Description of Artificial Sequence: Synthetic coding sequence
  source 1..1020: mol_type = other DNA

SEQ ID NO: 172682 - DNA, 627 bp, synthetic construct
  misc_feature 1..627: note = Description of Artificial Sequence: Synthetic coding sequence
  source 1..627: mol_type = other DNA
atggaccagaacaacagcctgcccccctatgcccagggcctggccagcccccagggcgccatgaccccaggcatccccatcttcagccccatgatgccctacggcaccggcctgaccccccagcccatccagaacaccaacagcctgagcatcctggaggagcagcagaggcagcagcagcagcagcagcagcagcagcagcagcagcagcagcagcagcagcagcagcagcagcagcagcagcagcagcagcagcagcagcagcagcagcagcagcagcagcaggccgtggccgctgctgctgtgcagcagagcaccagccagcaggccacccagggcaccagcggccaggccccccagctgttccacagccagaccctgaccacagcccccctgcccggcaccacccccctgtaccccagccccatgacccccatgacccccatcaccccagccaccccagccagcgagagcagcggcatcgtgccccagctgcagaacatcgtgtccacagtgaacctgggctgcaagctggacctgaagaccatcgccctgcgggccagaaatgctgagtacaaccccaagagatttgctgctgtgatcatgaggatccgggagcccaggtag

SEQ ID NO: 172683 - DNA, 456 bp, synthetic construct
  misc_feature 1..456: note = Description of Artificial Sequence: Synthetic coding sequence
  source 1..456: mol_type = other DNA
atggaccagaacaacagcctgcccccctatgcccagggcctggccagcccccagggcgccatgaccccaggcatccccatcttcagccccatgatgccctacggcaccggcctgaccccccagcccatccagaacaccaacagcctgagcatcctggaggagcagcagaggcagcagcagcagcagcagcagcagcagcagcagcagcagcagcagcagcagcagcagcagcagcagcagcagcagcagcagcagcagcagcagcagcagcagcagcagcagcaggccgtggccgctgctgctgtgcagcagagcaccagccagcaggccacccagggcaccagcggccaggccccccagctgttccacagccagaccctgaccacagcccccctgcccggcaccacccccctgtaccccagccccatgacccccatgacccccatcaccccctag

SEQ ID NO: 172684 - DNA, 306 bp, synthetic construct
  misc_feature 1..306: note = Description of Artificial Sequence: Synthetic coding sequence
  source 1..306: mol_type = other DNA
tgagaagagcagagccggctggccgccaggaaatatgcccgggtggtgcagaagctgggcttccctgccaagttcctggacttcaagatccagaacatggtgggcagctgtgatgtgaagttccccatctcctatgagcctgagctgtttcctggcctcatctacaggatgatcaagccccgcatcgtgctgctgatctttgtgtctgggaaggtggtgctgactggagccaaggtgcgggcagagatctatgaggcctttgagaacatctaccccatcctgaagggcttcaggaagaccacctag

SEQ ID NO: 172685 - DNA, 960 bp, synthetic construct
  misc_feature 1..960: note = Description of Artificial Sequence: Synthetic coding sequence
  source 1..960: mol_type = other DNA
atgaccccaggcatccccatcttcagccccatgatgccctacggcaccggcctgaccccccagcccatccagaacaccaacagcctgagcatcctggaggagcagcagaggcagcagcagcagcagcagcagcagcagcagcagcagcagcagcagcagcagcagcagcagcagcagcagcagcagcagcagcagcagcagcagcagcagcagcagcagcagcaggccgtggccgctgctgctgtgcagcagagcaccagccagcaggccacccagggcaccagcggccaggccccccagctgttccacagccagaccctgaccacagcccccctgcccggcaccacccccctgtaccccagccccatgacccccatgacccccatcaccccagccaccccagccagcgagagcagcggcatcgtgccccagctgcagaacatcgtgtccacagtgaacctgggctgcaagctggacctgaagaccatcgccctgcgggccagaaatgctgagtacaaccccaagagatttgctgctgtgatcatgaggatccgggagcccaggaccacagccctgatcttcagcagcggcaagatggtgtgcaccggggccaagtctgaggagcagagccggctggccgccaggaaatatgcccgggtggtgcagaagctgggcttccctgccaagttcctggacttcaagatccagaacatggtgggcagctgtgatgtgaagttccccatccggctggagggcctggtgctgacccaccagcagttcagcagctatgagcctgagctgtttcctggcctcatctacaggatgatcaagccccgcatcgtgctgctgatctttgtgtctgggaaggtggtgctgactggagccaaggtgcgggcagagatctatgaggcctttgagaacatctaccccatcctgaagggcttcaggaagaccacctag

SEQ ID NO: 172686 - DNA, 2610 bp, synthetic construct
  misc_feature 1..2610: note = Description of Artificial Sequence: Synthetic coding sequence
  source 1..2610: mol_type = other DNA
atggacttccccagcagcctgcggcctgccctcttcctgaccggccccctgggcctgagtgatgtgcctgacctgtccttcatgtgctcctggagagatgccctgaccctgcctgaggcccagccccagaacagtgaaaatggagccctgcacgtgaccaaggacctgctgtgggagcccgccaccccaggccccctgcccatgctgccccccctgattgacccctgggaccccggcctgacagcccgggacctgctcttccggggcggctgccgctacaggaagaggccccgggtggtgctggatgtgacagagcagatcagccgcttcctgctggaccatggagatgtggcctttgcccccctgggcaagctgatgctggagaacttcaagctggagggcgccggcagcaggaccaagaagaagacagtggtgtctgtgaagaagctgctgcaggacctgggcggccaccagccctggggctgcccctgggcctacctgagcaaccggcagaggcgcttcagcatcctgggcggccccatcctgggcacctctgtggccagccacctggccgagctgctgcacgaggagctggtgctgcgctgggagcagctgctgctggatgaggcctgcaccggcggggccctggcctgggtgcccggccgcaccccccagtttggccagctggtgtacccagctggaggagcccaggaccggctgcacttccaggaggtggtgctgacccctggggacaacccccagttcctgggcaagccaggccgcatccagctgcagggccctgtgcggcaggtggtgacctgcaccgtgcagggcgagagcaaggccctgatctacaccttcctgccccactggctgacctgctacctgaccccaggccccttccaccccagcagcgccctgctggccgtgcggagtgactaccactgtgctgtgtggaagtttgggaagcagtggcagcccaccctgctgcaggccatgcaggtggagaagggggccaccggcatcagcctgagcccccacctgcctggagagctggccatctgcagccgcagcggggctgtgtgcctgtggagcccagaagatggcctgcggcagatctacagagatcctgagaccctggtgttccgggacagcagctcctggcgctgggccgacttcaccgcccacccccgggtgctgactgtgggggacagaactggagtgaagatgctggacacccagggccccccaggctgcggcctgctgctcttccggctgggcgctgaggccagctgccagaagggggagcgggtgctgctgacccagtacctgggccacagcagccccaagtgcctgccccccaccctgcacctggtgtgcacccagttcagcctgtacctggtggatgagcggctgcccctggtgcccatgctgaagtggaaccacggcctgcccagccccctgctgctggcccggctgctgcccccaccccggcccagctgtgtgcagcccctgctgctgggcggccagggcggccagctgcagctgctgcacctggccggggagggcgcctctgtgccccggctggccggccccccccagagcctgcccagcagaattgacagcctgcctgccttccccctgctggagcccaagatccagtggaggctgcaggagcggctgaaggcccccaccatcggcctggccgctgtggtgccccccctgcccagcgcccccaccccaggcctggtgctcttccagctgtctgctgctggagatgtgttctaccagcagctgcggccccaggtggacagcagcctgcggagagatgctggccccccaggggacacccagcctgactgccacgcccccacagcctcctggaccagccaggacacagctggctgcagccagtggctgaaggccctgctgaaggtgcccctggcccctcctgtgtggacagcccccaccttcacccaccggcagatgctgggcagcacagagctgcggcgggaggaggaggagggccagaggctgggcgtgctgaggaaggccatggcccggggccagctgctgctgcagagggacctgggcagcctgcctgctgctgagcccccaccagcccctgagagcggcctggaggacaagctgtctgagcggctgggggaggcctgggccggccgcggggccgcctggtgggagcggcagcagggccgcaccagcgagcccggccggcagacccggcggcccaagaggaggacccagctgagcagcagcttcagcctgagcggccacgtggaccccagcgaggacaccagcagcccccacagccctgagtggcccccagcagatgccctgcccctgccccccaccaccccacccagccaggagctgaccccagatgcctgtgcccagggcgtgcccagcgagcagaggcagatgctgcgggactacatggccaagctgcccccccagagggacaccccaggctgtgccaccaccccaccccacagccaggccagctctgtgcgggccaccaggagccagcagcacacccctgtgctgagcagcagccagcccctgaggaagaagcccaggatgggcttctag

SEQ ID NO: 172687 - DNA, 1353 bp, synthetic construct
  misc_feature 1..1353: note = Description of Artificial Sequence: Synthetic coding sequence
  source 1..1353: mol_type = other DNA
atgtctgacttcagcgaggagctgaagggccctgtgacagatgatgaggaggtggagacctctgtgctgagcggggccggcatgcacttcccctggctgcagacctacgtggagaccgtggccatcggcggcaagaggaggaaggactttgcccagaccaccagcgcctgcctgtccttcatccaggaggccctgctgaagcaccagtggcagcaggccgctgagtacatgtacagctacttccagaccctggaggacagcgacagctacaagaggcaggccgcccctgagatcatctggaagctgggcagcgagatcctcttctaccaccccaagagcaacatggagagcttcaacacctttgccaacaggatgaagaacatcggcgtgatgaactacctgaagatcagcctgcagcacgccctgtacctgctgcaccacggcatgctgaaggatgccaagaggaacctgtctgaggccgagacctggaggcatggagagaacaccagcagccgggagatcctgatcaacctgatccaggcctacaagggcctgctgcagtactacacctggagcgagaagaagatggagctgagcaagctggacaaggatgattatgcctacaatgctgtggcccaggatgtgttcaaccacagctggaagaccagcgccaacatcagcgccctgatcaagatccctggggtgtgggacccctttgtgaagagctatgtggagatgctggagttctacggggacagagatggagcccaggaggtgctgaccaactatgcctatgatgagaagttccccagcaaccccaatgcccacatctacctgtacaacttcctgaagaggcagaaggcccccaggagcaagctgatctctgtgctgaagatcctgtaccagatcgtgcccagccacaagctgatgctggagttccacaccctgctgaggaagtctgagaaggaggagcacaggaagctgggcctggaggtgctgtttggagtgctggactttgctggctgcaccaagaacatcacagcctggaagtacctggccaagtacctgaagaacatcctgatgggcaaccacctggcctgggtgcaggaggagtggaacagcaggaagaactggtggccaggcttccacttctcctacttctgggccaagagtgactggaaggaggacacagccctggcctgtgagaaggcctttgtggccggcctgctgctgggcaagggctgccgctacttccgctacatcctgaagcaggaccaccagatcctgggcaagaagatcaagaggatgaagaggtctgtgaagaagtacagcatcgtgaacccccggctgtag

SEQ ID NO: 172688 - DNA, 1353 bp, synthetic construct; identical to SEQ ID NO: 172687
  misc_feature 1..1353: note = Description of Artificial Sequence: Synthetic coding sequence
  source 1..1353: mol_type = other DNA

SEQ ID NO: 172689 - DNA, 1011 bp, synthetic construct
  misc_feature 1..1011: note = Description of Artificial Sequence: Synthetic coding sequence
  source 1..1011: mol_type = other DNA
atggagagcttcaacacctttgccaacaggatgaagaacatcggcgtgatgaactacctgaagatcagcctgcagcacgccctgtacctgctgcaccacggcatgctgaaggatgccaagaggaacctgtctgaggccgagacctggaggcatggagagaacaccagcagccgggagatcctgatcaacctgatccaggcctacaagggcctgctgcagtactacacctggagcgagaagaagatggagctgagcaagctggacaaggatgattatgcctacaatgctgtggcccaggatgtgttcaaccacagctggaagaccagcgccaacatcagcgccctgatcaagatccctggggtgtgggacccctttgtgaagagctatgtggagatgctggagttctacggggacagagatggagcccaggaggtgctgaccaactatgcctatgatgagaagttccccagcaaccccaatgcccacatctacctgtacaacttcctgaagaggcagaaggcccccaggagcaagctgatctctgtgctgaagatcctgtaccagatcgtgcccagccacaagctgatgctggagttccacaccctgctgaggaagtctgagaaggaggagcacaggaagctgggcctggaggtgctgtttggagtgctggactttgctggctgcaccaagaacatcacagcctggaagtacctggccaagtacctgaagaacatcctgatgggcaaccacctggcctgggtgcaggaggagtggaacagcaggaagaactggtggccaggcttccacttctcctacttctgggccaagagtgactggaaggaggacacagccctggcctgtgagaaggcctttgtggccggcctgctgctgggcaagggctgccgctacttccgctacatcctgaagcaggaccaccagatcctgggcaagaagatcaagaggatgaagaggtctgtgaagaagtacagcatcgtgaacccccggctgtag

SEQ ID NO: 172690 - DNA, 1011 bp, synthetic construct; identical to SEQ ID NO: 172689
  misc_feature 1..1011: note = Description of Artificial Sequence: Synthetic coding sequence
  source 1..1011: mol_type = other DNA

SEQ ID NO: 172691 - DNA, 861 bp, synthetic construct
  misc_feature 1..861: note = Description of Artificial Sequence: Synthetic coding sequence
  source 1..861: mol_type = other DNA
atgtctgacttcagcgaggagctgaagggccctgtgacagatgatgaggaggtggagacctctgtgctgagcggggccggcatgcacttcccctggctgcagacctacgtggagaccgtggccatcggcggcaagaggaggaaggactttgcccagaccaccagcgcctgcctgtccttcatccaggaggccctgctgaagcaccagtggcagcaggccgctgagtacatgtacagctacttccagaccctggaggacagcgacagctacaagaggcaggccgcccctgagatcagcctgcagcacgccctgtacctgctgcaccacggcatgctgaaggatgccaagaggaacctgtctgaggccgagacctggaggcatggagagaacaccagcagccgggagatcctgatcaacctgatccaggcctacaagggcctgctgcagtactacacctggagcgagaagaagatggagctgagcaagctggacaaggatgattatgcctacaatgctgtggcccaggatgtgttcaaccacagctggaagaccagcgccaacatcagcgccctgatcaagatccctggggtgtgggacccctttgtgaagagctatgtggagatgctggagttctacggggacagagatggagcccaggaggtgctgaccaactatgcctatgatgagaagttccccagcaaccccaatgcccacatctacctgtacaacttcctgaagaggcagaaggcccccaggagcaagctgatctctgtgctgaagatcctgtaccagatcgtgcccagccacaagctgatgctggagttccacaccctgctgaggaagtctgagaaggaggagtag

SEQ ID NO: 172692 - DNA, 849 bp, synthetic construct
  misc_feature 1..849: note = Description of Artificial Sequence: Synthetic coding sequence
  source 1..849: mol_type = other DNA
atgtctgacttcagcgaggagctgaagggccctgtgacagatgatgaggaggtggagacctctgtgctgagcggggccggcatgcacttcccctggctgcagacctacgtggagaccgtggccatcggcggcaagaggaggaaggactttgcccagaccaccagcgcctgcctgtccttcatccaggaggccctgctgaagcaccagtggcagcaggccgctgagtacatgtacagctacttccagaccctggaggacagcgacagctacaagaggcaggccgcccctgagatcagcctgcagcacgccctgtacctgctgcaccacggcatgctgaaggatgccaagaggaacctgtctgaggccgagacctggaggcatggagagaacaccagcagccgggagatcctgatcaacctgatccaggcctacaagggcctgctgcagtactacacctggagcgagaagaagatggagctgagcaagctggacaaggatgattatgcctacaatgctgtggcccaggatgtgttcaaccacagctggaagaccagcgccaacatcagcgccctgatcaagatccctggggtgtgggacccctttgtgaagagctatgtggagatgctggagttctacggggacagagatggagcccaggaggtgctgaccaactatgcctatgatgagaagttccccagcaaccccaatgcccacatctacctgtacaacttcctgaagaggcagaaggcccccaggagcaagctgatctctgtgctgaagatcctgtaccagatcgtgcccagccacaagctgatgctggagttccacaccctgctgaggaagagctag

SEQ ID NO: 172693 - DNA, 936 bp, synthetic construct
  misc_feature 1..936: note = Description of Artificial Sequence: Synthetic coding sequence
  source 1..936: mol_type = other DNA
atgtctgacttcagcgaggagctgaagggccctgtgacagatgatgaggaggtggagacctctgtgctgagcggggccggcatgcacttcccctggctgcagacctacgtggagaccgtggccatcggcggcaagaggaggaaggactttgcccagaccaccagcgcctgcctgtccttcatccaggaggccctgctgaagcaccagtggcagcaggccgctgagtacatgtacagctacttccagaccctggaggacagcgacagctacaagaggcaggccgcccctgagatcatctggaagctgggcagcgagatcctcttctaccaccccaagagcaacatggagagcttcaacacctttgccaacaggatgaagaacatcggcgtgatgaactacctgaagatcagcctgcagcacgccctgtacctgctgcaccacggcatgctgaaggatgccaagaggaacctgtctgaggccgagacctggaggcatggagagaacaccagcagccgggagatcctgatcaacctgatccaggcctacaagggcctgctgcagtactacacctggagcgagaagaagatggagctgagcaagctggacaaggatgattatgcctacaatgctgtggcccaggatgtgttcaaccacagctggaagaccagcgccaacatcagcgccctgatcaagatccctggggtgtgggacccctttgtgaagagctatgtggagatgctggagttctacggggacagagatggagcccaggaggtgctgaccaactatgcctatgatgagaagttccccagcaaccccaatgcccacatctacctgtacaacttcctgaagaggcagaaggcccccaggagcaagctgatctctgtgctgaagcacctgcagaagatcagcatcatgtacagcaccctgaggtag

SEQ ID NO: 172694 - DNA, 2328 bp, synthetic construct
  misc_feature 1..2328: note = Description of Artificial Sequence: Synthetic coding sequence
  source 1..2328: mol_type = other DNA
atgctgccccccctgattgacccctgggaccccggcctgacagcccgggacctgctcttccggggcggctgccgctacaggaagaggccccgggtggtgctggatgtgacagagcagatcagccgcttcctgctggaccatggagatgtggcctttgcccccctgggcaagctgatgctggagaacttcaagctggagggcgccggcagcaggaccaagaagaagacagtggtgtctgtgaagaagctgctgcaggacctgggcggccaccagccctggggctgcccctgggcctacctgagcaaccggcagaggcgcttcagcatcctgggcggccccatcctgggcacctctgtggccagccacctggccgagctgctgcacgaggagctggtgctgcgctgggagcagctgctgctggatgaggcctgcacaggaggagccctggcctgggtgcccggccgcaccccccagtttggccagctggtgtacccagctgggggcgcccaggaccggctgcacttccaggaggtggtgctgacccctggggacaacccccagttcctgggcaagccaggccgcatccagctgcagggccctgtgcggcaggtggtgacctgcaccgtgcagggcgagaccctgctggccgtgcggagtgactaccactgtgctgtgtggaagtttgggaagcagtggcagcccaccctgctgcaggccatgcaggtggagaagggggccaccggcatcagcctgagcccccacctgcccggggagctggccatctgcagccgctctggagctgtgtgcctgtggagcccagaagatggcctgcggcagatctacagagatcctgagaccctggtgttccgggacagcagctcctggcgctgggccgacttcaccgcccacccccgggtgctgactgtgggggacagaactggagtgaagatgctggacacccagggccccccaggctgcggcctgctgctcttccggctgggcgctgaggccagctgccagaagggggagcgggtgctgctgacccagtacctgggccacagcagccccaagtgcctgccccccaccctgcacctggtgtgcacccagttcagcctgtacctggtggatgagcggctgcccctggtgcccatgctgaagtggaaccacggcctgcccagccccctgctgctggcccggctgctgcccccaccccggcccagctgtgtgcagcccctgctgctgggcggccagggcggccagctgcagctgctgcacctggccgagggcgcctctgtgccccggctggccggccccccccagagcctgcccagcagaattgacagcctgcctgccttccccctgctggagcccaagatccagtggaggctgcaggagcggctgaaggcccccaccatcggcctggccgctgtggtgccccccctgcccagcgcccccaccccaggcctggtgctcttccagctgtctgctgctggagatgtgttctaccagcagctgcggccccaggtggacagcagcctgcggagagatgctggccccccaggggacacccagcctgactgccacgcccccacagcctcctggaccagccaggacacagctggctgcagccagtggctgaaggccctgctgaaggtgcccctggcccctcctgtgtggacagcccccaccttcacccaccggcagatgctgggcagcacagagctgcggcgggaggaggaggagggccagaggctgggcgtgctgaggaaggccatggcccggggccagctgctgctgcagagggacctgggcagcctgcctgctgctgagcccccaccagcccctgagagcggcctggaggacaagctgtctgagcggctgggggaggcctgggccggccgcggggccgcctggtgggagcggcagcagggccgcaccagcgagcccggccggcagacccggcggcccaagaggaggacccagctgagcagcagcttcagcctgagcggccacgtggaccccagcgaggacaccagcagcccccacagccctgagtggcccccagcagatgccctgcccctgccccccaccaccccacccagccaggagctgaccccagatgcctgtgcccagggcgtgcccagcgagcagaggcagatgctgcgggactacatggccaagctgcccccccagagggacaccccaggctgtgccaccaccccaccccacagccaggccagctctgtgcgggccaccaggagccagcagcacacccctgtgctgagcagcagccagcccctgaggaagaagcccaggatgggcttctag

SEQ ID NO: 172695 - DNA, 2610 bp, synthetic construct; identical to SEQ ID NO: 172686
  misc_feature 1..2610: note = Description of Artificial Sequence: Synthetic coding sequence
  source 1..2610: mol_type = other DNA

SEQ ID NO: 172696 - DNA, 1047 bp, synthetic construct
  misc_feature 1..1047: note = Description of Artificial Sequence: Synthetic coding sequence
  source 1..1047: mol_type = other DNA
atggacttccccagcagcctgcggcctgccctcttcctgaccggccccctgggcctgagtgatgtgcctgacctgtccttcatgtgctcctggagagatgccctgaccctgcctgaggcccagccccagaacagtgaaaatggagccctgcacgtgaccaaggacctgctgtgggagcccgccaccccaggccccctgcccatgctgccccccctgattgacccctgggaccccggcctgacagcccgggacctgctcttccggggcggctgccgctacaggaagaggccccgggtggtgctggatgtgacagagcagatcagccgcttcctgctggaccatggagatgtggcctttgcccccctgggcaagctgatgctggagaacttcaagctggagggcgccggcagcaggaccaagaagaagacagtggtgtctgtgaagaagctgctgcaggacctgggcggccaccagccctggggctgcccctgggcctacctgagcaaccggcagaggcgcttcagcatcctgggcggccccatcctgggcacctctgtggccagccacctggccgagctgctgcacgaggagctggtgctgcgctgggagcagctgctgctggatgaggcctgcaccggcggggccctggcctgggtgcccggccgcaccccccagtttggccagctggtgtacccagctggaggagcccaggaccggctgcacttccaggaggtggtgctgacccctggggacaacccccagttcctgggcaagccaggccgcatccagctgcagggccctgtgcggcaggtggtgacctgcaccgtgcagggcgagaccctgctggccgtgcggagtgactaccactgtgctgtgtggaagtttgggaagcagtggcagcccaccctgctgcaggccatgcaggtggagaagggggccaccggcatcagcctgagcccccacctgcctggagagctggccatctgcagccgcagcggggctgtgtgcctgtggagcccagaagatggctaccgccgcttcctgtag

SEQ ID NO: 172697 - DNA, 2331 bp, synthetic construct
  misc_feature 1..2331: note = Description of Artificial Sequence: Synthetic coding sequence
  source 1..2331: mol_type = other DNA
atgctgccccccctgattgacccctgggaccccggcctgacagcccgggacctgctcttccggggcggctgccgctacaggaagaggccccgggtggtgctggatgtgacagagcagatcagccgcttcctgctggaccatggagatgtggcctttgcccccctgggcaagctgatgctggagaacttcaagctggagggcgccggcagcaggaccaagaagaagacagtggtgtctgtgaagaagctgctgcaggacctgggcggccaccagccctggggctgcccctgggcctacctgagcaaccggcagaggcgcttcagcatcctgggcggccccatcctgggcacctctgtggccagccacctggccgagctgctgcacgaggagctggtgctgcgctgggagcagctgctgctggatgaggcctgcacaggaggagccctggcctgggtgcccggccgcaccccccagtttggccagctggtgtacccagctgggggcgcccaggaccggctgcacttccaggaggtggtgctgacccctggggacaacccccagttcctgggcaagccaggccgcatccagctgcagggccctgtgcggcaggtggtgacctgcaccgtgcagggcgagaccctgctggccgtgcggagtgactaccactgtgctgtgtggaagtttgggaagcagtggcagcccaccctgctgcaggccatgcaggtggagaagggggccaccggcatcagcctgagcccccacctgcccggggagctggccatctgcagccgctctggagctgtgtgcctgtggagcccagaagatggcctgcggcagatctacagagatcctgagaccctggtgttccgggacagcagctcctggcgctgggccgacttcaccgcccacccccgggtgctgactgtgggggacagaactggagtgaagatgctggacacccagggccccccaggctgcggcctgctgctcttccggctgggcgctgaggccagctgccagaagggggagcgggtgctgctgacccagtacctgggccacagcagccccaagtgcctgccccccaccctgcacctggtgtgcacccagttcagcctgtacctggtggatgagcggctgcccctggtgcccatgctgaagtggaaccacggcctgcccagccccctgctgctggcccggctgctgcccccaccccggcccagctgtgtgcagcccctgctgctgggcggccagggcggccagctgcagctgctgcacctggccggggagggcgcctctgtgccccggctggccggccccccccagagcctgcccagcagaattgacagcctgcctgccttccccctgctggagcccaagatccagtggaggctgcaggagcggctgaaggcccccaccatcggcctggccgctgtggtgccccccctgcccagcgcccccaccccaggcctggtgctcttccagctgtctgctgctggagatgtgttctaccagcagctgcggccccaggtggacagcagcctgcggagagatgctggccccccaggggacacccagcctgactgccacgcccccacagcctcctggaccagccaggacacagctggctgcagccagtggctgaaggccctgctgaaggtgcccctggcccctcctgtgtggacagcccccaccttcacccaccggcagatgctgggcagcacagagctgcggcgggaggaggaggagggccagaggctgggcgtgctgaggaaggccatggcccggggccagctgctgctgcagagggacctgggcagcctgcctgctgctgagcccccaccagcccctgagagcggcctggaggacaagctgtctgagcggctgggggaggcctgggccggcagaggagctgcctggtgggagcggcagcagggccgcaccagcgagcccggccggcagacccggcggcccaagaggaggacccagctgagcagcagcttcagcctgagcggccacgtggaccccagcgaggacaccagcagcccccacagccctgagtggcccccagcagatgccctgcccctgccccccaccaccccacccagccaggagctgaccccagatgcctgtgcccagggcgtgcccagcgagcagaggcagatgctgcgggactacatggccaagctgcccccccagagggacaccccaggctgtgccaccaccccaccccacagccaggccagctctgtgcgggccaccaggagccagcagcacacccctgtgctgagcagcagccagcccctgaggaagaagcccaggatgggcttctag

SEQ ID NO: 172698 - DNA, 1179 bp, synthetic construct
  misc_feature 1..1179: note = Description of Artificial Sequence: Synthetic coding sequence
  source 1..1179: mol_type = other DNA
atgctgaagtggaaccacggcctgcccagccccctgctgctggcccggctgctgcccccaccccggcccagctgtgtgcagcccctgctgctgggcggccagggcggccagctgcagctgctgcacctggccgagggcgcctctgtgccccggctggccggccccccccagagcctgcccagcagaattgacagcctgcctgccttccccctgctggagcccaagatccagtggaggctgcaggagcggctgaaggcccccaccatcggcctggccgctgtggtgccccccctgcccagcgcccccaccccaggcctggtgctcttccagctgtctgctgctggagatgtgttctaccagcagctgcggccccaggtggacagcagcctgcggagagatgctggccccccaggggacacccagcctgactgccacgcccccacagcctcctggaccagccaggacacagctggctgcagccagtggctgaaggccctgctgaaggtgcccctggcccctcctgtgtggacagcccccaccttcacccaccggcagatgctgggcagcacagagctgcggcgggaggaggaggagggccagaggctgggcgtgctgaggaaggccatggcccggggccagctgctgctgcagagggacctgggcagcctgcctgctgctgagcccccaccagcccctgagagcggcctggaggacaagctgtctgagcggctgggggaggcctgggccggcagaggagctgcctggtgggagcggcagcagggccgcaccagcgagcccggccggcagacccggcggcccaagaggaggacccagctgagcagcagcttcagcctgagcggccacgtggaccccagcgaggacaccagcagcccccacagccctgagtggcccccagcagatgccctgcccctgccccccaccaccccacccagccaggagctgaccccagatgcctgtgcccagggcgtgcccagcgagcagaggcagatgctgcgggactacatggccaagctgcccccccagagggacaccccaggctgtgccaccaccccaccccacagccaggccagctctgtgcgggccaccaggagccagcagcacacccctgtgctgagcagcagccagcccctgaggaagaagcccaggatgggcttctag

SEQ ID NO: 172699 - DNA, 837 bp, synthetic construct
  misc_feature 1..837: note = Description of Artificial Sequence: Synthetic coding sequence
  source 1..837: mol_type = other DNA
atggacaagagcggcatcgacagcctggaccacgtgaccagtgatgctgtggagctggccaacagaagtgacaacagcagtgacagcagcctcttcaagacccagtgcatcccctacagccccaagggggagaagaggaaccccatcaggaagtttgtgaggaccccagagagcgtgcacgccagtgacagcagcagtgacagcagctttgagcccatccccctgaccatcaaggccatctttgagcgcttcaagaacaggaagaagcgctacaagaagaagaagaagaggcgctaccagcccaccggccggccccggggccggcctgagggcagaagaaaccccatctacagcctgattgacaagaagaagcagttccgcagccggggcagcggcttccccttcctggagagtgaaaatgagaagaatgccccctggaggaagatcctgacctttgagcaggccgtggcccggggcttcttcaactacatcgagaagctgaagtatgagcaccacctgaaggagagcctgaagcagatgaatgtgggggaggacctggagaatgaagattttgacagccgccgctacaagttcctggatgatgatggcagcatcagccccatcgaggagagcacagcagaagatgaagatgccacccacctggaggacaatgaatgtgacatcaagctggccggggacagcttcatcgtgtcctctgagttccctgtgcggctgtctgtgtacctggaggaggaggacatcacagaggaggccgccctgagcaagaagagggccaccaaggccaagaacacaggccagaggggcctgaagatgtag

SEQ ID NO: 172700 - DNA, 837 bp, synthetic construct; identical to SEQ ID NO: 172699
  misc_feature 1..837: note = Description of Artificial Sequence: Synthetic coding sequence
  source 1..837: mol_type = other DNA

SEQ ID NO: 172701 - DNA, 837 bp, synthetic construct; identical to SEQ ID NO: 172699
  misc_feature 1..837: note = Description of Artificial Sequence: Synthetic coding sequence
  source 1..837: mol_type = other DNA

SEQ ID NO: 172702 - DNA, 27 bp, synthetic construct
  misc_feature 1..27: note = Description of Artificial Sequence: Synthetic coding sequence
  source 1..27: mol_type = other DNA
atggacaagagcggcatcgacagctag

SEQ ID NO: 172703 - DNA, 3030 bp, synthetic construct
  misc_feature 1..3030: note = Description of Artificial Sequence: Synthetic coding sequence
  source 1..3030: mol_type = other DNA
atgtcctggttcaatgccagccagctgagcagctttgccaagcaggccctgagccaggcccagaagagcattgacagagtgctggacatccaggaggaggagcccagcatctgggccgagaccatcccctacggggagcccggcatcagcagccctgtgtctgggggctgggacaccagcacctggggcctgaagagcaacacagagccccagagcccccccatcgccagccccaaggccatcaccaagcctgtgcggaggacagtggtggatgaaagtgagaacttcttcagcgccttcctgagccccaccgtgtccctgaaggtgtctgagagcgtgattgatgtgaagaccaccatggagagcatcagcaacaccagcacccagagcctgacagctgagaccaaggacatcgccctggagcccaaggagcagaagcatgaggaccggcagagcaacacccccagcccccctgtgtccaccttcagcagcggcaccagcaccaccagtgacatcgaggtgctggaccatgaatctgtcatcagcgagagcagcgccagcagccggcaggagaccacagacagcaagagcagcctgcacctgatgcagaccagcttccagctgctgagcgccagcgcctgcccagagtacaaccggctggatgacttccagaagctgacagagagctgctgcagcagtgatgcctttgaaagaattgacagcttctctgtgcagagcctggacagccgctctgtgtctgagatcaacagtgatgatgagctgagcggcaagggctacgccctggtgcccatcatcgtgaacagcagcacccccaagagcaagacagtggagagcgctgagggcaagtctgaggaggtgaatgagaccctggtgatccccacagaggaggccgagatggaggagagcggccgcagcgccacccctgtgaactgtgagcagcctgacatcctggtgagcagcacccccatcaatgaaggccagacagtgctggacaaggtggccgagcagtgtgagcctgctgagagccagcctgaggccctgtctgagaaggaggatgtgtgcaaggtgaccctgactgtggagttcctgaatgagaagctggagaagcgggaggcccagctgctgagcctgagcaaggagaaggccctgctggaggaggcctttgacaacctgaaggatgagatgttccgggtgaaggaggagagcagcagcatcagcagcctgaaggatgagttcacccagagaattgctgaggccgagaagaaggtgcagctggcctgcaaggagagagatgctgccaagaaggagatcaagaacatcaaggaggagctggccacccggctgaacagcagcgagacagctgacctgctgaaggagaaggatgagcagatccggggcctgatggaggagggggagaagctgagcaagcagcagctgcacaacagcaacatcatcaagaagctgcgggccaaggacaaggaaaatgaaaacatggtggccaagctgaacaagaaggtgaaggagctggaggaggagctgcagcacctgaagcaggtgctggatggcaaggaggaggtggagaagcagcaccgggagaacatcaagaagctgaacagcatggtggagcggcaggagaaggacctgggccgcctgcaggtggacatggatgagctggaggagaagaacagaagcatccaggccgccctggacagcgcctacaaggagctgacagacctgcacaaggccaatgctgccaaggacagcgaggcccaggaggccgccctgagccgggagatgaaggccaaggaggagctgtctgctgccctggagaaggcccaggaggaggcccggcagcagcaggagaccctggccatccaggtgggggacctgcggctggccctgcagaggacagagcaggccgccgccaggaaggaggactacctgcggcatgaaattggagagctgcagcagaggctgcaggaggccgagaacagaaaccaggagctgagccagagcgtgagcagcaccacccggcccctgctgcggcagatcgagaacctgcaggccaccctgggcagccagaccagctcctgggagaagctggagaagaacctgagtgaccggctgggggagagccagaccctgctggccgctgctgtggagcgggagcgggccgccacagaggagctgctggccaacaagatccagatgagctccatggagagccagaacagcctgctgcggcaggagaacagccgcttccaggcccagctggagagcgagaagaaccggctgtgcaagctggaggatgagaacaaccgctaccaggtggagctggagaacctgaaggatgaatatgtgaggaccctggaggagaccaggaaggagaagaccctgctgaacagccagctggagatggagaggatgaaggtggagcaggagaggaagaaggccatcttcacccaggagaccatcaaggagaaggagaggaagcccttctctgtgagcagcacccccaccatgagccgcagcagcagcatctctggagtggacatggccggcctgcagaccagcttcctgagccaggatgagagccatgaccacagctttggccccatgcccatcagcgccaacggcagcaacctgtatgatgctgtgaggatgggcgccggcagcagcatcatcgagaacctgcagagccagctgaagctgcgggagggggagatcacccacctgcagctggagatcggcaacctggagaagaccaggagcatcatggccgaggagctggtgaagctgaccaaccagaatgatgagctggaggagaaggtgaaggagatccccaagctgcggacccagctgcgggacctggaccagcgctacaacaccatcctgcagatgtatggagagaaggccgaggaggccgaggagctgcggctggacctggaggatgtgaagaacatgtacaagacccagattgatgagctgctgcggcagagcctgtcctag

SEQ ID NO: 172704 - DNA, 3282 bp, synthetic construct
  misc_feature 1..3282: note = Description of Artificial Sequence: Synthetic coding sequence
  source 1..3282: mol_type = other DNA
atgtcctggttcaatgccagccagctgagcagctttgccaagcaggccctgagccaggcccagaagagcattgacagagtgctggacatccaggaggaggagcccagcatctgggccgagaccatcccctacggggagcccggcatcagcagccctgtgtctgggggctgggacaccagcacctggggcctgaagagcaacacagagccccagagcccccccatcgccagccccaaggccatcaccaagcctgtgcggaggacagtggtggatgaaagtgagaacttcttcagcgccttcctgagccccacagatgtgcagaccatccagaagagccctgtggtgtccaagcccccagccaagagccagaggcctgaggaggaggtgaagagcagcctgcacgagagcctgcacatcggccagagcaggaccccagagaccacagagagccaggtgaaggacagcagcctgtgtgtgtctggagagaccctggccgccggcaccagcagccccaagacagagggcaagcatgaggagaccgtgaacaaggagagtgacatgaaggtgcccaccgtgtccctgaaggtgtctgagagcgtgattgatgtgaagaccaccatggagagcatcagcaacaccagcacccagagcctgacagctgagaccaaggacatcgccctggagcccaaggagcagaagcatgaagatcggcagagcaacacccccagcccccctgtgtccaccttcagcagcggcaccagcaccaccagtgacatcgaggtgctggaccacgagagcgtcatcagcgagagcagcgccagcagccggcaggagaccacagacagcaagagcagcctgcacctgatgcagaccagcttccagctgctgagcgccagcgcctgcccagagtacaaccggctggatgacttccagaagctgacagagagctgctgcagcagtgatgcctttgaaagaattgacagcttctctgtgcagagcctggacagccgctctgtgtctgagatcaacagtgatgatgagctgagcggcaagggctacgccctggtgcccatcatcgtgaacagcagcacccccaagagcaagacagtggagagcgctgagggcaagtctgaggaggtgaatgagaccctggtgatccccacagaggaggccgagatggaggagagcggccgcagcgccacccctgtgaactgtgagcagcctgacatcctggtgagcagcacccccatcaatgaaggccagacagtgctggacaaggtggccgagcagtgtgagcctgctgagagccagcctgaggccctgtctgagaaggaggatgtgtgcaagacagtggagttcctgaatgagaagctggagaagcgggaggcccagctgctgagcctgagcaaggagaaggccctgctggaggaggcctttgacaacctgaaggatgagatgttccgggtgaaggaggagagcagcagcatcagcagcctgaaggatgagttcacccagagaattgctgaggccgagaagaaggtgcagctggcctgcaaggagagagatgctgccaagaaggagatcaagaacatcaaggaggagctggccacccggctgaacagcagcgagacagctgacctgctgaaggagaaggatgagcagatccggggcctgatggaggagggggagaagctgagcaagcagcagctgcacaacagcaacatcatcaagaagctgcgggccaaggacaaggaaaatgaaaacatggtggccaagctgaacaagaaggtgaaggagctggaggaggagctgcagcacctgaagcaggtgctggatggcaaggaggaggtggagaagcagcaccgggagaacatcaagaagctgaacagcatggtggagcggcaggagaaggacctgggccgcctgcaggtggacatggatgagctggaggagaagaacagaagcatccaggccgccctggacagcgcctacaaggagctgacagacctgcacaaggccaatgctgccaaggacagcgaggcccaggaggccgccctgagccgggagatgaaggccaaggaggagctgtctgctgccctggagaaggcccaggaggaggcccggcagcagcaggagaccctggccatccaggtgggggacctgcggctggccctgcagaggacagagcaggccgccgccaggaaggaggactacctgcggcatgaaattggagagctgcagcagaggctgcaggaggccgagaacagaaaccaggagctgagccagagcgtgagcagcaccacccggcccctgctgcggcagatcgagaacctgcaggccaccctgggcagccagaccagctcctgggagaagctggagaagaacctgagtgaccggctgggggagagccagaccctgctggccgctgctgtggagcgggagcgggccgccacagaggagctgctggccaacaagatccagatgagctccatggagagccagaacagcctgctgcggcaggagaacagccgcttccaggcccagctggagagcgagaagaaccggctgtgcaagctggaggatgagaacaaccgctaccaggtggagctggagaacctgaaggatgaatatgtgaggaccctggaggagaccaggaaggagaagaccctgctgaacagccagctggagatggagaggatgaaggtggagcaggagaggaagaaggccatcttcacccaggagaccatcaaggagaaggagaggaagcccttctctgtgagcagcacccccaccatgagccgcagcagcagcatctctggagtggacatggccggcctgcagaccagcttcctgagccaggatgagagccatgaccacagctttggccccatgcccatcagcgccaacggcagcaacctgtatgatgctgtgaggatgggcgccggcagcagcatcatcgagaacctgcagagccagctgaagctgcgggagggggagatcacccacctgcagctggagatcggcaacctggagaagaccaggagcatcatggccgaggagctggtgaagctgaccaaccagaatgatgagctggaggagaaggtgaaggagatccccaagctgcggacccagctgcgggacctggaccagcgctacaacaccatcctgcagatgtatggagagaaggccgaggaggccgaggagctgcggctggacctggaggatgtgaagaacatgtacaagacccagattgatgagctgctgcggcagagcctgtcctag

SEQ ID NO: 172705 - DNA, 1602 bp, synthetic construct
  misc_feature 1..1602: note = Description of Artificial Sequence: Synthetic coding sequence
  source 1..1602: mol_type = other DNA
atgtcctggttcaatgccagccagctgagcagctttgccaagcaggccctgagccaggcccagaagagcattgacagagtgctggacatccaggaggaggagcccagcatctgggccgagaccatcccctacggggagcccggcatcagcagccctgtgtctgggggctgggacaccagcacctggggcctgaagagcaacacagagccccagagcccccccatcgccagccccaaggccatcaccaagcctgtgcggaggacagtggtggatgaaagtgagaacttcttcagcgccttcctgagccccacagatgtgcagaccatccagaagagccctgtggtgtccaagcccccagccaagagccagaggcctgaggaggaggtgaagagcagcctgcacgagagcctgcacatcggccagagcaggaccccagagaccacagagagccaggtgaaggacagcagcctgtgtgtgtctggagagaccctggccgccggcaccagcagccccaagacagagggcaagcatgaggagaccgtgaacaaggagagtgacatgaaggtgcccaccgtgtccctgaaggtgtctgagagcgtgattgatgtgaagaccaccatggagagcatcagcaacaccagcacccagagcctgacagctgagaccaaggacatcgccctggagcccaaggagcagaagcatgaagatcggcagagcaacacccccagcccccctgtgtccaccttcagcagcggcaccagcaccaccagtgacatcgaggtgctggaccacgagagcgtcatcagcgagagcagcgccagcagccggcaggagaccacagacagcaagagcagcctgcacctgatgcagaccagcttccagctgctgagcgccagcgcctgcccagagtacaaccggctggatgacttccagaagctgacagagagctgctgcagcagtgatgcctttgaaagaattgacagcttctctgtgcagagcctggacagccgctctgtgtctgagatcaacagtgatgatgagctgagcggcaagggctacgccctggtgcccatcatcgtgaacagcagcacccccaagagcaagacagtggagagcgctgagggcaagtctgaggaggtgaatgagaccctggtgatccccacagaggaggccgagatggaggagagcggccgcagcgccacccctgtgaactgtgagcagcctgacatcctggtgagcagcacccccatcaatgaaggccagacagtgctggacaaggtggccgagcagtgtgagcctgctgagagccagcctgaggccctgtctgagaaggaggatgtgtgcaagacagtggagttcctgaatgagaagctggagaagcgggaggcccagctgctgagcctgagcaaggagaaggccctgctggaggaggcctttgacaacctgaaggatgagatgttccgggtgaaggaggagagcagcagcatcagcagcctgaaggatgagttcacccagagaattgctgaggccgagaagaaggtgcagctggcctgcaaggagagagatgctgccaagaaggaggtgaagaggaagaagaggtag

SEQ ID NO: 172706 - DNA, 3291 bp, synthetic construct
  misc_feature 1..3291: note = Description of Artificial Sequence: Synthetic coding sequence
  source 1..3291: mol_type = other DNA
atgtcctggttcaatgccagccagctgagcagctttgccaagcaggccctgagccaggcccagaagagcattgacagagtgctggacatccaggaggaggagcccagcatctgggccgagaccatcccctacggggagcccggcatcagcagccctgtgtctgggggctgggacaccagcacctggggcctgaagagcaacacagagccccagagcccccccatcgccagccccaaggccatcaccaagcctgtgcggaggacagtggtggatgaaagtgagaacttcttcagcgccttcctgagccccacagatgtgcagaccatccagaagagccctgtggtgtccaagcccccagccaagagccagaggcctgaggaggaggtgaagagcagcctgcacgagagcctgcacatcggccagagcaggaccccagagaccacagagagccaggtgaaggacagcagcctgtgtgtgtctggagagaccctggccgccggcaccagcagccccaagacagagggcaagcatgaggagaccgtgaacaaggagagtgacatgaaggtgcccaccgtgtccctgaaggtgtctgagagcgtgattgatgtgaagaccaccatggagagcatcagcaacaccagcacccagagcctgacagctgagaccaaggacatcgccctggagcccaaggagcagaagcatgaagatcggcagagcaacacccccagcccccctgtgtccaccttcagcagcggcaccagcaccaccagtgacatcgaggtgctggaccacgagagcgtcatcagcgagagcagcgccagcagccggcaggagaccacagacagcaagagcagcctgcacctgatgcagaccagcttccagctgctgagcgccagcgcctgcccagagtacaaccggctggatgacttccagaagctgacagagagctgctgcagcagtgatgcctttgaaagaattgacagcttctctgtgcagagcctggacagccgctctgtgtctgagatcaacagtgatgatgagctgagcggcaagggctacgccctggtgcccatcatcgtgaacagcagcacccccaagagcaagacagtggagagcgctgagggcaagtctgaggaggtgaatgagaccctggtgatccccacagaggaggccgagatggaggagagcggccgcagcgccacccctgtgaactgtgagcagcctgacatcctggtgagcagcacccccatcaatgaaggccagacagtgctggacaaggtggccgagcagtgtgagcctgctgagagccagcctgaggccctgtctgagaaggaggatgtgtgcaaggtgaccctgactgtggagttcctgaatgagaagctggagaagcgggaggcccagctgctgagcctgagcaaggagaaggccctgctggaggaggcctttgacaacctgaaggatgagatgttccgggtgaaggaggagagcagcagcatcagcagcctgaaggatgagttcacccagagaattgctgaggccgagaagaaggtgcagctggcctgcaaggagagagatgctgccaagaaggagatcaagaacatcaaggaggagctggccacccggctgaacagcagcgagacagctgacctgctgaaggagaaggatgagcagatccggggcctgatggaggagggggagaagctgagcaagcagcagctgcacaacagcaacatcatcaagaagctgcgggccaaggacaaggaaaatgaaaacatggtggccaagctgaacaagaaggtgaaggagctggaggaggagctgcagcacctgaagcaggtgctggatggcaaggaggaggtggagaagcagcaccgggagaacatcaagaagctgaacagcatggtggagcggcaggagaaggacctgggccgcctgcaggtggacatggatgagctggaggagaagaacagaagcatccaggccgccctggacagcgcctacaaggagctgacagacctgcacaaggccaatgctgccaaggacagcgaggcccaggaggccgccctgagccgggagatgaaggccaaggaggagctgtctgctgccctggagaaggcccaggaggaggcccggcagcagcaggagaccctggccatccaggtgggggacctgcggctggccctgcagaggacagagcaggccgccgccaggaaagaagactacctgcggcatgagatcggggagctgcagcagaggctgcaggaggctgaaaatagaaaccaggagctgagccagagcgtgagcagcaccacccggcccctgctgcggcagatcgagaacctgcaggccaccctgggcagccagaccagctcctgggagaagctggagaagaacctgagtgaccggctgggggagagccagaccctgctggccgctgctgtggagcgggagagagctgccacagaggagctgctggccaacaagatccagatgagctccatggagagccagaacagcctgctgcggcaggagaacagccgcttccaggcccagctggagagcgagaagaaccggctgtgcaagctggaggatgagaacaaccgctaccaggtggagctggagaacctgaaggatgaatatgtgaggaccctggaggagaccaggaaggagaagaccctgctgaacagccagctggagatggagaggatgaaggtggagcaggagaggaagaaggccatcttcacccaggagaccatcaaggagaaggagaggaagcccttctctgtgagcagcacccccaccatgagccgcagcagcagcatcagcggcgtggacatggccggcctgcagaccagcttcctgagccaggatgagagccatgaccacagctttggccccatgcccatcagcgccaacggcagcaacctgtatgatgctgtgaggatgggcgccggcagcagcatcatcgagaacctgcagagccagctgaagctgcgggagggggagatcacccacctgcagctggagatcggcaacctggagaagaccaggagcatcatggccgaggagctggtgaagctgaccaaccagaatgatgagctggaggagaaggtgaaggagatccccaagctgcggacccagctgcgggacctggaccagcgctacaacaccatcctgcagatgtacggggagaaggccgaggaggccgaggagctgcggctggacctggaggatgtgaagaacatgtacaagacccagattgatgagctgctgcggcagagcctgtcctag

SEQ ID NO: 172707 - DNA, 4950 bp, synthetic construct
  misc_feature 1..4950: note = Description of Artificial Sequence: Synthetic coding sequence
  source 1..4950: mol_type = other DNA
atggagagcgtggagaaggactggggctggggcctgtggaggaacctgcgctgcctgggccacgcccaccagggcaagtgctgcacagaaggaggcatcagcagcaccaccaagaccagcagtgaaaatggcagctgctgctttgagaaggccgccaggaaggaccacgtgtgccgcttcatcggctgcggcagaaatgaccgcttcaactacgtggtgatgcagctgcagggcaggaacctggccgacctgcggcgcagccagagccggggcaccttcaccatcagcaccaccctgcggctgggccggcagatcctggagagcattgagagcatccacagcgtgggcttcctgcaccgggacatcaagcccagcaactttgccatgggccgcttccccagcacctgcaggaagtgctacatgctggactttggcctggcccggcagttcaccaacagctgtggagatgtgcggccccccagggctgtggccggcttccggggcaccgtgcgctatgccagcatcaatgcccacaggaaccgggagatgggcagacatgatgacctgtggagcctcttctacatgctggtggagtttgtggtgggccagctgccctggaggaagatcaaggacaaggagcaggtgggcagcatcaaggagagatatgaccaccggctgatgctgaagcacctgcccccagagttcagcatcttcctggaccacatcagcagcctggactacttcaccaagccagactaccagatgagcatccgggtgaccaggaagagctacaaggtgtccaccagcggcccccaggccttcaacagcctgagctacaccagcggccctggggcctgcatcagcagcagcagcttcagcaggatgggcagcagcagcttccggggcggcctgggcgccggctacggcggggccagcggcggcatcaccaccatcaccgtgaaccagagcctgctgagccccctgaacctggaggtggaccccaacatccaggccgtgaggacccaggaggagaagcagatcaagaccctgaacaacaagttcttctccttcatcgacaaggtgcgcttcctggagcagcagaacaagatgctggagaccaagtggagcctggtgcagcagcagaagatggcccggagcaacatggacaacatgtttgagagctacatcaacaacctgaagtggcagctggagaccctgggccaggagaagctgaagctggaggccgagctgggcaacatgcacggcctggtggaggacttcaggaacaagtatgaggtggagatcagcaaatgtacagagatggagaatgaatttgtgctgatcaaggagtatgtggatgaggcctacatgaacaagatggagctggagagcagcctgaaggagctgacagccaagatctccttcctgcggcagctgtatgaggaggagatcggcagctgcagccccaggagccgcatccacctgtggtgctgctcctggaccacagctgcctcctggacctggacagccagcagcctgcggagcaggcctgagggcttccctgggggctgccacgccgacacagagcagagaggagagctggccatcaaggatgccaatgccaagctgtctgagctggaggccgccctgcagctggccagccaggacatggcccggcagctgcgggagtaccaggagctgatgaatgtgaagctggccctggacatcaagatcgccacctacaggaagctgctggagggggaggagagctggctggagagcggcatgcagaacatgagcatccacatgaagaccaccagcagctatgctgggggccagagcctggcctatggaggcctgaccagccctggcctgtcctatggcctgggcagcagctttggaagtggcatgggcagcagcagcttcagccacaccagcagcagcagagctgtggtgatgaagaagattgagaccagagatggcaagctggtgtctgagagcagcaatgtgctgcccaacctgcgcatcacagccaccctgctgacctctgtgtttgacaacagcatcaagaccttcggcgtgattgaaagtgacccctttgactgggagaagacaggaaatgatggcagcctgaccaccaccaccaccagcaccaccccccagctgcacacccggctgaccccagctgccatcggcatcgccaatgccacccccatccctggggacctgctgcgggagaacacagatgaggtgtttcctgatgagcagctgagtgatggagaaaatggcatccctgtgggcgtgtccccagacaagctgcccggcagcctgggccacccccggccccaggagaaggatgtgtgggaggagatggatgccaacaagaacaagatcaagctgggcatctgcaaggccgccacagaggaggagaacagccacggccaggccaacggcctgctgaatgcccccagcctgggcagccccatccgggtgcgctctgagatcacccagcctgaccgggacatccccctggtgaggaagctgcggagcatccacagctttgagctggagaagaggctgaccctggagcccaagccagacacagacaagttcctggagacctgcctggagaagatgcagaaggacaccagcgctgggaaggagagcatcctgcctgccctgctgcacaagccctgtgtgcctgctgtgtccaggacagaccacatctggcactatgatgaggagtacctgcctgatgccagcaagccagccagcgccaacaccccagagcaggctgatggcggcggcagcaatggcttcatcgctgtgaacctgagcagctgcaagcaggagattgacagcaaggagtgggtgattgtggacaaggagcaggacctgcaggacttccgcaccaatgaggccgtgggccacaagaccaccggcagccccagtgatgaggagcctgaggtgctgcaggtgctggaggccagcccccaggatgagaagctgcagctgggcccctgggccgagaatgaccacctgaagaaggagaccagcggcgtggtgctggccctgtctgctgagggccccccaacagctgccagcgagcagtacacagaccggctggagctgcagcccggggccgccagccagttcatcgccgccacccccaccagcctgatggaggcccaggccgagggccccctgacagccatcaccatcccccggcccagcgtggccagcacccagagcaccagcggcagcttccactgcggccagcagcctgagaagaaggacctgcagcccatggagcccaccgtggagctgtacagcccccgggagaacttcagcggcctggtggtgacagaaggagagccccccagcggcggcagcaggacagacctgggcctgcagattgaccacatcggccatgacatgctgcccaacatccgggagagcaacaagagccaggacctgggccccaaggagctgcctgaccacaaccggctggtggtgcgggagtttgagaacctgcctggagaaacagaggagaagagcatcctgctggagagtgacaatgaagatgagaagctgagccggggccagcactgcatcgagatcagcagcctgcccggggacctggtgattgtggagaaggaccacagcgccaccacagagcccctggatgtgaccaagacccagaccttctctgtggtgcccaaccaggacaagaacaatgagatcatgaagctgctgactgtgggcaccagcgagatcagcagccgggacatcgacccccacgtggagggccagatcggccaggtggccgagatgcagaagaacaagatcagcaaggatgatgacatcatgtctgaggacctgcccggccaccagggcgacctgagcaccttcctgcaccaggagggcaagcgggagaagatcaccccaagaaatggagagctgttccactgtgtgtctgaaaatgagcacggggcccccaccaggaaggacatggtgcgcagcagctttgtgaccaggcacagccgcatccctgtgctggcccaggagattgacagcaccctggagagcagcagccctgtgtctgccaaggagaagctgctgcagaagaaggcctaccagcctgacctggtgaagctgctggtggagaagaggcagttcaagagcttcctgggggacctgagcagcgccagtgacaagctgctggaggagaagctggccaccgtgcctgcccccttctgtgaggaggaggtgctgacccccttcagccggctgactgtggacagccacctgagccgctctgctgaggacagcttcctgagccccatcatcagccagagcaggaagagcaagatccccaggcctgtgtcctgggtgaacacagaccaggtgaacagcagcaccagcagccagttcttcccccggcccccacctgggaagccacccaccaggcctggggtggaggcccggctgcggcgctacaaggtgctgggcagcagcaacagcgacagcgacctcttcagccggctggcccagatcctgcagaatggcagccagaagcccaggagcaccacccagtgcaagagccctggcagcccccacaaccccaagaccccacccaagagccctgtggtgcccaggaggagccccagcgccagccccaggagcagcagcctgcccaggaccagcagcagcagccccagccgggccggccggccccaccacgaccagaggagcagcagcccccacctgggccgcagcaagagcccccccagccacagcggcagcagcagcagccgccgcagctgccagcaggagcactgcaagcccagcaagaatggcctgaagggcagcggcagcctgcaccaccacagcgccagcaccaagaccccccagggcaagagcaagccagccagcaagctgagcaggtag

SEQ ID NO: 172708 - DNA, 3735 bp, synthetic construct
  misc_feature 1..3735: note = Description of Artificial Sequence: Synthetic coding sequence
  source 1..3735: mol_type = other DNA
atgtctgggggcggggagcagctggacatcctgtctgtgggcatcctggtgaaggagcgctggaaggtgctgaggaagattggaggcggcggctttggagagatctatgatgccctggacatgctgaccagagaaaatgtggccctgaaggtggagagcgcccagcagcccaagcaggtgctgaagatggaggtggccgtgctgaagaagctgcagggcaaggaccacgtgtgccgcttcatcggctgcggcagaaatgaccgcttcaactacgtggtgatgcagctgcagggcaggaacctggccgacctgcggcgcagccagagccggggcaccttcaccatcagcaccaccctgcggctgggccggcagatcctggagagcattgagagcatccacagcgtgggcttcctgcaccgggacatcaagcccagcaactttgccatgggccgcttccccagcacctgcaggaagtgctacatgctggactttggcctggcccggcagttcaccaacagctgtggagatgtgcggccccccagggctgtggccggcttccggggcaccgtgcgctatgccagcatcaatgcccacaggaaccgggagatgggcagacatgatgacctgtggagcctcttctacatgctggtggagtttgtggtgggccagctgccctggaggaagatcaaggacaaggagcaggtgggcagcatcaaggagagatatgaccaccggctgatgctgaagcacctgcccccagagttcagcatcttcctggaccacatcagcagcctggactacttcaccaagccagactaccagctgctgacctctgtgtttgacaacagcatcaagacctttggagtcatcgagagtgacccctttgactgggagaagacaggaaatgatggcagcctgaccaccaccaccaccagcaccaccccccagctgcacacccggctgaccccagctgccatcggcatcgccaatgccacccccatccctggggacctgctgagagaaaatacagatgaggtgtttcctgatgagcagctgagtgatggagaaaatggcatccctgtgggcgtgtccccagacaagctgcccggcagcctgggccacccccggccccaggagaaggatgtgtgggaggagatggatgccaacaagaacaagatcaagctgggcatctgcaaggccgccacagaggaggagaacagccacggccaggccaacggcctgctgaatgcccccagcctgggcagccccatccgggtgcgctctgagatcacccagcctgaccgggacatccccctggtgaggaagctgcggagcatccacagctttgagctggagaagaggctgaccctggagcccaagccagacacagacaagttcctggagacctgcctggagaagatgcagaaggacaccagcgctgggaaggagagcatcctgcctgccctgctgcacaagccctgtgtgcctgctgtgtccaggacagaccacatctggcactatgatgaggagtacctgcctgatgccagcaagccagccagcgccaacaccccagagcaggctgatggcggcggcagcaatggcttcatcgctgtgaacctgagcagctgcaagcaggagattgacagcaaggagtgggtgattgtggacaaggagcaggacctgcaggacttccgcaccaatgaagctgtgggccacaagaccaccggcagccccagtgatgaggagcctgaggtgctgcaggtgctggaggccagcccccaggatgagaagctgcagctgggcccctgggccgagaatgaccacctgaagaaggagaccagcggcgtggtgctggccctgtctgctgagggccccccaacagctgccagcgagcagtacacagaccggctggagctgcagcctggagctgccagccagttcatcgccgccacccccaccagcctgatggaggcccaggccgagggccccctgacagccatcaccatcccccggcccagcgtggccagcacccagagcaccagcggcagcttccactgcggccagcagcctgagaagaaggacctgcagcccatggagcccaccgtggagctgtacagcccccgggagaacttcagcggcctggtggtgacagaaggagagcccccatctgggggcagcaggacagacctgggcctgcagattgaccacatcggccatgacatgctgcccaacatccgggagagcaacaagagccaggacctgggccccaaggagctgcctgaccacaaccggctggtggtgcgggagtttgagaacctgcccggggagacagaggagaagagcatcctgctggagagtgacaatgaagatgagaagctgagccggggccagcactgcatcgagatcagcagcctgcccggggacctggtgattgtggagaaggaccacagcgccaccacagagcccctggatgtgaccaagacccagaccttctctgtggtgcccaaccaggacaagaacaatgagatcatgaagctgctgactgtgggcaccagcgagatcagcagccgggacatcgacccccacgtggagggccagatcggccaggtggccgagatgcagaagaacaagatcagcaaggatgatgacatcatgtctgaggacctgcccggccaccagggcgacctgagcaccttcctgcaccaggagggcaagcgggagaagatcaccccaagaaatggagagctgttccactgtgtgtctgaaaatgaacatggagcccccaccaggaaggacatggtgcgcagcagctttgtgaccaggcacagccgcatccctgtgctggcccaggagattgacagcaccctggagagcagcagccctgtgtctgccaaggagaagctgctgcagaagaaggcctaccagcctgacctggtgaagctgctggtggagaagaggcagttcaagagcttcctgggggacctgagcagcgccagtgacaagctgctggaggagaagctggccaccgtgcctgcccccttctgtgaggaggaggtgctgacccccttcagccggctgactgtggacagccacctgagccgctctgcagaagattccttcctgagccccatcatcagccagagcaggaagagcaagatccccaggcctgtgtcctgggtgaacacagaccaggtgaacagcagcaccagcagccagttcttccccaggcctcctcctgggaagccacccaccaggcctggggtggaggcccggctgcggcgctacaaggtgctgggcagcagcaacagcgacagcgacctcttcagccggctggcccagatcctgcagaatggcagccagaagcccaggagcaccacccagtgcaagagccctggcagcccccacaaccccaagaccccacccaagagccctgtggtgccccggcgcagccccagcgccagccccaggagcagcagcctgcccaggaccagcagcagcagccccagcagagctggccggccccaccacgaccagaggagcagcagcccccacctgggccgcagcaagagcccccccagccacagcggcagcagcagcagcagaagaagctgccagcaggagcactgcaagcccagcaagaatggcctgaagggcagcggcagcctgcaccaccacagcgccagcaccaagaccccccagggcaagagcaagccagccagcaagctgagcaggtag

SEQ ID NO: 172709 - DNA, 3525 bp, synthetic construct
  misc_feature 1..3525: note = Description of Artificial Sequence: Synthetic coding sequence
  source 1..3525: mol_type = other DNA
gagcccgggaaggaccacgtgtgccgcttcatcggctgcggcagaaatgaccgcttcaactacgtggtgatgcagctgcagggcaggaacctggccgacctgcggcgcagccagagccggggcaccttcaccatcagcaccaccctgcggctgggccggcagatcctggagagcattgagagcatccacagcgtgggcttcctgcaccgggacatcaagcccagcaactttgccatgggccgcttccccagcacctgcaggaagtgctacatgctggactttggcctggcccggcagttcaccaacagctgtggagatgtgcggccccccagggctgtggccggcttccggggcaccgtgcgctatgccagcatcaatgcccacaggaaccgggagatgggcagacatgatgacctgtggagcctcttctacatgctggtggagtttgtggtgggccagctgccctggaggaagatcaaggacaaggagcaggtgggcagcatcaaggagagatatgaccaccggctgatgctgaagcacctgcccccagagttcagcatcttcctggaccacatcagcagcctggactacttcaccaagccagactaccagctgctgacctctgtgtttgacaacagcatcaagacctttggagtcatcgagagtgacccctttgactgggagaagacaggaaatgatggcagcctgaccaccaccaccaccagcaccaccccccagctgcacacccggctgaccccagctgccatcggcatcgccaatgccacccccatccctggggacctgctgagagaaaatacagatgaggtgtttcctgatgagcagctgagtgatggagaaaatggcatccctgtgggcgtgtccccagacaagctgcccggcagcctgggccacccccggccccaggagaaggatgtgtgggaggagatggatgccaacaagaacaagatcaagctgggcatctgcaaggccgccacagaggaggagaacagccacggccaggccaacggcctgctgaatgcccccagcctgggcagccccatccgggtgcgctctgagatcacccagcctgaccgggacatccccctggtgaggaagctgcggagcatccacagctttgagctggagaagaggctgaccctggagcccaagccagacacagacaagttcctggagacctgcctggagaagatgcagaaggacaccagcgctgggaaggagagcatcctgcctgccctgctgcacaagccctgtgtgcctgctgtgtccaggacagaccacatctggcactatgatgaggagtacctgcctgatgccagcaagccagccagcgccaacaccccagagcaggctgatggcggcggcagcaatggcttcatcgctgtgaacctgagcagctgcaagcaggagattgacagcaaggagtgggtgattgtggacaaggagcaggacctgcaggacttccgcaccaatgaagctgtgggccacaagaccaccggcagccccagtgatgaggagcctgaggtgctgcaggtgctggaggccagcccccaggatgagaagctgcagctgggcccctgggccgagaatgaccacctgaagaaggagaccagcggcgtggtgctggccctgtctgctgagggccccccaacagctgccagcgagcagtacacagaccggctggagctgcagcctggagctgccagccagttcatcgccgccacccccaccagcctgatggaggcccaggccgagggccccctgacagccatcaccatcccccggcccagcgtggccagcacccagagcaccagcggcagcttccactgcggccagcagcctgagaagaaggacctgcagcccatggagcccaccgtggagctgtacagcccccgggagaacttcagcggcctggtggtgacagaaggagagcccccatctgggggcagcaggacagacctgggcctgcagattgaccacatcggccatgacatgctgcccaacatccgggagagcaacaagagccaggacctgggccccaaggagctgcctgaccacaaccggctggtggtgcgggagtttgagaacctgcccggggagacagaggagaagagcatcctgctggagagtgacaatgaagatgagaagctgagccggggccagcactgcatcgagatcagcagcctgcccggggacctggtgattgtggagaaggaccacagcgccaccacagagcccctggatgtgaccaagacccagaccttctctgtggtgcccaaccaggacaagaacaatgagatcatgaagctgctgactgtgggcaccagcgagatcagcagccgggacatcgacccccacgtggagggccagatcggccaggtggccgagatgcagaagaacaagatcagcaaggatgatgacatcatgtctgaggacctgcccggccaccagggcgacctgagcaccttcctgcaccaggagggcaagcgggagaagatcaccccaagaaatggagagctgttccactgtgtgtctgaaaatgaacatggagcccccaccaggaaggacatggtgcgcagcagctttgtgaccaggcacagccgcatccctgtgctggcccaggagattgacagcaccctggagagcagcagccctgtgtctgccaaggagaagctgctgcagaagaaggcctaccagcctgacctggtgaagctgctggtggagaagaggcagttcaagagcttcctgggggacctgagcagcgccagtgacaagctgctggaggagaagctggccaccgtgcctgcccccttctgtgaggaggaggtgctgacccccttcagccggctgactgtggacagccacctgagccgctctgcagaagattccttcctgagccccatcatcagccagagcaggaagagcaagatccccaggcctgtgtcctgggtgaacacagaccaggtgaacagcagcaccagcagccagttcttccccaggcctcctcctgggaagccacccaccaggcctggggtggaggcccggctgcggcgctacaaggtgctgggcagcagcaacagcgacagcgacctcttcagccggctggcccagatcctgcagaatggcagccagaagcccaggagcaccacccagtgcaagagccctggcagcccccacaaccccaagaccccacccaagagccctgtggtgccccggcgcagccccagcgccagccccaggagcagcagcctgcccaggaccagcagcagcagccccagcagagctggccggccccaccacgaccagaggagcagcagcccccacctgggccgcagcaagagcccccccagccacagcggcagcagcagcagcagaagaagctgccagcaggagcactgcaagcccagcaagaatggcctgaagggcagcggcagcctgcaccaccacagcgccagcaccaagaccccccagggcaagagcaagccagccagcaagctgagcaggtag

SEQ ID NO: 172710 - DNA, 2244 bp, synthetic construct
  misc_feature 1..2244: note = Description of Artificial Sequence: Synthetic coding sequence
  source 1..2244: mol_type = other DNA
atgaccagcttccaggaggtgcccctgcagaccagcaactttgcccacgtgatcttccagaatgtggccaagagctacctgcccaatgcccacctggagtgccactacaccctgaccccctacatccacccccaccccaaggactgggtgggcatcttcaaggtgggctggagcacagcccgggactactacaccttcctgtggagccccatgcctgagcactacgtggagggcagcacagtgaactgtgtgctggccttccagggctactacctgcccaatgatgatggagagttctaccagttctgctacgtgacccacaagggggagatccggggggccagcacccccttccagttccgggccagcagccctgtggaggagctgctgaccatggaggatgagggcaacagcgacatgctggtggtgaccaccaaggccggcctgctggagctgaagattgagaagaccatgaaggagaaggaggagctgctgaagctgattgctgtgctggagaaggagacagcccagctgcgggagcaggtgggccgcatggagcgggagctgaaccacgagaaggagcgctgtgaccagctgcaggccgagcagaagggcctgacagaggtgacccagagcctgaagatggagaatgaggagttcaagaagcgcttcagtgatgccaccagcaaggcccaccagctggaggaggacatcgtgtctgtgacccacaaggccatcgagaaggagacagagctggacagcctgaaggacaagctgaagaaggcccagcacgagcgggagcagctggagtgccagctgaagacagagaaggatgagaaggagctgtacaaggtgcacctgaagaacacagaaattgagaacaccaagctgatgtctgaggtgcagaccctgaagaacctggatggcaacaaggagagcgtcatcacccacttcaaggaggagatcggccgcctgcagctgtgcctggccgagaaggagaacctgcagaggaccttcctgctgaccaccagcagcaaagaagacacctgcttcctgaaggagcagctgaggaaggccgaggagcaggtgcaggccacccggcaggaggtggtgttcctggccaaggagctgagtgatgctgtgaatgtgcgggacaggaccatggctgacctgcacacagcccggctggagaatgagaaggtgaagaagcagctggctgatgctgtggccgagctgaagctgaatgccatgaagaaggaccaggacaagacagacaccctggagcacgagctgcggcgggaggtggaggacctgaagctgcggctgcagatggctgctgaccactacaaggagaagttcaaggagtgccagaggctgcagaagcagatcaacaagctgagtgaccagagcgccaacaacaacaacgtgttcaccaagaagacaggcaaccagcagaaggtgaatgatgcctctgtgaacacagatcctgccaccagcgccagcacagtggatgtgaagcccagccccagcgctgctgaggccgactttgacatcgtgaccaagggccaggtgtgtgagatgaccaaggagattgctgacaagacagagaagtacaacaagtgcaagcagctgctgcaggatgagaaggccaagtgcaacaagtatgcagatgagctggccaagatggagctgaagtggaaggagcaggtgaagattgctgaaaatgtgaagctggagctggccgaggtgcaggacaactacaaggagctgaagaggagcctggagaacccagctgagaggaagatggaggatggagcagatggagccttctacccagatgagatccagaggcctcctgtgcgggtgcccagctggggcctggaggacaacgtggtgtgcagccagcctgccaggaacttcagcaggccagatggcctggaggacagcgaggacagcaaggaggatgaaaatgtgcccacagccccagacccccccagccagcacctgcggggccacggcaccggcttctgctttgacagcagctttgatgtgcacaagaagtgccccctgtgtgagctgatgttcccccccaactatgaccagagcaagtttgaggagcacgtggagagccactggaaggtgtgccccatgtgcagcgagcagtttcctccagactatgaccagcaggtgtttgagcggcacgtgcagacccactttgaccagaatgtgctgaactttgattag

SEQ ID NO: 172711 - DNA, 2370 bp, synthetic construct
  misc_feature 1..2370: note = Description of Artificial Sequence: Synthetic coding sequence
  source 1..2370: mol_type = other DNA
atgaccagcttccaggaggtgcccctgcagaccagcaactttgcccacgtgatcttccagaatgtggccaagagctacctgcccaatgcccacctggagtgccactacaccctgaccccctacatccacccccaccccaaggactgggtgggcatcttcaaggtgggctggagcacagcccgggactactacaccttcctgtggagccccatgcctgagcactacgtggagggcagcacagtgaactgtgtgctggccttccagggctactacctgcccaatgatgatggagagttctaccagttctgctacgtgacccacaagggggagatccggggggccagcacccccttccagttccgggccagcagccctgtggaggagctgctgaccatggaggatgagggcaacagcgacatgctggtggtgaccaccaaggccggcctgctggagctgaagattgagaagaccatgaaggagaaggaggagctgctgaagctgattgctgtgctggagaaggagacagcccagctgcgggagcaggtgggccgcatggagcgggagctgaaccacgagaaggagcgctgtgaccagctgcaggccgagcagaagggcctgacagaggtgacccagagcctgaagatggagaatgaggagttcaagaagcgcttcagtgatgccaccagcaaggcccaccagctggaggaggacatcgtgtctgtgacccacaaggccatcgagaaggagacagagctggacagcctgaaggacaagctgaagaaggcccagcacgagcgggagcagctggagtgccagctgaagacagagaaggatgagaaggagctgtacaaggtgcacctgaagaacacagaaattgagaacaccaagctgatgtctgaggtgcagaccctgaagaacctggatggcaacaaggagagcgtcatcacccacttcaaggaggagatcggccgcctgcagctgtgcctggccgagaaggagaacctgcagaggaccttcctgctgaccaccagcagcaaagaagacacctgcttcctgaaggagcagctgaggaaggccgaggagcaggtgcaggccacccggcaggaggtggtgttcctggccaaggagctgagtgatgctgtgaatgtgcgggacaggaccatggctgacctgcacacagcccggctggagaatgagaaggtgaagaagcagctggctgatgctgtggccgagctgaagctgaatgccatgaagaaggaccaggacaagacagacaccctggagcacgagctgcggcgggaggtggaggacctgaagctgcggctgcagatggctgctgaccactacaaggagaagttcaaggagtgccagaggctgcagaagcagatcaacaagctgagtgaccagagcgccaacaacaacaacgtgttcaccaagaagacaggcaaccagcagaaggtgaatgatgcctctgtgaacacagatcctgccaccagcgccagcacagtggatgtgaagcccagccccagcgctgctgaggccgactttgacatcgtgaccaagggccaggtgtgtgagatgaccaaggagattgctgacaagacagagaagtacaacaagtgcaagcagctgctgcaggatgagaaggccaagtgcaacaagtatgcagatgagctggccaagatggagctgaagtggaaggagcaggtgaagattgctgaaaatgtgaagctggagctggccgaggtgcaggacaactacaaggagctgaagaggagcctggagaacccagctgagaggaagatggagggccagaacagccagagcccccagtgcttcaagacctgcagcgagcagaatggctacgtgctgaccctgagcaatgcccagcctgtgctgcagtatggcaacccctatgccagccaggagaccagagatggagcagatggagccttctacccagatgagatccagaggcctcctgtgcgggtgcccagctggggcctggaggacaacgtggtgtgcagccagcctgccaggaacttcagcaggccagatggcctggaggacagcgaggacagcaaggaggatgaaaatgtgcccacagccccagacccccccagccagcacctgcggggccacggcaccggcttctgctttgacagcagctttgatgtgcacaagaagtgccccctgtgtgagctgatgttcccccccaactatgaccagagcaagtttgaggagcacgtggagagccactggaaggtgtgccccatgtgcagcgagcagtttcctccagactatgaccagcaggtgtttgagcggcacgtgcagacccactttgaccagaatgtgctgaactttgattag

SEQ ID NO: 172712 - DNA, 417 bp, synthetic construct
  misc_feature 1..417: note = Description of Artificial Sequence: Synthetic coding sequence
  source 1..417: mol_type = other DNA
atgaccagcttccaggaggtgcccctgcagaccagcaactttgcccacgtgatcttccagaatgtggccaagagctacctgcccaatgcccacctggagtgccactacaccctgaccccctacatccacccccaccccaaggactgggtgggcatcttcaaggtgggctggagcacagcccgggactactacaccttcctgtggagccccatgcctgagcactacgtggagggcagcacagtgaactgtgtgctggccttccagggctactacctgcccaatgatgatggagagttctaccagttctgctacgtgacccacaagggggagatccggggggccagcacccccttccagttccgggccagcagccctgtggaggagctgctgaccatggaggatgagggcaacagctag

SEQ ID NO: 172713 - DNA, 297 bp, synthetic construct
  misc_feature 1..297: note = Description of Artificial Sequence: Synthetic coding sequence
  source 1..297: mol_type = other DNA
atgaccagcttccaggaggtgcccctgcagaccagcaactttgcccacgtgatcttccagaatgtggccaagagctacctgcccaatgcccacctggagtgccactacaccctgaccccctacatccacccccaccccaaggactgggtgggcatcttcaaggtgggctggagcacagcccgggactactacaccttcctgtggagccccatgcctgagcactacgtggagggcagcacagtgaactgtgtgctggccttccagggctactacctgcccaatgatgatggagagtag

SEQ ID NO: 172714 - DNA, 1773 bp, synthetic construct
  misc_feature 1..1773: note = Description of Artificial Sequence: Synthetic coding sequence
  source 1..1773: mol_type = other DNA
atgaaggagaaggaggagctgctgaagctgattgctgtgctggagaaggagacagcccagctgcgggagcaggtgggccgcatggagcgggagctgaaccacgagaaggagcgctgtgaccagctgcaggccgagcagaagggcctgacagaggtgacccagagcctgaagatggagaatgaggagttcaagaagcgcttcagtgatgccaccagcaaggcccaccagctggaggaggacatcgtgtctgtgacccacaaggccatcgagaaggagacagagctggacagcctgaaggacaagctgaagaaggcccagcacgagcgggagcagctggagtgccagctgaagacagagaaggatgagaaggagctgtacaaggtgcacctgaagaacacagaaattgagaacaccaagctgatgtctgaggtgcagaccctgaagaacctggatggcaacaaggagagcgtcatcacccacttcaaggaggagatcggccgcctgcagctgtgcctggccgagaaggagaacctgcagaggaccttcctgctgaccaccagcagcaaggaggacacctgcttcctgaaggagcagctgaggaaggccgaggagcaggtgcaggccacccggcaggaggtggtgttcctggccaaggagctgagtgatgctgtgaatgtgcgggacaggaccatggctgacctgcacacagcccggctggagaatgagaaggtgaagaagcagctggctgatgctgtggccgagctgaagctgaatgccatgaagaaggaccaggacaagacagacaccctggagcacgagctgcggcgggaggtggaggacctgaagctgcggctgcagatggctgctgaccactacaaggagaagttcaaggagtgccagaggctgcagaagcagatcaacaagctgagtgaccagagcgccaacaacaacaacgtgttcaccaagaagacaggcaaccagcagaaggtgaatgatgcctctgtgaacacagatcctgccaccagcgccagcacagtggatgtgaagcccagccccagcgctgctgaggccgactttgatattgtgaccaagggccaggtgtgtgagatgaccaaggagattgctgacaagacagagaagtacaacaagtgcaagcagctgctgcaggatgagaaggccaagtgcaacaagtatgcagatgagctggccaagatggagctgaagtggaaggagcaggtgaagattgctgaaaatgtgaagctggagctggccgaggtgcaggacaactacaaggagctgaagaggagcctggagaacccagctgagaggaagatggaggatggagcagatggagccttctacccagatgagatccagaggcctcctgtgcgggtgcccagctggggcctggaggacaacgtggtgtgcagccagcctgccaggaacttcagcaggccagatggcctggaggacagcgaggacagcaaagaagatgaaaatgtgcccacagccccagacccccccagccagcacctgcggggccatggaacaggcttctgctttgacagcagctttgatgtgcacaagaagtgccccctgtgtgagctgatgtttcctcccaactatgaccagagcaagtttgaggagcacgtggagagccactggaaggtgtgccccatgtgcagcgagcagttccccccagactatgaccagcaggtgtttgaaagacatgtgcagacccactttgaccagaatgtgctgaactttgattag

SEQ ID NO: 172715 - DNA, 2244 bp, synthetic construct; identical to SEQ ID NO: 172710
  misc_feature 1..2244: note = Description of Artificial Sequence: Synthetic coding sequence
  source 1..2244: mol_type = other DNA

SEQ ID NO: 172716 - DNA, 3480 bp, synthetic construct
  misc_feature 1..3480: note = Description of Artificial Sequence: Synthetic coding sequence
  source 1..3480: mol_type = other DNA
atggagcccatcaccttcaccgccaggaagcacctgctgagcaatgaggtgtctgtggactttggcctgcagctggtgggcagcctgcctgtgcacagcctgaccaccatgcccatgctgccctgggtggtggccgaggtgcggcggctgagccggcagagcaccaggaaggagcctgtgaccaagcaggtgcggctgtgtgtgagccccagcggcctgcgctgtgagcctgagcccggccgcagccagcagtgggaccccctcatctacagcagcatctttgagtgcaagccccagagggtgcacaagctgatccacaacagccatgaccccagctactttgcctgcctgatcaaggaggatgctgtgcaccggcagagcatctgctacgtgttcaaggcagatgaccagaccaaggtgcctgagatcatcagcagcatccggcaggccggcaagatcgcccggcaggaggagctgcactgccccagcgagtttgatgacaccttcagcaagaagtttgaggtgctcttctgtggccgggtgacagtggcccacaagaaggcccccccagccctgattgatgaatgtattgagaagttcaaccacgtgtctggcagccggggcagcgagagcccccggcccaacccccctcatgctgcccccaccggcagccaggagcctgtgagaagacccatgaggaagagcttcagccagcccggcctgcggagcctggccttcaggaaggagctgcaggacggcggcctgcggagcagcggcttcttcagcagctttgaggagagtgacatcgagaaccacctgatcagcggccacaacatcgtgcagcccacagacattgaagaaaatagaaccatgctgttcaccatcggccagagcgaggtgtacctgatcagcccagacaccaagaagatcgccctggagaagaacttcaaggagatctccttctgcagccagggcatccgccacgtggaccacttcggcttcatctgccgggagagcagcggcggcggcggcttccactttgtgtgctacgtgttccagtgcaccaatgaggccctggtggatgagatcatgatgaccctgaagcaggccttcaccgtggccgctgtgcagcagacagccaaggccccagcccagctgtgtgagggctgccccctgcagagcctgcacaagctgtgtgagcgcatcgagggcatgaacagcagcaagaccaagctggagctgcagaagcacctgaccaccctgaccaaccaggagcaggccaccatctttgaggaggtgcagaagctgcggcccagaaatgagcagcgggagaatgaactcatcatctccttcctgcgctgcctgtatgaggagaagcagaaggagcacatccacatcggggagatgaagcagaccagccagatggctgctgagaacatcggcagcgagctgcccccatctgccacccgcttccggctggacatgctgaagaacaaggccaagaggagcctgacagagagcctggagagcatcctgagccggggcaacaaggcccggggcctgcaggagcacagcatctctgtggacctggacagcagcctgagcagcaccctgagcaacaccagcaaggagcccagcgtgtgtgagaaggaggccctgcccatcagcgagagcagcttcaagctgctgggcagcagcgaggacctgagcagtgacagcgagagccacctgcctgaggagcccgcccccctgagcccccagcaggccttcagaagaagagccaacaccctgagccacttccccatcgagtgccaggagcccccccagcctgcccggggcagccctggggtgtcccagaggaagctgatgagataccacagcgtgtccacagagacccctcatgaaagaaatgtggaccccagccctgtgggggagagcaagcaccggcccggccagagcagcgccccagcccccccaccccggctgaaccccagcgccagcagccccaacttcttcaagtacctgaagcacaacagcagcggggagcagagcggaaatgctgtgcccaagagcatctcctacagaaatgccctgaggaagaagctgcacagcagcagctctgtgcccaacttcctgaagttcctggcccctgtggatgagaacaacaccagtgacttcatgaacaccaagagggactttgagagcaaggccaaccacctgggggacagcggcggcacccctgtgaagaccaggaggcacagctggaggcagcagatcttcctgcgggtggccaccccccagaaggcctgtgacagcagcagccgctatgaggactacagcgagctgggggagctgccccccaggagccccctggagcctgtgtgtgaagatggccccttcggccccccacctgaggagaagaagaggaccagccgggagctgcgggagctgtggcagaaggccatcctgcagcagatcctgctgctgaggatggagaaggagaaccagaagctgcaggcctctgaaaatgacctgctgaacaagaggctgaagctggactatgaggagatcaccccctgcctgaaggaggtgaccaccgtgtgggagaagatgctgagcaccccaggccgcagcaagatcaagtttgacatggagaagatgcacagcgctgtgggccagggcgtgcccaggcaccacagaggagagatctggaagttcctggccgagcagttccacctgaagcaccagttccccagcaagcagcagcccaaggatgtgccctacaaggagctgctgaagcagctgaccagccagcagcacgccatcctgattgacctgggccgcaccttccccacccacccctacttcagcgcccagctgggcgccggccagctgagcctgtacaacatcctgaaggcctacagcctgctggaccaggaggtgggctactgccagggcctgagctttgtggccggcatcctgctgctgcacatgtctgaggaggaggccttcaagatgctgaagttcctgatgtttgacatgggcctgaggaagcagtacagaccagacatgatcatcctgcagatggagaagaccatcaaccaggtgtttgagatggacatcgccaagcagctgcaggcctatgaggtggagtaccacgtgctgcaggaggagctgattgacagcagccccctgagtgacaaccagaggatggacaagctggagaagaccaacagcagcctgaggaagcagaacctggacctgctggagcagctgcaggtggccaacggccgcatccagagcctggaggccaccatcgagaagctgctgagcagcgagagcaagctgaagcaggccatgctgaccctggagctggagaggtctgccctgctgcagacagtggaggagctgcggaggagatctgctgagcccagcgaccgggagcctgagtgcacccagcctgagcccactggagactag

SEQ ID NO: 172717 - DNA, 3507 bp, synthetic construct
  misc_feature 1..3507: note = Description of Artificial Sequence: Synthetic coding sequence
  source 1..3507: mol_type = other DNA
atggagcccatcaccttcaccgccaggaagcacctgctgagcaatgaggtgtctgtggactttggcctgcagctggtgggcagcctgcctgtgcacagcctgaccaccatgcccatgctgccctgggtggtggccgaggtgcggcggctgagccggcagagcaccaggaaggagcctgtgaccaagcaggtgcggctgtgtgtgagccccagcggcctgcgctgtgagcctgagcccggccgcagccagcagtgggaccccctcatctacagcagcatctttgagtgcaagccccagagggtgcacaagctgatccacaacagccatgaccccagctactttgcctgcctgatcaaggaggatgctgtgcaccggcagagcatctgctacgtgttcaaggcagatgaccagaccaaggtgcctgagatcatcagcagcatccggcaggccggcaagatcgcccggcaggaggagctgcactgccccagcgagtttgatgacaccttcagcaagaagtttgaggtgctcttctgtggccgggtgacagtggcccacaagaaggcccccccagccctgattgatgaatgtattgagaagttcaaccacgtgtctggcagccggggcagcgagagcccccggcccaacccccctcatgctgcccccaccggcagccaggagcctgtgagaagacccatgaggaagagcttcagccagcccggcctgcggagcctggccttcaggaaggagctgcaggacggcggcctgcggagcagcggcttcttcagcagctttgaggagagtgacatcgagaaccacctgatcagcggccacaacatcgtgcagcccacagacattgaagaaaatagaaccatgctgttcaccatcggccagagcgaggtgtacctgatcagcccagacaccaagaagatcgccctggagaagaacttcaaggagatctccttctgcagccagggcatccgccacgtggaccacttcggcttcatctgccgggagagcagcggcggcggcggcttccactttgtgtgctacgtgttccagtgcaccaatgaggccctggtggatgagatcatgatgaccctgaagcaggccttcaccgtggccgctgtgcagcagacagccaaggccccagcccagctgtgtgagggctgccccctgcagagcctgcacaagctgtgtgagcgcatcgagggcatgaacagcagcaagaccaagctggagctgcagaagcacctgaccaccctgaccaaccaggagcaggccaccatctttgaggaggtgcagaagctgcggcccagaaatgagcagcgggagaatgaactcatcatctccttcctgcgctgcctgtatgaggagaagcagaaggagcacatccacatcggggagatgaagcagaccagccagatggctgctgagaacatcggcagcgagctgcccccatctgccacccgcttccggctggacatgctgaagaacaaggccaagaggagcctgacagagagcctggagagcatcctgagccggggcaacaaggcccggggcctgcaggagcacagcatctctgtggacctggacagcagcctgagcagcaccctgagcaacaccagcaaggagcccagcgtgtgtgagaaggaggccctgcccatcagcgagagcagcttcaagctgctgggcagcagcgaggacctgagcagtgacagcgagagccacctgcctgaggagcccgcccccctgagcccccagcaggccttcagaagaagagccaacaccctgagccacttccccatcgagtgccaggagcccccccagcctgcccggggcagccctggggtgtcccagaggaagctgatgagataccacagcgtgtccacagagacccctcatgagaggaaggactttgagagcaaggccaaccacctgggggacagcggcggcacccctgtgaagaccaggaggcacagctggaggcagcagatcttcctgcgggtggccaccccccagaaggcctgtgacagcagcagccgctatgaggactacagcgagctgggggagctgccccccaggagccccctggagcctgtgtgtgaagatggccccttcggccccccacctgaggagaagaagaggaccagccgggagctgcgggagctgtggcagaaggccatcctgcagcagatcctgctgctgaggatggagaaggagaaccagaagctgcaggcctctgaaaatgacctgctgaacaagaggctgaagctggactatgaggagatcaccccctgcctgaaggaggtgaccaccgtgtgggagaagatgctgagcaccccaggccgcagcaagatcaagtttgacatggagaagatgcacagcgctgtgggccagggcgtgcccaggcaccacagaggagagatctggaagttcctggccgagcagttccacctgaagcaccagttccccagcaagcagcagcccaaggatgtgccctacaaggagctgctgaagcagctgaccagccagcagcacgccatcctgattgacctgggccgcaccttccccacccacccctacttcagcgcccagctgggcgccggccagctgagcctgtacaacatcctgaaggcctacagcctgctggaccaggaggtgggctactgccagggcctgagctttgtggccggcatcctgctgctgcacatgtctgaggaggaggccttcaagatgctgaagttcctgatgtttgacatgggcctgaggaagcagtacagaccagacatgatcatcctgcagatccagatgtaccagctgagccggctgctgcatgactaccaccgggacctgtacaaccacctggaggagcacgagatcggccccagcctgtatgctgccccctggttcctgaccatgtttgccagccagttccccctgggctttgtggcccgggtgtttgacatgatcttcctgcagggcacagaggtgatcttcaaggtggccctgagcctgctgggcagccacaagcccctcatcctgcagcacgagaacctggagaccatcgtggacttcatcaagagcaccctgcccaacctgggcctggtgcagatggagaagaccatcaaccaggtgtttgagatggacatcgccaagcagctgcaggcctatgaggtggagtaccacgtgctgcaggaggagctgattgacagcagccccctgagtgacaaccagaggatggacaagctggagaagaccaacagcagcctgaggaagcagaacctggacctgctggagcagctgcaggtggccaacggccgcatccagagcctggaggccaccatcgagaagctgctgagcagcgagagcaagctgaagcaggccatgctgaccctggagctggagaggtctgccctgctgcagacagtggaggagctgcggcggcgctctgctgagcccagcgaccgggagccagaatgtacccagcctgagcccaccggggactag

SEQ ID NO: 172718 - DNA, 1299 bp, synthetic construct
  misc_feature 1..1299: note = Description of Artificial Sequence: Synthetic coding sequence
  source 1..1299: mol_type = other DNA
atggagaaggagaaccagaagctgcaggcctctgaaaatgacctgctgaacaagaggctgaagctggactatgaggagatcaccccctgcctgaaggaggtgaccaccgtgtgggagaagatgctgagcaccccaggccgcagcaagatcaagtttgacatggagaagatgcacagcgctgtgggccagggcgtgcccaggcaccacagaggagagatctggaagttcctggccgagcagttccacctgaagcaccagttccccagcaagcagcagcccaaggatgtgccctacaaggagctgctgaagcagctgaccagccagcagcacgccatcctgattgacctgggccgcaccttccccacccacccctacttcagcgcccagctgggcgccggccagctgagcctgtacaacatcctgaaggcctacagcctgctggaccaggaggtgggctactgccagggcctgagctttgtggccggcatcctgctgctgcacatgtctgaggaggaggccttcaagatgctgaagttcctgatgtttgacatgggcctgaggaagcagtacagaccagacatgatcatcctgcagatccagatgtaccagctgagccggctgctgcatgactaccaccgggacctgtacaaccacctggaggagcacgagatcggccccagcctgtatgctgccccctggttcctgaccatgtttgccagccagttccccctgggctttgtggcccgggtgtttgacatgatcttcctgcagggcacagaggtgatcttcaaggtggccctgagcctgctgggcagccacaagcccctcatcctgcagcacgagaacctggagaccatcgtggacttcatcaagagcaccctgcccaacctgggcctggtgcagatggagaagaccatcaaccaggtgtttgagatggacatcgccaagcagctgcaggcctatgaggtggagtaccacgtgctgcaggaggagctgattgacagcagccccctgagtgacaaccagaggatggacaagctggagaagaccaacagcagcctgaggaagcagaacctggacctgctggagcagctgcaggtggccaacggccgcatccagagcctggaggccaccatcgagaagctgctgagcagcgagagcaagctgaagcaggccatgctgaccctggagctggagaggtctgccctgctgcagacagtggaggagctgcggcggcgctctgctgagcccagcgaccgggagccagaatgtacccagcctgagcccaccggggactag

SEQ ID NO: 172719 - DNA, 933 bp, synthetic construct
  misc_feature 1..933: note = Description of Artificial Sequence: Synthetic coding sequence
  source 1..933: mol_type = other DNA
atggcccaggccctgggggaggacctggtgcagcccccagagctgcaggatgacagcagcagcctgggcagtgacagcgagctgagcggccctggcccctaccggcaggccgacagatatggcttcatcggcggcagcagcgctgagcccggccctggccaccccccagctgacctgatccggcagcgggagatgaagtgggtggagatgaccagccactgggagaagaccatgagccgccgctacaagaaggtgaagatgcagtgcaggaagggcatccccagcgccctgcgggcccgctgctggcccctgctgtgtggggcccacgtgtgccagaagaacagccctggcacctaccaggagctggccgaggcccctggggacccccagtggatggagaccatcggccgggacctgcaccggcagttccccctgcacgagatgtttgtgagcccccagggccacggccggggcagctgccgctgcagccggcccaccccctgcatcgacaggagccgggccacagcccggccccggggcccctggctgctgtgctgcagctgcacctgcccccagaggcggcccagcggggcctggtgccgctctgtgcgcagcaccagcctgggcaccaccggccccacctggtgccagagcacagtgccctgtggggctgacaccggggcccctggagctggccactgccgggccgcccggggcctgccctggcccccaggggacaccggcagccccagcagccacccccccagggctgctgctgggggcggcctgcacgtgactggagcccagagaggagctgtgcgggccggccctgctgctggggaccagggccctgctggccctgctgcccgcttccgggccggcaccccagccccagccaccggccccccccggcggggccccagccacctgtag

SEQ ID NO: 172720 - DNA, 1662 bp, synthetic construct
  misc_feature 1..1662: note = Description of Artificial Sequence: Synthetic coding sequence
  source 1..1662: mol_type = other DNA
atggacagccctggctacaactgctttgtggacaaggacaagatggatgctgccatccaggacctgggccccaaggagctgagctgcacagagctgcaggagctgaagcagctggcccggcagggctactgggcccagagccacgccctgcggggcaaggtgtaccagaggctcatccgggacatcccctgcaggacagtgaccccagatgcctctgtgtacagcgacatcgtgggcaagatcgtgggcaagcacagcagcagctgcctgcccctgcctgagtttgtggacaacacccaggtgcccagctactgcctgaatgcccggggggagggcgctgtgaggaagatcctgctgtgcctggccaaccagttcccagacatctccttctgcccagccctgcctgctgtggtggccctgctgctgcactacagcattgatgaagctgagtgctttgagaaggcctgccgcatcctggcctgcaatgaccccggccggcggctgattgaccagagcttcctggcctttgagagcagctgcatgacctttggagacctggtgaacaagtactgccaggccgcccacaagctgatggtggccgtgtctgaagatgtgctgcaggtgtatgctgactggcagcgctggctgtttggagagctgcccctgtgctactttgcccgggtgtttgatgtgttcctggtggagggctacaaggtgctgtacagagtggccctggccatcctgaagttcttccacaaggtgcgggccggccagcccctggagagtgacagcgtgaagcaggacatccgcacctttgtgcgggacatcgccaagacagtgtccccagagaagctgctggagaaggcctttgccatccgcctcttcagcaggaaggagatccagctgctgcagatggccaatgagaaggccctgaagcagaagggcatcaccgtgaagcagaagaggcagtttgtgcacctggccgtgcatgctgagaacttccgctctgagatcgtgtctgtgcgggagatgagggacatctggagctgggtgcctgagagatttgccctgtgccagcccctgctgctcttcagcagcctgcagcacggctacagcctggcccgcttctacttccagtgtgagggccacgagcccaccctgctgctgatcaagaccacccagaaggaggtgtgtggggcctacctgagcacagactggagcgagaggaacaagtttggaggcaagctgggcttctttggaactggagaatgttttgtgttccggctgcagcctgaggtgcagagatatgagtgggtggtgatcaagcaccctgagctgaccaagcccccacccctgatggctgctgagcccacagcccccctgagccacagcgccagcagtgaccctgctgaccggctgagccccttcctggccgcccggcacttcaacctgcccagcaagacagagagcatgttcatggccggcggcagtgactgcctgattgtgggcggcggcggcggccaggccctgtacattgatggagacctgaacagaggccgcaccagccactgtgacaccttcaacaaccagcccctgtgcagcgagaacttcctgattgctgctgtggaggcctggggcttccaggaccctgacacccagtag

SEQ ID NO: 172721 - DNA, 759 bp, synthetic construct
  misc_feature 1..759: note = Description of Artificial Sequence: Synthetic coding sequence
  source 1..759: mol_type = other DNA
atgggcgtgctgctgacccagaggaccctgctgagcctggtgctggccctgctcttccccagcatggcctccatggccgccatcggcagctgcagcaaggagtacagagtgctgctgggccagctgcagaagcagacagacctgatgcaggacaccagccggctgctggacccctacatccgcatccagggcctggatgtgcccaagctgcgggagcactgccgggagaggcctggggccttccccagcgaggagaccctgcggggcctgggccggcggggcttcctgcagaccctgaatgccaccctgggctgtgtgctgcaccggctggccgacctggagcagaggctgcccaaggcccaggacctggagaggagcggcctgaacatcgaggacctggagaagctgcagatggcccggcccaacatcctgggcctgaggaacaacatctactgcatggcccagctgctggacaacagcgacacagctgagcccaccaaggccggccgcggggccagccagccccccacccccaccccagccagtgatgccttccagaggaagctggagggctgccgcttcctgcacggctaccaccgcttcatgcacagcgtgggccgggtcttcagcaagtggggcgagagccccaacagaagccgccgccacagcccccaccaggccctgaggaagggcgtgcggaggacccggcccagcaggaagggcaagaggctgatgacccggggccagctgcccaggtag

SEQ ID NO: 172722 - DNA, 1263 bp, synthetic construct
  misc_feature 1..1263: note = Description of Artificial Sequence: Synthetic coding sequence
  source 1..1263: mol_type = other DNA
atgctgaacaactgggacaagtggatggccaagaagcacaagaagatccggctgcgctgccagaagggcatcccccccagcctgcggggccgggcctggcagtacctgagcggcggcaaggtgaagctgcagcagaaccctgggaagtttgatgagctggacatgagccctggggaccccaagtggctggatgtgattgaaagagacctgcaccggcagttccccttccacgagatgtttgtgtcccggggcggccacggccagcaggacctcttccgggtgctgaaggcctacaccctgtacagacctgaggagggctactgccaggcccaggcccccatcgctgctgtgctgctgatgcacatgcctgctgagcaggccttctggtgcctggtgcagatctgtgagaagtacctgcccggctactacagcgagaagctggaggccatccagctggatggagagatcctcttcagcctgctgcagaaggtgtcccctgtggcccacaagcacctgagccggcagaagattgaccccctgctgtacatgacagagtggttcatgtgtgccttcagcaggaccctgccctggagctctgtgctgcgggtgtgggacatgttcttctgtgaaggagtgaagatcatcttccgggtgggcctggtgctgctgaagcacgccctgggcagccctgagaaggtgaaggcctgccagggccagtatgagaccatcgagcggctgcggagcctgagccccaagatcatgcaggaggccttcctggtgcaggaggtggtggagctgcctgtgacagagcggcagatcgagcgggagcacctgatccagctgcggcgctggcaggagaccagaggagagctgcagtgccgcagccccccccggctgcacggggccaaggccatcctggatgctgagcccggccccaggcctgccctgcagcccagccccagcatccggctgcccctggatgcccccctgcccggcagcaaggccaagcccaagccacccaagcaggcccagaaggagcagaggaagcagatgaagggccggggccagctggagaagcccccagcccccaaccaggccatggtggtggccgctgctggagatgcctgccccccccagcacgtgccccccaaggacagcgcccccaaggacagcgccccccaggacctggccccccaggtgtctgcccaccacaggagccaggagagcctgaccagccaggagagcgaggacacctacctgtag

SEQ ID NO: 172723 - DNA, 1548 bp, synthetic construct
  misc_feature 1..1548: note = Description of Artificial Sequence: Synthetic coding sequence
  source 1..1548: mol_type = other DNA
atggccaagagcaatggagaaaatggcccccgggccccagctgctggggagagcctgagcggcacccgggagagcctggcccagggcccagatgctgccaccacagatgagctgagcagcctgggcagtgacagcgaggccaacggctttgctgagaggagaattgacaagtttggcttcatcgtgggcagccagggcgctgagggcgccccctgccccctgctgcaccggctggaggaggtgcccctggaggtgctgcggcagcgggagagcaagtggctggacatgctgaacaactgggacaagtggatggccaagaagcacaagaagatccggctgcgctgccagaagggcatcccccccagcctgcggggccgggcctggcagtacctgagcggcggcaaggtgaagctgcagcagaaccctgggaagtttgatgagctggacatgagccctggggaccccaagtggctggatgtgattgagcgggacctgcaccggcagttccccttccacgagatgtttgtgtccagaggaggccacggccagcaggacctcttccgggtgctgaaggcctacaccctgtacagacctgaggagggctactgccaggcccaggcccccatcgctgctgtgctgctgatgcacatgcctgctgagcaggccttctggtgcctggtgcagatctgtgagaagtacctgcccggctactacagcgagaagctggaggccatccagctggatggagagatcctcttcagcctgctgcagaaggtgtcccctgtggcccacaagcacctgagccggcagaagattgaccccctgctgtacatgacagagtggttcatgtgtgccttcagcaggaccctgccctggagctctgtgctgcgggtgtgggacatgttcttctgtgagggcgtgaagatcatcttccgggtgggcctggtgctgctgaagcacgccctgggcagccctgagaaggtgaaggcctgccagggccagtatgagaccatcgagcggctgcggagcctgagccccaagatcatgcaggaggccttcctggtgcaggaggtggtggagctgcctgtgacagagcggcagatcgagcgggagcacctgatccagctgcggcgctggcaggagaccagaggagagctgcagtgccgcagccccccccggctgcatggagccaaggccatcctggatgctgagcccggccccaggcctgccctgcagcccagccccagcatccggctgcccctggatgcccccctgcccggcagcaaggccaagcccaagccacccaagcaggcccagaaggagcagaggaagcagatgaagggccggggccagctggagaagcccccagcccccaaccaggccatggtggtggccgctgctggagatgcctgccccccccagcacgtgccccccaaggacagcgcccccaaggacagcgccccccaggacctggccccccaggtgtctgcccaccacaggagccaggagagcctgaccagccaggagagcgaggacacctacctgtag

SEQ ID NO: 172724 - DNA, 2427 bp, synthetic construct
  misc_feature 1..2427: note = Description of Artificial Sequence: Synthetic coding sequence
  source 1..2427: mol_type = other DNA
atggagactggaacagcccccctggtggcccccccaagaagacatggagccccagctgcccccagccccccaccccggggcagccgggccggccctgtggtggtggtggcccctggcccccctgtgaccacagccaccagcgcccctgtgaccctggtggcccctggagaggcccggcctgcctgggtgcccggcagcgctgagaccagcgccccagccccagccccagccccagccccagccccagctgtgacaggcagcacagtggtggtgctgaccctggaggccagccctgaggcccccaagccccagctgcccagcggccctgagagccctgagcctgctgctgtggccggcgtggagaccagccgggccctggccgccggggctgacagccccaagacagaggaggcccggcccagccctgcccctggccctggcacccccaccggcacccccaccaggacccccagcaggacagcccctggggccctgacagccaagccacccctggcccccaagccaggcaccaccgtggccagcggcgtgacagcccggagcgccagcggccaggtgactggaggccacggggctgctgctgccaccagcgccagcgctggccaggcccctgaggaccccagcggccctggcaccggccccagcggcacctgtgaggcccctgtggccgtggtgacagtgaccccagcccctgagcctgctgagaacagccaggacctgggcagcaccagcagcctgggccctggcatcagcggcccccggggccaggccccagacaccctgagctacctggacagcgtgtccctgatgagcggcaccctggagagcctggctgatgatgtgtcctccatgggcagtgacagcgagatcaatggcctggccctgaggaagacagacaagtatggcttcctgggcggcagccagtacagcggcagcctggagagcagcatccctgtggatgtggcccggcagcgggagctgaagtggctggacatgttcagcaactgggacaagtggctgagccgccgcttccagaaggtgaagctgcgctgcaggaagggcatccccagcagcctgcgggccaaggcctggcagtacctgagcaacagcaaggagctgctggagcagaaccctgggaagtttgaggagctggagcgggcccctggggaccccaagtggctggatgtgattgagaaggacctgcaccggcagttccccttccacgagatgtttgctgcccggggcggccacggccagcaggacctgtaccgcatcctgaaggcctacaccatctacagaccagatgagggctactgccaggcccaggcccctgtggccgctgtgctgctgatgcacatgcctgctgagcaggccttctggtgcctggtgcagatctgtgacaagtacctgcccggctactacagcgctggcctggaggccatccagctggatggagagatcttctttgccctgctgcggcgggccagccccctggcccaccgccacctgcggcggcagagaattgatcctgtgctgtacatgacagagtggttcatgtgcatctttgcccggaccctgccctgggcctctgtgctgcgggtgtgggacatgttcttctgtgagggcgtgaagatcatcttccgggtggccctggtgctgctgcggcacaccctgggctctgtggagaagctgcggagctgccagggcatgtatgagaccatggagcagctgaggaacctgccccagcagtgcatgcaggaggacttcctggtgcatgaggtgaccaacctgcctgtgacagaggccctgattgaaagagaaaatgctgcccagctgaagaagtggagggagaccagaggagagctgcagtaccggcccagccggcggctgcacggcagccgggccatccacgaggagcggcggcggcagcagccccccctgggccccagcagcagcctgctgagcctgcccggcctgaagagccggggcagcagagctgctggaggagcccccagccccccacctcctgtgcggcgggccagcgctggccctgcccctggccctgtggtgacagctgagggcctgcaccccagcctgcccagccccactggaaacagcacccccctgggcagcagcaaggagaccaggaagcaggagaaggagcggcagaagcaggagaaggagcggcagaagcaggagaaggagcgggagaaggagcggcagaagcaggagaaggagcgggagaagcaggagaaggagcgggagaagcaggagaaggagcggcagaagcaggagaagaaggcccagggcaggaagctgagcctgcggaggaaggcagatggccccccaggcccccatgatggaggagaccggcccagcgctgaggcccggcaggatgcctacttctag

SEQ ID NO: 172725 - DNA, 1341 bp, synthetic construct
  misc_feature 1..1341: note = Description of Artificial Sequence: Synthetic coding sequence
  source 1..1341: mol_type = other DNA
atggcccaggccctgggggaggacctggtgcagcccccagagctgcaggatgacagcagcagcctgggcagtgacagcgagctgagcggccctggcccctaccggcaggccgacagatatggcttcatcggcggcagcagcgctgagcccggccctggccaccccccagctgacctgatccggcagcgggagatgaagtgggtggagatgaccagccactgggagaagaccatgagccgccgctacaagaaggtgaagatgcagtgcaggaagggcatccccagcgccctgcgggcccgctgctggcccctgctgtgtggggcccacgtgtgccagaagaacagccctggcacctaccaggagctggccgaggcccctggggacccccagtggatggagaccatcggccgggacctgcaccggcagttccccctgcacgagatgtttgtgagcccccagggccacggccagcagggcctgctgcaggtgctgaaggcctacaccctgtacagacctgagcagggctactgccaggcccagggccctgtggccgctgtgctgctgatgcacctgcccccagaggaggccttctggtgcctggtgcagatctgtgaggtgtacctgcccggctactacggcccccacatggaggccgtgcggctggatgctgaggtgttcatggccctgctgcggcggctgctgccccacgtgcacaagcacctgcagcaggtgggcgtgggccccctgctgtacctgcctgagtggttcctgtgcctgtttgcccggagcctgcccttccccaccgtgctgcgggtgtgggatgccttcctgtctgagggcgcccgggtgctcttccgggtgggcctgaccctggtgcggctggccctgggcacagctgagcagagaggagcctgccccggcctgctggagaccctgggcgccctgcgggccatccccccagcccagctgcaggaggaggccttcatgagccaggtgcacagcgtggtgctgtctgagcgggacctgcagcgggagatcaaggcccagctggcccagctgcctgacagcgcccctggccccccaccccggccccaggtgcggctggccggggcccaggccatctttgaggcccagcagctggccggcgtgcggcggggggccaagccagaggtgccccgcatcgtggtgcagcccccagaggagccccggccccccaggaggaagccccagacccggggcaagaccttccacggcctgctgacccgggcccggggcccccccatcgagggccccccccggccccagaggggcagcaccagcttcctggacacccgcttctag

SEQ ID NO: 172726 - DNA, 1341 bp, synthetic construct; identical to SEQ ID NO: 172725
  misc_feature 1..1341: note = Description of Artificial Sequence: Synthetic coding sequence
  source 1..1341: mol_type = other DNA

SEQ ID NO: 172727 - DNA, 2049 bp, synthetic construct
  misc_feature 1..2049: note = Description of Artificial Sequence: Synthetic coding sequence
  source 1..2049: mol_type = other DNA
atgtgccccggcctgtacccctacagcagcctgctggagtatggccgctccatgatcatctatgagcaggagggcgtgtacatccacagcagctgtgggaagaccaatgaccaggacggcctcatcagcggcatcctgcgggtgctggagaaggatgctgaggtgattgtggactggaggcccctggatgatgccctggacagcagcagcatcctgtatgccaggaaggacagcagctctgtggtggagtggacccaggcccccaaggagcggggccaccggggcagcgagcacctgaacagctatgaggccgagtgggacatggtgaacacagtgtccttcaagaggaagccccacaccaatggagatgcccccagccacagaaatggcaagagcaagtggagcttcctgttcagcctgacagacctgaagagcatcaagcagaacaaggagggcatgggctggagctacctggtgttctgcctgaaggatgatgtggtgctgcctgccctgcacttccaccagggcgacagcaagctgctgattgagagcctggagaagtatgtggtgctgtgtgagagcccccaggacaagaggaccctgctggtgaactgccagaacaagagcctgagccagagctttgagaacctgctggatgagcccgcctacggcctcatccagaagatcaagaaggacccctacacagccaccatgattggcttcagcaaggtgaccaactacatctttgacagcctgcggggcagtgaccccagcacccaccagaggcctccttctgagatggctgacttcctgagtgatgccatccctggcctgaagatcaaccagcaggaggagcccggctttgaggtgatcaccagaattgacctgggggagaggcctgtggtgcagaggcgggagcctgtgtccctggaggagtggaccaagaacattgattctgagggccgcatcctgaatgtggacaacatgaagcagatgatcttccggggcggcctgagccacgccctgaggaagcaggcctggaagttcctgctgggctacttcccctgggacagcaccaaggaggagaggacccagctgcagaagcagaagacagatgagtacttcaggatgaagctgcagtggaagagcatcagccaggagcaggagaagaggaacagccggctgcgggactaccgcagcctcatcgagaaggatgtgaacagaacagacaggaccaacaagttctatgagggccaggacaaccctggcctcatcctgctgcatgacatcctgatgacctactgcatgtatgactttgacctgggctacgtgcagggcatgtctgacctgctgagccccctgctgtatgtgatggagaatgaggtggatgccttctggtgctttgccagctacatggaccagatgcaccagaactttgaggagcagatgcagggcatgaagacccagctgatccagctgagcaccctgctgcggctgctggacagcggcttctgcagctacctggagagccaggacagcggctacctgtacttctgcttccgctggctgctgatccgcttcaagcgggagttctccttcctggacatcctgcggctgtgggaggtgatgtggacagagctgccctgcaccaacttccacctgctgctgtgctgtgccatcctggagagcgagaagcagcagatcatggagaagcactacggcttcaatgagatcctgaagcacatcaatgagctgtccatgaagattgatgtggaggacatcctgtgcaaggccgaggccatcagcctgcagatggtgaagtgcaaggagctgccccaggccgtgtgtgagatcctgggcctgcagggcagcgaggtgaccaccccagacagtgatgtgggagaagatgaaaatgtggtgatgaccccctgccccaccagcgccttccagagcaatgccctgcccaccctgagcgccagcggggccagaaatgacagccccacccagatccctgtgtccagtgatgtgtgccgcctgaccccagcctag

SEQ ID NO: 172728 - DNA, 1338 bp, synthetic construct
  misc_feature 1..1338: note = Description of Artificial Sequence: Synthetic coding sequence
  source 1..1338: mol_type = other DNA
atgattggcttcagcaaggtgaccaactacatctttgacagcctgcggggcagtgaccccagcacccaccagaggcctcccagcgagatggctgacttcctgagtgatgccatccctggcctgaagatcaaccagcaggaggagcccggctttgaagtcatcaccagaattgacctgggggagaggcctgtggtgcagaggcgggagcctgtgtccctggaggagtggaccaagaacatcgacagcgagggccgcatcctgaatgtggacaacatgaagcagatgatcttccggggcggcctgagccacgccctgaggaagcaggcctggaagttcctgctgggctacttcccctgggacagcaccaaggaggagaggacccagctgcagaagcagaagacagatgagtacttcaggatgaagctgcagtggaagagcatcagccaggagcaggagaagaggaacagccggctgcgggactaccgcagcctgattgagaaggatgtgaacagaacagacaggaccaacaagttctatgagggccaggacaaccctggcctcatcctgctgcatgacatcctgatgacctactgcatgtatgactttgacctgggctacgtgcagggcatgtctgacctgctgagccccctgctgtatgtgatggagaatgaggtggatgccttctggtgctttgccagctacatggaccagatgcaccagaactttgaggagcagatgcagggcatgaagacccagctgatccagctgagcaccctgctgcggctgctggacagcggcttctgcagctacctggagagccaggacagcggctacctgtacttctgcttccgctggctgctgatccgcttcaagcgggagttctccttcctggacatcctgcggctgtgggaggtgatgtggacagagctgccctgcaccaacttccacctgctgctgtgctgtgccatcctggagagcgagaagcagcagatcatggagaagcactacggcttcaatgagatcctgaagcacatcaatgagctgtccatgaagattgatgtggaggacatcctgtgcaaggccgaggccatcagcctgcagatggtgaagtgcaaggagctgccccaggccgtgtgtgagatcctgggcctgcagggcagcgaggtgaccaccccagacagtgatgtgggggaggatgaaaatgtggtgatgaccccctgccccaccagcgccttccagagcaatgccctgcccaccctgagcgccagcggggccagaaatgacagccccacccagatccctgtgtccagtgatgtgtgccgcctgaccccagcctag

SEQ ID NO: 172729 - DNA, 2025 bp, synthetic construct
  misc_feature 1..2025: note = Description of Artificial Sequence: Synthetic coding sequence
  source 1..2025: mol_type = other DNA
atggctgctgctggggtggtgtctgggaagatcatctatgagcaggagggcgtgtacatccacagcagctgtgggaagaccaatgaccaggacggcctcatcagcggcatcctgcgggtgctggagaaggatgctgaggtgattgtggactggaggcccctggatgatgccctggacagcagcagcatcctgtatgccaggaaggacagcagctctgtggtggagtggacccaggcccccaaggagcggggccaccggggcagcgagcacctgaacagctatgaggccgagtgggacatggtgaacacagtgtccttcaagaggaagccccacaccaatggagatgcccccagccacagaaatggcaagagcaagtggagcttcctgttcagcctgacagacctgaagagcatcaagcagaacaaggagggcatgggctggagctacctggtgttctgcctgaaggatgatgtggtgctgcctgccctgcacttccaccagggcgacagcaagctgctgattgagagcctggagaagtatgtggtgctgtgtgagagcccccaggacaagaggaccctgctggtgaactgccagaacaagagcctgagccagagctttgagaacctgctggatgagcccgcctacggcctcatccagaagatcaagaaggacccctacacagccaccatgattggcttcagcaaggtgaccaactacatctttgacagcctgcggggcagtgaccccagcacccaccagaggcctccttctgagatggctgacttcctgagtgatgccatccctggcctgaagatcaaccagcaggaggagcccggctttgaggtgatcaccagaattgacctgggggagaggcctgtggtgcagaggcgggagcctgtgtccctggaggagtggaccaagaacattgattctgagggccgcatcctgaatgtggacaacatgaagcagatgatcttccggggcggcctgagccacgccctgaggaagcaggcctggaagttcctgctgggctacttcccctgggacagcaccaaggaggagaggacccagctgcagaagcagaagacagatgagtacttcaggatgaagctgcagtggaagagcatcagccaggagcaggagaagaggaacagccggctgcgggactaccgcagcctcatcgagaaggatgtgaacagaacagacaggaccaacaagttctatgagggccaggacaaccctggcctcatcctgctgcatgacatcctgatgacctactgcatgtatgactttgacctgggctacgtgcagggcatgtctgacctgctgagccccctgctgtatgtgatggagaatgaggtggatgccttctggtgctttgccagctacatggaccagatgcaccagaactttgaggagcagatgcagggcatgaagacccagctgatccagctgagcaccctgctgcggctgctggacagcggcttctgcagctacctggagagccaggacagcggctacctgtacttctgcttccgctggctgctgatccgcttcaagcgggagttctccttcctggacatcctgcggctgtgggaggtgatgtggacagagctgccctgcaccaacttccacctgctgctgtgctgtgccatcctggagagcgagaagcagcagatcatggagaagcactacggcttcaatgagatcctgaagcacatcaatgagctgtccatgaagattgatgtggaggacatcctgtgcaaggccgaggccatcagcctgcagatggtgaagtgcaaggagctgccccaggccgtgtgtgagatcctgggcctgcagggcagcgaggtgaccaccccagacagtgatgtgggagaagatgaaaatgtggtgatgaccccctgccccaccagcgccttccagagcaatgccctgcccaccctgagcgccagcggggccagaaatgacagccccacccagatccctgtgtccagtgatgtgtgccgcctgaccccagcctag

SEQ ID NO: 172730 - DNA, 2076 bp, synthetic construct
  misc_feature 1..2076: note = Description of Artificial Sequence: Synthetic coding sequence
  source 1..2076: mol_type = other DNA
atggctgctgctggggtggtgtctgggaagatcatctatgagcaggagggcgtgtacatccacagcagctgtgggaagaccaatgaccaggacggcctcatcagcggcatcctgcgggtgctggagaaggatgctgaggtgattgtggactggaggcccctggatgatgccctggacagcagcagcatcctgtatgccaggaaggacagcagctctgtggtggagtggacccaggcccccaaggagcggggccaccggggcagcgagcacctgaacagctatgaggccgagtgggacatggtgaacacagtgtccttcaagaggaagccccacaccaatggagatgcccccagccacagaaatggcaagagcaagtggagcttcctgttcagcctgacagacctgaagagcatcaagcagaacaaggagggcatgggctggagctacctggtgttctgcctgaaggatgatgtggtgctgcctgccctgcacttccaccagggcgacagcaagctgctgattgagagcctggagaagtatgtggtgctgtgtgagagcccccaggacaagaggaccctgctggtgaactgccagaacaagagcctgagccagagctttgagaacctgctggatgagcccgcctacggcctcatccaggccggcctgctggacaggaggaagctgctgtgggccatccaccactggaagaagatcaagaaggacccctacacagccaccatgattggcttcagcaaggtgaccaactacatctttgacagcctgcggggcagtgaccccagcacccaccagaggcctcccagcgagatggctgacttcctgagtgatgccatccctggcctgaagatcaaccagcaggaggagcccggctttgaagtcatcaccagaattgacctgggggagaggcctgtggtgcagaggcgggagcctgtgtccctggaggagtggaccaagaacatcgacagcgagggccgcatcctgaatgtggacaacatgaagcagatgatcttccggggcggcctgagccacgccctgaggaagcaggcctggaagttcctgctgggctacttcccctgggacagcaccaaggaggagaggacccagctgcagaagcagaagacagatgagtacttcaggatgaagctgcagtggaagagcatcagccaggagcaggagaagaggaacagccggctgcgggactaccgcagcctgattgagaaggatgtgaacagaacagacaggaccaacaagttctatgagggccaggacaaccctggcctcatcctgctgcatgacatcctgatgacctactgcatgtatgactttgacctgggctacgtgcagggcatgtctgacctgctgagccccctgctgtatgtgatggagaatgaggtggatgccttctggtgctttgccagctacatggaccagatgcaccagaactttgaggagcagatgcagggcatgaagacccagctgatccagctgagcaccctgctgcggctgctggacagcggcttctgcagctacctggagagccaggacagcggctacctgtacttctgcttccgctggctgctgatccgcttcaagcgggagttctccttcctggacatcctgcggctgtgggaggtgatgtggacagagctgccctgcaccaacttccacctgctgctgtgctgtgccatcctggagagcgagaagcagcagatcatggagaagcactacggcttcaatgagatcctgaagcacatcaatgagctgtccatgaagattgatgtggaggacatcctgtgcaaggccgaggccatcagcctgcagatggtgaagtgcaaggagctgccccaggccgtgtgtgagatcctgggcctgcagggcagcgaggtgaccaccccagacagtgatgtgggggaggatgaaaatgtggtgatgaccccctgccccaccagcgccttccagagcaatgccctgcccaccctgagcgccagcggggccagaaatgacagccccacccagatccctgtgtccagtgatgtgtgccgcctgaccccagcctag

SEQ ID NO: 172731 - DNA, 2133 bp, synthetic construct
  misc_feature 1..2133: note = Description of Artificial Sequence: Synthetic coding sequence
  source 1..2133: mol_type = other DNA
atgcacaacatccggggcaacaagcaggcccagggcactggacatgagcccccaggagaggacagcccccagagcggggagccccagcgggaggagcagcccctggccagtgatgccagcaccccaggccgggagcctgaggacagccccaagccagcccccaagcccagcctgaccatcagctttgcccagaaggccaagaggcagaacaacaccttccccttcttcagcgagggcatcaccaggaacagaacagcccaggagaaggtggccgccctggagcagcaggtgctgatgctgaccaaggagctgaagagccagaaggagctggtgaagatcctgcacaaggccctggaggccgcccagcaggagaagagggccagcagcgcctacctggccgctgctgaggacaaggaccggctggagctggtgcgccacaaggtgcggcagattgctgagctgggccggcgggtggaggccctggagcaggagcgggagagcctggcccacacagccagcctgcgggagcagcaggtgcaggagctgcagcagcacgtgcagctgctgatggacaagaaccacgccaagcagcaggtgatctgcaagctgtctgagaaggtgacccaggacttcacccaccccccagaccagagccccctgcggccagatgctgccaacagagacttcctgagccagcagggcaagattgagcacctgaaggatgacatggaggcctaccgcacccagaactgcttcctgaacagcgagatccaccaggtgaccaagatctggaggaaggtggccgagaaggagaaggccctgctgaccaagtgtgcctacctgcaggccaggaactgccaggtggagagcaagtacctggccggcctgcggcggctgcaggaggccctgggagatgaggcctctgaatgttctgagctgctgcggcagctggtgcaggaggccctgcagtgggaggccggggaggccagcagtgacagcattgagctgagccccatcagcaaatatgatgaatatggcttcctgactgtgcctgactatgaggtggaggacctgaagctgctggccaagatccaggccctggagagccgcagccaccacctgctgggcctggaggccgtggaccggcccctgcgggagcgctgggccgccctgggggacctggtgcccagcgctgagctgaagcagctgctgcgggccggcgtgccccgggagcaccggccccgggtgtggcgctggctggtgcacctgcgggtgcagcacctgcacaccccaggctgctaccaggagctgctgagccggggccaggcccgggagcaccctgctgcccggcagatcgagctggacctgaacagaaccttccccaacaacaagcacttcacctgccccaccagcagcttcccagacaagctgcggcgggtgctgctggccttctcctggcagaaccccaccatcggctactgccagggcctgaaccggctggccgccatcgccctgctggtgctggaggaggaggagagcgccttctggtgcctggtggccatcgtggagaccatcatgcctgctgactactactgcaacaccctgacagccagccaggtggaccagagggtgctgcaggacctgctgtctgagaagctgccccggctgatggcccacctgggccagcaccacgtggacctgagcctggtgaccttcaactggttcctggtggtgtttgctgacagcctcatcagcaacatcctgctgcgggtgtgggatgccttcctgtatgagggcaccaaggtggtgttccgctatgccctggccatcttcaagtacaatgagaaggagatcctgcggctgcagaatggcctggagatctaccagtacctgcgcttcttcaccaagaccatcagcaacagcaggaagctgatgaacatcgccttcaatgacatgaaccccttcaggatgaagcagctgcggcagctgaggatggtgcaccgggagcggctggaggccgagctgcgggagctggagcagctgaaggccgagtacctggagcggcgggccagcagaagaagagctgtgtctgagggctgtgcctctgaagatgaggtggagggggaggcctag

SEQ ID NO: 172732 - DNA, 1407 bp, synthetic construct
  misc_feature 1..1407: note = Description of Artificial Sequence: Synthetic coding sequence
  source 1..1407: mol_type = other DNA
atggaggcctaccgcacccagaactgcttcctgaacagcgagatccaccaggtgaccaagatctggaggaaggtggccgagaaggagaaggccctgctgaccaagtgtgcctacctgcaggccaggaactgccaggtggagagcaagtacctggccggcctgcggcggctgcaggaggccctgggagatgaggcctctgaatgttctgagctgctgcggcagctggtgcaggaggccctgcagtgggaggccggggaggccagcagtgacagcattgagctgagccccatcagcaaatatgatgaatatggcttcctgactgtgcctgactatgaggtggaggacctgaagctgctggccaagatccaggccctggagagccgcagccaccacctgctgggcctggaggccgtggaccggcccctgcgggagcgctgggccgccctgggggacctggtgcccagcgctgagctgaagcagctgctgcgggccggcgtgccccgggagcaccggccccgggtgtggcgctggctggtgcacctgcgggtgcagcacctgcacaccccaggctgctaccaggagctgctgagccggggccaggcccgggagcaccctgctgcccggcagatcgagctggacctgaacagaaccttccccaacaacaagcacttcacctgccccaccagcagcttcccagacaagctgcggcgggtgctgctggccttctcctggcagaaccccaccatcggctactgccagggcctgaaccggctggccgccatcgccctgctggtgctggaggaggaggagagcgccttctggtgcctggtggccatcgtggagaccatcatgcctgctgactactactgcaacaccctgacagccagccaggtggaccagagggtgctgcaggacctgctgtctgagaagctgccccggctgatggcccacctgggccagcaccacgtggacctgagcctggtgaccttcaactggttcctggtggtgtttgctgacagcctcatcagcaacatcctgctgcgggtgtgggatgccttcctgtatgagggcaccaaggtggtgttccgctatgccctggccatcttcaagtacaatgagaaggagatcctgcggctgcagaatggcctggagatctaccagtacctgcgcttcttcaccaagaccatcagcaacagcaggaagctgatgaacatcgccttcaatgacatgaaccccttcaggatgaagcagctgcggcagctgaggatggtgcaccgggagcggctggaggccgagctgcgggagctggagcagctgaaggccgagtacctggagcggcgggccagcagaagaagagctgtgtctgagggctgtgcctctgaagatgaggtggagggggaggcctag

SEQ ID NO: 172733 - DNA, 2583 bp, synthetic construct
  misc_feature 1..2583: note = Description of Artificial Sequence: Synthetic coding sequence
  source 1..2583: mol_type = other DNA
atggagggcgctggggagaatgcccctgagagcagcagcagcgcccctggcagcgaggagagcgcccgggacccccaggtgcccccacctgaggaggagagcggggactgtgcccggagcctggaggccgtgcccaagaagctgtgtggctacctgagcaagtttggaggcaagggccccatccggggctggaagagccgctggttcttctatgatgagaggaagtgccagctgtactacagcaggacagcccaggatgccaaccccctggacagcattgacctgagcagcgctgtgtttgactgcaaggcagatgctgaggagggcatctttgagatcaagacccccagcagggtcatcaccctgaaggccgccaccaagcaggccatgctgtactggctgcagcagctgcagatgaagcgctgggagttccacaacagccccccagcccccccagccaccccagatgctgccctggccggaaatggacctgtgctgcacctggagctgggccaggaggaggccgagctggaggagttcctgtgccctgtgaagaccccacctggcctggtgggcgtggccgccgccctgcagcccttccctgccctgcagaacatcagcctgaagcacctgggcacagagatccagaacaccatgcacaacatccggggcaacaagcaggcccagggcactggacatgagcccccaggagaggacagcccccagagcggggagccccagcgggaggagcagcccctggccagtgatgccagcaccccaggccgggagcctgaggacagccccaagccagcccccaagcccagcctgaccatcagctttgcccagaaggccaagaggcagaacaacaccttccccttcttcagcgagggcatcaccaggaacagaacagcccaggagaaggtggccgccctggagcagcaggtgctgatgctgaccaaggagctgaagagccagaaggagctggtgaagatcctgcacaaggccctggaggccgcccagcaggagaagagggccagcagcgcctacctggccgctgctgaggacaaggaccggctggagctggtgcgccacaaggtgcggcagattgctgagctgggccggcgggtggaggccctggagcaggagcgggagagcctggcccacacagccagcctgcgggagcagcaggtgcaggagctgcagcagcacgtgcagctgctgatggacaagaaccacgccaagcagcaggtgatctgcaagctgtctgagaaggtgacccaggacttcacccaccccccagaccagagccccctgcggccagatgctgccaacagagacttcctgagccagcagggcaagattgagcacctgaaggatgacatggaggcctaccgcacccagaactgcttcctgaacagcgagatccaccaggtgaccaagatctggaggaaggtggccgagaaggagaaggccctgctgaccaagtgtgcctacctgcaggccaggaactgccaggtggagagcaagtacctggccggcctgcggcggctgcaggaggccctgggagatgaggcctctgaatgttctgagctgctgcggcagctggtgcaggaggccctgcagtgggaggccggggaggccagcagtgacagcattgagctgagccccatcagcaaatatgatgaatatggcttcctgactgtgcctgactatgaggtggaggacctgaagctgctggccaagatccaggccctggagagccgcagccaccacctgctgggcctggaggccgtggaccggcccctgcgggagcgctgggccgccctgggggacctggtgcccagcgctgagctgaagcagctgctgcgggccggcgtgccccgggagcaccggccccgggtgtggcgctggctggtgcacctgcgggtgcagcacctgcacaccccaggctgctaccaggagctgctgagccggggccaggcccgggagcaccctgctgcccggcagatcgagctggacctgaacagaaccttccccaacaacaagcacttcacctgccccaccagcagcttcccagacaagctgcggcgggtgctgctggccttctcctggcagaaccccaccatcggctactgccagggcctgaaccggctggccgccatcgccctgctggtgctggaggaggaggagagcgccttctggtgcctggtggccatcgtggagaccatcatgcctgctgactactactgcaacaccctgacagccagccaggtggaccagagggtgctgcaggacctgctgtctgagaagctgccccggctgatggcccacctgggccagcaccacgtggacctgagcctggtgaccttcaactggttcctggtggtgtttgctgacagcctcatcagcaacatcctgctgcgggtgtgggatgccttcctgtatgagggcaccaaggtggtgttccgctatgccctggccatcttcaagtacaatgagaaggagatcctgcggctgcagaatggcctggagatctaccagtacctgcgcttcttcaccaagaccatcagcaacagcaggtag

SEQ ID NO: 172734 - DNA, 2754 bp, synthetic construct
  misc_feature 1..2754: note = Description of Artificial Sequence: Synthetic coding sequence
  source 1..2754: mol_type = other DNA
atggagggcgctggggagaatgcccctgagagcagcagcagcgcccctggcagcgaggagagcgcccgggacccccaggtgcccccacctgaggaggagagcggggactgtgcccggagcctggaggccgtgcccaagaagctgtgtggctacctgagcaagtttggaggcaagggccccatccggggctggaagagccgctggttcttctatgatgagaggaagtgccagctgtactacagcaggacagcccaggatgccaaccccctggacagcattgacctgagcagcgctgtgtttgactgcaaggcagatgctgaggagggcatctttgagatcaagacccccagcagggtcatcaccctgaaggccgccaccaagcaggccatgctgtactggctgcagcagctgcagatgaagcgctgggagttccacaacagccccccagcccccccagccaccccagatgctgccctggccggaaatggacctgtgctgcacctggagctgggccaggaggaggccgagctggaggagttcctgtgccctgtgaagaccccacctggcctggtgggcgtggccgccgccctgcagcccttccctgccctgcagaacatcagcctgaagcacctgggcacagagatccagaacaccatgcacaacatccggggcaacaagcaggcccagggcactggacatgagcccccaggagaggacagcccccagagcggggagccccagcgggaggagcagcccctggccagtgatgccagcaccccaggccgggagcctgaggacagccccaagccagcccccaagcccagcctgaccatcagctttgcccagaaggccaagaggcagaacaacaccttccccttcttcagcgagggcatcaccaggaacagaacagcccaggagaaggtggccgccctggagcagcaggtgctgatgctgaccaaggagctgaagagccagaaggagctggtgaagatcctgcacaaggccctggaggccgcccagcaggagaagagggccagcagcgcctacctggccgctgctgaggacaaggaccggctggagctggtgcgccacaaggtgcggcagattgctgagctgggccggcgggtggaggccctggagcaggagcgggagagcctggcccacacagccagcctgcgggagcagcaggtgcaggagctgcagcagcacgtgcagctgctgatggacaagaaccacgccaagcagcaggtgatctgcaagctgtctgagaaggtgacccaggacttcacccaccccccagaccagagccccctgcggccagatgctgccaacagagacttcctgagccagcagggcaagattgagcacctgaaggatgacatggaggcctaccgcacccagaactgcttcctgaacagcgagatccaccaggtgaccaagatctggaggaaggtggccgagaaggagaaggccctgctgaccaagtgtgcctacctgcaggccaggaactgccaggtggagagcaagtacctggccggcctgcggcggctgcaggaggccctgggagatgaggcctctgaatgttctgagctgctgcggcagctggtgcaggaggccctgcagtgggaggccggggaggccagcagtgacagcattgagctgagccccatcagcaaatatgatgaatatggcttcctgactgtgcctgactatgaggtggaggacctgaagctgctggccaagatccaggccctggagagccgcagccaccacctgctgggcctggaggccgtggaccggcccctgcgggagcgctgggccgccctgggggacctggtgcccagcgctgagctgaagcagctgctgcgggccggcgtgccccgggagcaccggccccgggtgtggcgctggctggtgcacctgcgggtgcagcacctgcacaccccaggctgctaccaggagctgctgagccggggccaggcccgggagcaccctgctgcccggcagatcgagctggacctgaacagaaccttccccaacaacaagcacttcacctgccccaccagcagcttcccagacaagctgcggcgggtgctgctggccttctcctggcagaaccccaccatcggctactgccagggcctgaaccggctggccgccatcgccctgctggtgctggaggaggaggagagcgccttctggtgcctggtggccatcgtggagaccatcatgcctgctgactactactgcaacaccctgacagccagccaggtggaccagagggtgctgcaggacctgctgtctgagaagctgccccggctgatggcccacctgggccagcaccacgtggacctgagcctggtgaccttcaactggttcctggtggtgtttgctgacagcctcatcagcaacatcctgctgcgggtgtgggatgccttcctgtatgagggcaccaagtacaatgagaaggagatcctgcggctgcagaatggcctggagatctaccagtacctgcgcttcttcaccaagaccatcagcaacagcaggaagctgatgaacatcgccttcaatgacatgaaccccttcaggatgaagcagctgcggcagctgaggatggtgcaccgggagcggctggaggccgagctgcgggagctggagcagctgaaggccgagtacctggagcggcgggccagcagaagaagagctgtgtctgagggctgtgcctctgaagatgaggtggagggggaggcctag

SEQ ID NO: 172735 - DNA, 1287 bp, synthetic construct
  misc_feature 1..1287: note = Description of Artificial Sequence: Synthetic coding sequence
  source 1..1287: mol_type = other DNA
atgcccagcggctgctacgtgcccaggtctgagccccggctgctgcctgcccctcctcctgctggggcccgggtgggcgccctgcggagcgcccagggagatggccccaccagcggccactgggatggcggcgctgagaaggctgacttcaatgccaagaggaagaagaaggtggccgagatccaccaggccctgaacagcgaccccacagatgtggccgccctgcggaggatggccatcagcgagggcggcctgctgacagatgagatccggaggaaggtgtggcccaagctgctgaatgtgaatgccaatgaccccccacccatcagcggcaagaacctgcggcagatgagcaaggactaccagcaggtgctgctggatgtgagaagaagcctgcggcgcttccccccaggcatgcctgaggagcagcgggagggcctgcaggaggagctgattgacatcatcctgctgatcctggagaggaacccccagctgcactactaccagggctaccatgacatcgtggtgaccttcctgctggtggtgggggagcggctggccaccagcctggtggagaagctgagcacccaccacctgcgggacttcatggaccccaccatggacaacaccaagcacatcctgaactacctgatgcccatcatcgaccaggtgaaccctgagctgcatgacttcatgcagagcgctgaggtgggcaccatctttgccctgtcctggctgatcacctggtttggccacgtgctgagtgacttcagacatgtggtgcggctgtatgacttcttcctggcctgccaccccctgatgcccatctactttgctgctgtgattgtgctgtaccgggagcaggaggtgctggactgtgactgtgacatggcctctgtgcaccacctgctgagccagatcccccaggacctgccctatgagaccctcatcagccgggccggggacctgtttgtgcagttcccccccagcgagctggcccgggaggccgccgcccagcagcaggccgagaggacagctgccagcaccttcaaggactttgagctggccagcgcccagcagaggccagacatggtgctgcggcagcgcttccggggcctgctgcggcctgaggacaggaccaaggatgtgctgaccaagcccaggaccaacagatttgtgaagctggccgtgatgggcctgactgtggccctgggcgctgctgccctggccgtggtgaagagcgccctggagtgggcccccaagttccagctgcagctgttcccctag

SEQ ID NO: 172736 - DNA, 1212 bp, synthetic construct
  misc_feature 1..1212: note = Description of Artificial Sequence: Synthetic coding sequence
  source 1..1212: mol_type = other DNA
atggccctgcggagcgcccagggagatggccccaccagcggccactgggatggaggagctgagaaggctgacttcaatgccaagaggaagaagaaggtggccgagatccaccaggccctgaacagcgaccccacagatgtggccgccctgcggaggatggccatcagcgagggcggcctgctgacagatgagatccggaggaaggtgtggcccaagctgctgaatgtgaatgccaatgaccccccacccatcagcggcaagaacctgcggcagatgagcaaggactaccagcaggtgctgctggatgtgcggcgcagcctgcggcgcttccccccaggcatgcctgaggagcagcgggagggcctgcaggaggagctgattgacatcatcctgctgatcctggagaggaacccccagctgcactactaccagggctaccatgacatcgtggtgaccttcctgctggtggtgggggagcggctggccaccagcctggtggagaagctgagcacccaccacctgcgggacttcatggaccccaccatggacaacaccaagcacatcctgaactacctgatgcccatcatcgaccaggtgaaccctgagctgcatgacttcatgcagagcgctgaggtgggcaccatctttgccctgtcctggctgatcacctggtttggacatgtgctgagtgacttccgccacgtggtgcggctgtatgacttcttcctggcctgccaccccctgatgcccatctactttgctgctgtgattgtgctgtaccgggagcaggaggtgctggactgtgactgtgacatggcctctgtgcaccacctgctgagccagatcccccaggacctgccctatgagaccctcatcagcagagctggggacctgtttgtgcagtttcctccttctgagctggcccgggaggccgccgcccagcagcaggccgagaggacagctgccagcaccttcaaggactttgagctggccagcgcccagcagaggccagacatggtgctgcggcagcgcttccggggcctgctgcggcctgaggacaggaccaaggatgtgctgaccaagcccaggaccaacagatttgtgaagctggccgtgatgggcctgactgtggccctgggcgccgccgccctggccgtggtgaagagcgccctggagtgggcccccaagttccagctgcagctgttcccctag

SEQ ID NO: 172737 - DNA, 1212 bp, synthetic construct; identical to SEQ ID NO: 172736
  misc_feature 1..1212: note = Description of Artificial Sequence: Synthetic coding sequence
  source 1..1212: mol_type = other DNA

SEQ ID NO: 172738 - DNA, 1662 bp, synthetic construct; identical to SEQ ID NO: 172720
  misc_feature 1..1662: note = Description of Artificial Sequence: Synthetic coding sequence
  source 1..1662: mol_type = other DNA

SEQ ID NO: 172739 - DNA, 1680 bp, synthetic construct
  misc_feature 1..1680: note = Description of Artificial Sequence: Synthetic coding sequence
  source 1..1680: mol_type = other DNA
atggacagccctggctacaactgctttgtggacaaggacaagatggatgctgccatccaggacctgggccccaaggagctgagctgcacagagctgcaggagctgaagcagctggcccggcagggctactgggcccagagccacgccctgcggggcaaggtgtaccagaggctcatccgggacatcccctgcaggacagtgaccccagatgcctctgtgtacagcgacatcgtgggcaagatcgtgggcaagcacagcagcagctgcctgcccctgcctgagtttgtggacaacacccaggtgcccagctactgcctgaatgcccggggggagggcgctgtgaggaagatcctgctgtgcctggccaaccagttcccagacatctccttctgcccagccctgcctgctgtggtggccctgctgctgcactacagcattgatgaagctgagtgctttgagaaggcctgccgcatcctggcctgcaatgaccccggccggcggctgattgaccagagcttcctggcctttgagagcagctgcatgacctttggagacctggtgaacaagtactgccaggccgcccacaagctgatggtggccgtgtctgaagatgtgctgcaggtgtatgctgactggcagcgctggctgtttggagagctgcccctgtgctactttgcccgggtgtttgatgtgttcctggtggagggctacaaggtgctgtacagagtggccctggccatcctgaagttcttccacaaggtgcgggccggccagcccctggagagtgacagcgtgaagcaggacatccgcacctttgtgcgggacatcgccaagacagtgtccccagagaagctgctggagaaggcctttgccatccgcctcttcagcaggaaggagatccagctgctgcagatggccaatgagaaggccctgaagcagaagggcatcaccgtgaagcagaagtctgtgtccctgagcaagaggcagtttgtgcacctggccgtgcatgctgagaacttccgctctgagatcgtgtctgtgcgggagatgagggacatctggagctgggtgcctgagagatttgccctgtgccagcccctgctgctcttcagcagcctgcagcacggctacagcctggcccgcttctacttccagtgtgagggccacgagcccaccctgctgctgatcaagaccacccagaaggaggtgtgtggggcctacctgagcacagactggagcgagaggaacaagtttggaggcaagctgggcttctttggaactggagaatgttttgtgttccggctgcagcctgaggtgcagagatatgagtgggtggtgatcaagcaccctgagctgaccaagcccccacccctgatggctgctgagcccacagcccccctgagccacagcgccagcagtgaccctgctgaccggctgagccccttcctggccgcccggcacttcaacctgcccagcaagacagagagcatgttcatggccggcggcagtgactgcctgattgtgggcggcggcggcggccaggccctgtacattgatggagacctgaacagaggccgcaccagccactgtgacaccttcaacaaccagcccctgtgcagcgagaacttcctgattgctgctgtggaggcctggggcttccaggaccctgacacccagtag

SEQ ID NO: 172740 - DNA, 2067 bp, synthetic construct
  misc_feature 1..2067: note = Description of Artificial Sequence: Synthetic coding sequence
  source 1..2067: mol_type = other DNA
atggccacagccagcggggccagtgacctgagcggcagcggggcccctcctcctggggtgggcgcccaggccgctgctgctgctgaggaggaggagcgggaggtggtgcgggtgcgggtgaagaagtgtgagagcttcctgcccccagagttccgcagctttgctgtggacccccagatcaccagcctggatgtgctgcagcacatcctgatccgggcctttgacctgagcggcaagaagaactttggcatctcctacctgggccgggaccggctgggccaggaggtgtacctgagcctgctgagtgactgggacctgagcacagcctttgccacagccagcaagccctacctgcagctgcgggtggacatccggcccagcgaggacagccccctgctggaggactgggacatcatcagccccaaggatgtgattggaagtgatgtgctgctggccgagaagaggagcagcctgaccacagctgccctgcccttcacccagagcatcctgacccaggtgggccgcaccctgagcaaggtgcagcaggtgctgtcctggagctatggagaagatgtgaagcccttcaagccacccctgagtgatgctgagttccacacctacctgaaccacgagggccagctgagcaggcctgaggagctgcggctgcgcatctaccacggcggcgtggagcccagcctgaggaaggtggtgtggagatacctgctgaatgtgtacccagatggcctgaccggccgggagaggatggactacatgaagaggaagagccgggagtatgagcagctgaagtctgagtgggcccagagggccaaccctgaggacctggagttcatccgcagcacagtgctgaaggatgtgctgaggacagaccgggcccacccctactatgccggcccagaagatggcccccacctgcgggccctgcatgacctgctgaccacctatgctgtgacccacccccaggtgtcctactgccagggcatgtctgacctggccagccccatcctggccgtgatggaccacgagggccacgcctttgtgtgcttctgtggcatcatgaagaggctggccgccaacttccacccagatggccgggccatggccaccaagtttgcccacctgaagctgctgctgcggcatgctgaccctgacttctaccagtacctgcaggaggccggggctgatgacctcttcttctgctaccgctggctgctgctggagctgaagcgggagtttgcctttgatgatgccctgaggatgctggaggtgacctggagcagcctgcccccagaccccccagagcacgaggtggagctggtgggcccccccagccaggtggctgatgctggctttggaggccaccggggctggcctgtgcggcagaggcacatgctgcggcctgctgggggcggcggcagcacctttgaagatgctgtggaccacctggccacagccagccagggccctgggggcggcggccgcctgctgcggcaggccagcctggatggcctgcagcagctgcgggacaacatgggcagccggcgggaccccctggtgcagctgccccaccctgctgccctgatcagcagcaagagcctgtctgagcccctgctgaacagcccagaccccctgctgagcagcttcagccacccagacagccccagcagcagcagcccccccagcacccaggaggccagccccaccggggacatggctgtgggcagccccctgatgcaggaggtgggcagccccaaggaccccgggaagagcctgccccctgtgccccccatgggcctgcccccaccccaggagtttggccggggcaaccccttcatgctgttcctgtgcctggccatcctgctggagcaccgggaccacatcatgagaaatggcctggactacaatgagctggccatgcactttgaccggctggtgaggaagcaccacctgggccgggtgctgcggcgggcccgggccctgtttgctgactacctgcagagcgaggtgtgggacagcgaggagggcgctgaggccacagctgccagctag

SEQ ID NO: 172741 - DNA, 693 bp, synthetic construct
  misc_feature 1..693: note = Description of Artificial Sequence: Synthetic coding sequence
  source 1..693: mol_type = other DNA
atggccacagccagcggggccagtgacctgagcggcagcggggcccctcctcctggggtgggcgcccaggccgctgctgctgctgaggaggaggagcgggaggtggtgcgggtgcgggtgaagcatggagatggagcccctgggggcctgccccacgtgttcagcccccagaagtgtgagagcttcctgcccccagagttccgcagctttgctgtggacccccagatcaccagcctggatgtgctgcagcacatcctgatccgggcctttgacctgagcggcaagaagaactttggcatctcctacctgggccgggaccggctgggccaggaggtgtacctgagcctgctgagtgactgggacctgagcacagcctttgccacagccagcaagccctacctgcagctgcgggtggacatccggcccagcgaggacagccccctgctggaggactgggacatcatcagccccaaggatgtgattggaagtgatgtgctgctggccgagaagaggagcagcctgaccacagctgccctgcccttcacccagagcatcctgacccaggtgggccgcaccctgagcaaggtgcagcaggtgctgtcctggagctatggagaagatgtgaagcccttcaagccacccctgagtgatgctgagttccacacctacctgaaccacgagggccagctgtag

SEQ ID NO: 172742 - DNA, 303 bp, synthetic construct
  misc_feature 1..303: note = Description of Artificial Sequence: Synthetic coding sequence
  source 1..303: mol_type = other DNA
atggccacagccagcggggccagtgacctgagcggcagcggggcccctcctcctggggtgggcgcccaggccgctgctgctgctgaggaggaggagcgggaggtggtgcgggtgcgggtgaagaagtgtgagagcttcctgcccccagagttccgcagctttgctgtggacccccagatcaccagcctggatgtgctgcagcacatcctgatccgggcctttgacctgagcggccccatcgcccggcggctgggccacaaccagccccagcgctgccactggctgcggcgggtggccggctag

SEQ ID NO: 172743 - DNA, 1305 bp, synthetic construct
  misc_feature 1..1305: note = Description of Artificial Sequence: Synthetic coding sequence
  source 1..1305: mol_type = other DNA
atggactacatgaagaggaagagccgggagtatgagcagctgaagtctgagtgggcccagagggccaaccctgaggacctggagttcatccgcagcacagtgctgaaggatgtgctgaggacagaccgggcccacccctactatgccggcccagaagatggcccccacctgcgggccctgcatgacctgctgaccacctatgctgtgacccacccccaggtgtcctactgccagggcatgtctgacctggccagccccatcctggccgtgatggaccacgagggccacgcctttgtgtgcttctgtggcatcatgaagaggctggccgccaacttccacccagatggccgggccatggccaccaagtttgcccacctgaagctgctgctgcggcatgctgaccctgacttctaccagtacctgcaggaggccggggctgatgacctcttcttctgctaccgctggctgctgctggagctgaagcgggagtttgcctttgatgatgccctgaggatgctggaggtgacctggagcagcctgcccccagaccccccagagcacgaggtggagctggtgggcccccccagccaggtggctgatgctggctttggaggccaccggggctggcctgtgcggcagaggcacatgctgcggcctgctgggggcggcggcagcacctttgaagatgctgtggaccacctggccacagccagccagggccctgggggcggcggccgcctgctgcggcaggccagcctggatggcctgcagcagctgcgggacaacatgggcagccggcgggaccccctggtgcagctgccccaccctgctgccctgatcagcagcaagagcctgtctgagcccctgctgaacagcccagaccccctgctgagcagcttcagccacccagacagccccagcagcagcagcccccccagcacccaggaggccagccccaccggggacatggctgtgggcagccccctgatgcaggaggtgggcagccccaaggaccccgggaagagcctgccccctgtgccccccatgggcctgcccccaccccaggagtttggccggggcaaccccttcatgctgttcctgtgcctggccatcctgctggagcaccgggaccacatcatgagaaatggcctggactacaatgagctggccatgcactttgaccggctggtgaggaagcaccacctgggccgggtgctgcggcgggcccgggccctgtttgctgactacctgcagagcgaggtgtgggacagcgaggagggcgctgaggccacagctgccagctag

SEQ ID NO: 172744 - DNA, 876 bp, synthetic construct
  misc_feature 1..876: note = Description of Artificial Sequence: Synthetic coding sequence
  source 1..876: mol_type = other DNA
atggatgtggtggaggtggccggctcctggtgggcccaggagcgggaggacatcatcatgaagtatgagaagggccaccgggccggcctgcctgaggacaagggccccaagcccttccgcagctacaacaacaacgtggaccacctgggcatcgtgcatgaaacagagctgccccccctgacagcccgggaggccaagcagatcagaagagagatcagcaggaagagcaagtgggtggacatgctgggggactgggagaagtacaagagcagcaggaagctgattgaccgggcctacaagggcatgcccatgaacatccggggccccatgtggagcgtgctgctgaacatcgaggagatgaagctgaagaaccctggccgctaccagatcatgaaggagaagggcaagaggagcagcgagcacatccagagaattgacagagatgtgtctggcaccctgaggaagcacatcttcttccgggacagatatggcaccaagcagcgggagctgctgcacatcctgctggcctatgaggagtacaaccctgaggtgggctactgccgggacctgagccacatcgccgccctcttcctgctgtacctgcctgaggaggatgccttctgggccctggtgcagctgctggccagcgagcggcacagcctgcagggcttccacagccccaacggcggcaccgtgcagggcctgcaggaccagcaggagcacgtggtggccaccagccagcccaagaccatgggccaccagagcgccagcagaagaagacctggggtggcccggggccacgtgtttgccaccggcagcctcatccctggccctggcatgaggaccctgtgcagcagcatcctgggccccctgtag

SEQ ID NO: 172745 - DNA, 1650 bp, synthetic construct
  misc_feature 1..1650: note = Description of Artificial Sequence: Synthetic coding sequence
  source 1..1650: mol_type = other DNA
atggatgtggtggaggtggccggctcctggtgggcccaggagcgggaggacatcatcatgaagtatgagaagggccaccgggccggcctgcctgaggacaagggccccaagcccttccgcagctacaacaacaacgtggaccacctgggcatcgtgcatgaaacagagctgccccccctgacagcccgggaggccaagcagatcagaagagagatcagcaggaagagcaagtgggtggacatgctgggggactgggagaagtacaagagcagcaggaagctgattgaccgggcctacaagggcatgcccatgaacatccggggccccatgtggagcgtgctgctgaacatcgaggagatgaagctgaagaaccctggccgctaccagatcatgaaggagaagggcaagaggagcagcgagcacatccagagaattgacagagatgtgtctggcaccctgaggaagcacatcttcttccgggacagatatggcaccaagcagcgggagctgctgcacatcctgctggcctatgaggagtacaaccctgaggtgggctactgccgggacctgagccacatcgccgccctcttcctgctgtacctgcctgaggaggatgccttctgggccctggtgcagctgctggccagcgagcggcacagcctgcagggcttccacagccccaacggcggcaccgtgcagggcctgcaggaccagcaggagcacgtggtggccaccagccagcccaagaccatgggccaccaggacaagaaggacctgtgtggccagtgcagccccctgggctgcctgatccgcatcctgattgatggcatcagcctgggcctgaccctgcggctgtgggatgtgtacctggtggagggggagcaggccctgatgcccatcaccagaattgccttcaaggtgcagcagaagaggctgaccaagaccagccgctgtggcccctgggcccgcttctgcaacagatttgtggacacctgggccagagatgaggacacagtgctgaagcacctgcgggcctccatgaagaagctgaccaggaagcagggcgacctgcccccaccagccaagccagagcagggcagcagcgccagcaggcctgtgcctgccagccggggcggcaagaccctgtgcaagggggaccggcaggcccctcctggccccccagcccgcttcccccggcccatctggagcgccagccccccccgggcccccaggagcagcaccccctgccctggaggagctgtgcgggaggacacctaccctgtgggcacccagggcgtgcccagccctgccctggcccagggcggcccccagggctcctggaggttcctgcagtggaacagcatgccccggctgcccacagacctggatgtggagggcccctggttccgccactatgacttccggcagagctgctgggtgcgggccatcagccaggaggaccagctggccccctgctggcaggccgagcaccctgctgagcgggtgcgcagcgcctttgctgcccccagcacagacagcgaccagggcacccccttccgggccagagatgagcagccctgtgcccccaccagcggcccctgcctgtgtggcctgcacctggagagcagccagttccccccaggcttctag

SEQ ID NO: 172746 - DNA, 900 bp, synthetic construct
  misc_feature 1..900: note = Description of Artificial Sequence: Synthetic coding sequence
  source 1..900: mol_type = other DNA
atgggccaccaggacaagaaggacctgtgtggccagtgcagccccctgggctgcctgatccgcatcctgattgatggcatcagcctgggcctgaccctgcggctgtgggatgtgtacctggtggagggggagcaggccctgatgcccatcaccagaattgccttcaaggtgcagcagaagaggctgaccaagaccagccgctgtggcccctgggcccgcttctgcaacagatttgtggacacctgggccagagatgaggacacagtgctgaagcacctgcgggcctccatgaagaagctgaccaggaagcagggcgacctgcccccaccagccaagccagagcagggcagcagcgccagcaggcctgtgcctgccagccggggcggcaagaccctgtgcaagggggaccggcaggcccctcctggccccccagcccgcttcccccggcccatctggagcgccagccccccccgggcccccaggagcagcaccccctgccctggaggagctgtgcgggaggacacctaccctgtgggcacccagggcgtgcccagccctgccctggcccagggcggcccccagggctcctggaggttcctgcagtggaacagcatgccccggctgcccacagacctggatgtggagggcccctggttccgccactatgacttccggcagagctgctgggtgcgggccatcagccaggaggaccagctggccccctgctggcaggccgagcaccctgctgagcgggtgcgcagcgcctttgctgcccccagcacagacagcgaccagggcacccccttccgggccagagatgagcagccctgtgcccccaccagcggcccctgcctgtgtggcctgcacctggagagcagccagttccccccaggcttctag

SEQ ID NO: 172747 - DNA, 1584 bp, synthetic construct
  misc_feature 1..1584: note = Description of Artificial Sequence: Synthetic coding sequence
  source 1..1584: mol_type = other DNA
atggatgtggtggaggtggccggctcctggtgggcccaggagcgggaggacatcatcatgaagtatgagaagggccaccgggccggcctgcctgaggacaagggccccaagcccttccgcagctacaacaacaacgtggaccacctgggcatcgtgcatgaaacagagctgccccccctgacagcccgggaggccaagcagatcagaagagagatcagcaggaagagcaagtgggtggacatgctgggggactgggagaagtacaagagcagcaggaagctgattgaccgggcctacaagggcatgcccatgaacatccggggccccatgtggagcgtgctgctgaacatcgaggagatgaagctgaagaaccctggccgctaccagatcatgaaggagaagggcaagaggagcagcgagcacatccagagaattgacagagatgtgtctggcaccctgaggaagcacatcttcttccgggacagatatggcaccaagcagcgggagctgctgcacatcctgctggcctatgaggagtacaaccctgaggtgggctactgccgggacctgagccacatcgccgccctcttcctgctgtacctgcctgaggaggatgccttctgggccctggtgcagctgctggccagcgagcggcacagcctgcagggcttccacagccccaacggcggcaccgtgcagggcctgcaggaccagcaggagcacgtggtggccaccagccagcccaagaccatgggccaccagatcagcctgggcctgaccctgcggctgtgggatgtgtacctggtggagggggagcaggccctgatgcccatcaccagaattgccttcaaggtgcagcagaagaggctgaccaagaccagccgctgtggcccctgggcccgcttctgcaacagatttgtggacacctgggccagagatgaggacacagtgctgaagcacctgcgggcctccatgaagaagctgaccaggaagcagggcgacctgcccccaccagccaagccagagcagggcagcagcgccagcaggcctgtgcctgccagccggggcggcaagaccctgtgcaagggggaccggcaggcccctcctggccccccagcccgcttcccccggcccatctggagcgccagccccccccgggcccccaggagcagcaccccctgccctggaggagctgtgcgggaggacacctaccctgtgggcacccagggcgtgcccagccctgccctggcccagggcggcccccagggctcctggaggttcctgcagtggaacagcatgccccggctgcccacagacctggatgtggagggcccctggttccgccactatgacttccggcagagctgctgggtgcgggccatcagccaggaggaccagctggccccctgctggcaggccgagcaccctgctgagcgggtgcgcagcgcctttgctgcccccagcacagacagcgaccagggcacccccttccgggccagagatgagcagccctgtgcccccaccagcggcccctgcctgtgtggcctgcacctggagagcagccagttccccccaggcttctag

SEQ ID NO: 172748 - DNA, 1650 bp, synthetic construct; identical to SEQ ID NO: 172745
  misc_feature 1..1650: note = Description of Artificial Sequence: Synthetic coding sequence
  source 1..1650: mol_type = other DNA

SEQ ID NO: 172749 - DNA, 1584 bp, synthetic construct
  misc_feature 1..1584: note = Description of Artificial Sequence: Synthetic coding sequence
  source 1..1584: mol_type = other DNA
atggatgtggtggaggtggccggctcctggtgggcccaggagcgggaggacatcatcatgaagtatgagaagggccaccgggccggcctgcctgaggacaagggccccaagcccttccgcagctacaacaacaacgtggaccacctgggcatcgtgcatgaaacagagctgccccccctgacagcccgggaggccaagcagatcagaagagagatcagcaggaagagcaagtgggtggacatgctgggggactgggagaagtacaagagcagcaggaagctgattgaccgggcctacaagggcatgcccatgaacatccggggccccatgtggagcgtgctgctgaacatcgaggagatgaagctgaagaaccctggccgctaccagatcatgaaggagaagggcaagaggagcagcgagcacatccagagaattgaccgggacatcagcggcaccctgaggaagcacatgttcttccgggacagatatggcaccaagcagcgggagctgctgcacatcctgctggcctatgaggagtacaaccctgaggtgggctactgccgggacctgagccacatcgccgccctcttcctgctgtacttccctgaggaggatgccttctgggccctggtgcagctgctggccagcgagcggcacagcctgcagggcttccacagccccaacggcggcaccgtgcagggcctgcaggaccagcaggagcacgtggtggccaccagccagagcaagaccatgggccaccagatcagcctgggcctgaccctgcggctgtgggatgtgtacctggtggagggggagcaggccctgatgcccatcaccagaattgccttcaaggtgcagcagaagaggctgaccaagaccagccgctgtggcccctgggcccgcttctgcaacagatttgtggacacctgggccagagatgaggacacagtgctgaagcacctgcgggcctccatgaagaagctgaccaggaagcagggcgacctgcccccaccagccaagccagagcagggcagcagcgccagcaggcctgtgcctgccagccggggcggcaagaccctgtgcaagggggaccggcaggcccctcctggccccccagcccgcttcccccggcccatctggagcgccagccccccccgggcccccaggagcagcaccccctgccctggaggagctgtgcgggaggacacctaccctgtgggcacccagggcgtgcccagccctgccctggcccagggcggcccccagggctcctggaggttcctgcagtggaacagcatgccccggctgcccacagacctggatgtggagggcccctggttccgccactatgacttccggcagagctgctgggtgcgggccatcagccaggaggaccagctggccccctgctggcaggccgagcaccctgctgagcgggtgcgcagcgcctttgctgcccccagcacagacagcgaccagggcacccccttccgggccagagatgagcagcagtatgcccccaccagcggcccctgcctgtgtggcctgcacctggagagcagccagttccccccaggcttctag

SEQ ID NO: 172750 - DNA, 1650 bp, synthetic construct
  misc_feature 1..1650: note = Description of Artificial Sequence: Synthetic coding sequence
  source 1..1650: mol_type = other DNA
atggatgtggtggaggtggccggctcctggtgggcccaggagcgggaggacatcatcatgaagtatgagaagggccaccgggccggcctgcctgaggacaagggccccaagcccttccgcagctacaacaacaacgtggaccacctgggcatcgtgcatgaaacagagctgccccccctgacagcccgggaggccaagcagatcagaagagagatcagcaggaagagcaagtgggtggacatgctgggggactgggagaagtacaagagcagcaggaagctgattgaccgggcctacaagggcatgcccatgaacatccggggccccatgtggagcgtgctgctgaacatcgaggagatgaagctgaagaaccctggccgctaccagatcatgaaggagaagggcaagaggagcagcgagcacatccagagaattgaccgggacatcagcggcaccctgaggaagcacatgttcttccgggacagatatggcaccaagcagcgggagctgctgcacatcctgctggcctatgaggagtacaaccctgaggtgggctactgccgggacctgagccacatcgccgccctcttcctgctgtacttccctgaggaggatgccttctgggccctggtgcagctgctggccagcgagcggcacagcctgcagggcttccacagccccaacggcggcaccgtgcagggcctgcaggaccagcaggagcacgtggtggccaccagccagagcaagaccatgggccaccaggacaagaaggacctgtgtggccagtgcagccccctgggctgcctgatccgcatcctgattgatggcatcagcctgggcctgaccctgcggctgtgggatgtgtacctggtggagggggagcaggccctgatgcccatcaccagaattgccttcaaggtgcagcagaagaggctgaccaagaccagccgctgtggcccctgggcccgcttctgcaacagatttgtggacacctgggccagagatgaggacacagtgctgaagcacctgcgggcctccatgaagaagctgaccaggaagcagggcgacctgcccccaccagccaagccagagcagggcagcagcgccagcaggcctgtgcctgccagccggggcggcaagaccctgtgcaagggggaccggcaggcccctcctggccccccagcccgcttcccccggcccatctggagcgccagccccccccgggcccccaggagcagcaccccctgccctggaggagctgtgcgggaggacacctaccctgtgggcacccagggcgtgcccagccctgccctggcccagggcggcccccagggctcctggaggttcctgcagtggaacagcatgccccggctgcccacagacctggatgtggagggcccctggttccgccactatgacttccggcagagctgctgggtgcgggccatcagccaggaggaccagctggccccctgctggcaggccgagcaccctgctgagcgggtgcgcagcgcctttgctgcccccagcacagacagcgaccagggcacccccttccgggccagagatgagcagcagtatgcccccaccagcggcccctgcctgtgtggcctgcacctggagagcagccagttccccccaggcttctag

SEQ ID NO: 172751 - DNA, 1650 bp, synthetic construct; identical to SEQ ID NO: 172750
  misc_feature 1..1650: note = Description of Artificial Sequence: Synthetic coding sequence
  source 1..1650: mol_type = other DNA

SEQ ID NO: 172752 - DNA, 1650 bp, synthetic construct
  misc_feature 1..1650: note = Description of Artificial Sequence: Synthetic coding sequence
  source 1..1650: mol_type = other DNA
atggatgtggtggaggtggccggctcctggtgggcccaggagcgggaggacatcatcatgaagtatgagaagggccaccgggccggcctgcctgaggacaagggccccaagcccttccgcagctacaacaacaacgtggaccacctgggcatcgtgcatgaaacagagctgccccccctgacagcccgggaggccaagcagatcagaagagagatcagcaggaagagcaagtgggtggacatgctgggggactgggagaagtacaagagcagcaggaagctgattgaccgggcctacaagggcatgcccatgaacatccggggccccatgtggagcgtgctgctgaacatcgaggagatgaagctgaagaaccctggccgctaccagatcatgaaggagaagggcaagaggagcagcgagcacatccagagaattgaccgggacatcagcggcaccctgaggaagcacatgttcttccgggacagatatggcaccaagcagcgggagctgctgcacatcctgctggcctatgaggagtacaaccctgaggtgggctactgccgggacctgagccacatcgccgccctcttcctgctgtacctgcctgaggaggatgccttctgggccctggtgcagctgctggccagcgagcggcacagcctgcagggcttccacagccccaacggcggcaccgtgcagggcctgcaggaccagcaggagcacgtggtggccaccagccagagcaagaccatgggccaccaggacaagaaggacctgtgtggccagtgcagccccctgggctgcctgatccgcatcctgattgatggcatcagcctgggcctgaccctgcggctgtgggatgtgtacctggtggagggggagcaggccctgatgcccatcaccagaattgccttcaaggtgcagcagaagaggctgaccaagaccagccgctgtggcccctgggcccgcttctgcaacagatttgtggacacctgggccagagatgaggacacagtgctgaagcacctgcgggcctccatgaagaagctgaccaggaagcagggcgacctgcccccaccagccaagccagagcagggcagcagcgccagcaggcctgtgcctgccagccggggcggcaagaccctgtgcaagggggaccggcaggcccctcctggccccccagcctggttcccccggcccatctggagcgccagccccccccgggcccccaggagcagcaccccctgccctggaggagctgtgcgggaggacacctaccctgtgggcacccagggcgtgcccagccctgccctggcccagggcggcccccagggctcctggaggttcctgcagtggaacagcatgccccggctgcccacagacctggatgtggagggcccctggttccgccactatgacttccggcagagctgctgggtgcgggccatcagccaggaggaccagctggccccctgctggcaggccgagcaccctgctgagcgggtgcgcagcgcctttgctgcccccagcacagacagcgaccagggcacccccttccgggccagagatgagcagcagtgtgcccccaccagcggcccctgcctgtgtggcctgcacctggagagcagccagttccccccaggcttctag

SEQ ID NO: 172753 - DNA, 1584 bp, synthetic construct
  misc_feature 1..1584: note = Description of Artificial Sequence: Synthetic coding sequence
  source 1..1584: mol_type = other DNA
atggatgtggtggaggtggccggctcctggtgggcccaggagcgggaggacatcatcatgaagtatgagaagggccaccgggccggcctgcctgaggacaagggccccaagcccttccgcagctacaacaacaacgtggaccacctgggcatcgtgcatgaaacagagctgccccccctgacagcccgggaggccaagcagatcagaagagagatcagcaggaagagcaagtgggtggacatgctgggggactgggagaagtacaagagcagcaggaagctgattgaccgggcctacaagggcatgcccatgaacatccggggccccatgtggagcgtgctgctgaacatcgaggagatgaagctgaagaaccctggccgctaccagatcatgaaggagaagggcaagaggagcagcgagcacatccagagaattgaccgggacatcagcggcaccctgaggaagcacatgttcttccgggacagatatggcaccaagcagcgggagctgctgcacatcctgctggcctatgaggagtacaaccctgaggtgggctactgccgggacctgagccacatcgccgccctcttcctgctgtacctgcctgaggaggatgccttctgggccctggtgcagctgctggccagcgagcggcacagcctgcagggcttccacagccccaacggcggcaccgtgcagggcctgcaggaccagcaggagcacgtggtggccaccagccagagcaagaccatgggccaccagatcagcctgggcctgaccctgcggctgtgggatgtgtacctggtggagggggagcaggccctgatgcccatcaccagaattgccttcaaggtgcagcagaagaggctgaccaagaccagccgctgtggcccctgggcccgcttctgcaacagatttgtggacacctgggccagagatgaggacacagtgctgaagcacctgcgggcctccatgaagaagctgaccaggaagcagggcgacctgcccccaccagccaagccagagcagggcagcagcgccagcaggcctgtgcctgccagccggggcggcaagaccctgtgcaagggggaccggcaggcccctcctggccccccagcctggttcccccggcccatctggagcgccagccccccccgggcccccaggagcagcaccccctgccctggaggagctgtgcgggaggacacctaccctgtgggcacccagggcgtgcccagccctgccctggcccagggcggcccccagggctcctggaggttcctgcagtggaacagcatgccccggctgcccacagacctggatgtggagggcccctggttccgccactatgacttccggcagagctgctgggtgcgggccatcagccaggaggaccagctggccccctgctggcaggccgagcaccctgctgagcgggtgcgcagcgcctttgctgcccccagcacagacagcgaccagggcacccccttccgggccagagatgagcagcagtgtgcccccaccagcggcccctgcctgtgtggcctgcacctggagagcagccagttccccccaggcttctag

SEQ ID NO: 172754 - DNA, 1650 bp, synthetic construct; identical to SEQ ID NO: 172752
  misc_feature 1..1650: note = Description of Artificial Sequence: Synthetic coding sequence
  source 1..1650: mol_type = other DNA

SEQ ID NO: 172755 - DNA, 1650 bp, synthetic construct
  misc_feature 1..1650: note = Description of Artificial Sequence: Synthetic coding sequence
  source 1..1650: mol_type = other DNA
atggatgtggtggaggtggccggctcctggtgggcccaggagcgggaggacatcatcatgaagtatgagaagggccaccgggccggcctgcctgaggacaagggccccaagcccttccgcagctacaacaacaacgtggaccacctgggcatcgtgcatgaaacagagctgccccccctgacagcccgggaggccaagcagatcagaagagagatcagcaggaagagcaagtgggtggacatgctgggggactgggagaagtacaagagcagcaggaagctgattgaccgggcctacaagggcatgcccatgaacatccggggccccatgtggagcgtgctgctgaacacagaggagatgaagctgaagaaccctggccgctaccagatcatgaaggagaagggcaagaggagcagcgagcacatccagagaattgacagagatgtgtctggcaccctgaggaagcacatcttcttccgggacagatatggcaccaagcagcgggagctgctgcacatcctgctggcctatgaggagtacaaccctgaggtgggctactgccgggacctgagccacatcgccgccctcttcctgctgtacctgcctgaggaggatgccttctgggccctggtgcagctgctggccagcgagcggcacagcctgcagggcttccacagccccaacggcggcaccgtgcagggcctgcaggaccagcaggagcacgtggtggccaccagccagcccaagaccatgggccaccaggacaagaaggacctgtgtggccagtgcagccccctgggctgcctgatccgcatcctgattgatggcatcagcctgggcctgaccctgcggctgtgggatgtgtacctggtggagggggagcaggccctgatgcccatcaccagaattgccttcaaggtgcagcagaagaggctgaccaagaccagccgctgtggcccctgggcccgcttctgcaacagatttgtggacacctgggccagagatgaggacacagtgctgaagcacctgcgggcctccatgaagaagctgaccaggaagcagggcgacctgcccccaccagccaagccagagcagggcagcagcgccagcaggcctgtgcctgccagccggggcggcaagaccctgtgcaagggggaccggcaggcccctcctggccccccagcccgcttcccccggcccatctggagcgccagccccccccgggcccccaggagcagcaccccctgccctggaggagctgtgcgggaggacacctaccctgtgggcacccagggcgtgcccagccctgccctggcccagggcggcccccagggctcctggaggttcctgcagtggaacagcatgccccggctgcccacagacctggatgtggagggcccctggttccgccactatgacttccggcagagctgctgggtgcgggccatcagccaggaggaccagctggccccctgctggcaggccgagcaccctgctgagcgggtgcgcagcgcctttgctgcccccagcacagacagcgaccagggcacccccttccgggccagagatgagcagccctgtgcccccaccagcggcccctgcctgtgtggcctgcacctggagagcagccagttccccccaggcttctag

SEQ ID NO: 172756 - DNA, 876 bp, synthetic construct
  misc_feature 1..876: note = Description of Artificial Sequence: Synthetic coding sequence
  source 1..876: mol_type = other DNA
atggatgtggtggaggtggccggctcctggtgggcccaggagcgggaggacatcatcatgaagtatgagaagggccaccgggccggcctgcctgaggacaagggccccaagcccttccgcagctacaacaacaacgtggaccacctgggcatcgtgcatgaaacagagctgccccccctgacagcccgggaggccaagcagatcagaagagagatcagcaggaagagcaagtgggtggacatgctgggggactgggagaagtacaagagcagcaggaagctgattgaccgggcctacaagggcatgcccatgaacatccggggccccatgtggagcgtgctgctgaacacagaggagatgaagctgaagaaccctggccgctaccagatcatgaaggagaagggcaagaggagcagcgagcacatccagagaattgacagagatgtgtctggcaccctgaggaagcacatcttcttccgggacagatatggcaccaagcagcgggagctgctgcacatcctgctggcctatgaggagtacaaccctgaggtgggctactgccgggacctgagccacatcgccgccctcttcctgctgtacctgcctgaggaggatgccttctgggccctggtgcagctgctggccagcgagcggcacagcctgcagggcttccacagccccaacggcggcaccgtgcagggcctgcaggaccagcaggagcacgtggtggccaccagccagcccaagaccatgggccaccagagcgccagcagaagaagacctggggtggcccggggccacgtgtttgccaccggcagcctcatccctggccctggcatgaggaccctgtgcagcagcatcctgggccccctgtag

SEQ ID NO: 172757 - DNA, 900 bp, synthetic construct; identical to SEQ ID NO: 172746
  misc_feature 1..900: note = Description of Artificial Sequence: Synthetic coding sequence
  source 1..900: mol_type = other DNA

SEQ ID NO: 172758 - DNA, 1410 bp, synthetic construct
  misc_feature 1..1410: note = Description of Artificial Sequence: Synthetic coding sequence
  source 1..1410: mol_type = other DNA
atgctgggggactgggagaagtacaagagcagcaggaagctgattgaccgggcctacaagggcatgcccatgaacatccggggccccatgtggagcgtgctgctgaacacagaggagatgaagctgaagaaccctggccgctaccagatcatgaaggagaagggcaagaggagcagcgagcacatccagagaattgacagagatgtgtctggcaccctgaggaagcacatcttcttccgggacagatatggcaccaagcagcgggagctgctgcacatcctgctggcctatgaggagtacaaccctgaggtgggctactgccgggacctgagccacatcgccgccctcttcctgctgtacctgcctgaggaggatgccttctgggccctggtgcagctgctggccagcgagcggcacagcctgcagggcttccacagccccaacggcggcaccgtgcagggcctgcaggaccagcaggagcacgtggtggccaccagccagcccaagaccatgggccaccaggacaagaaggacctgtgtggccagtgcagccccctgggctgcctgatccgcatcctgattgatggcatcagcctgggcctgaccctgcggctgtgggatgtgtacctggtggagggggagcaggccctgatgcccatcaccagaattgccttcaaggtgcagcagaagaggctgaccaagaccagccgctgtggcccctgggcccgcttctgcaacagatttgtggacacctgggccagagatgaggacacagtgctgaagcacctgcgggcctccatgaagaagctgaccaggaagcagggcgacctgcccccaccagccaagccagagcagggcagcagcgccagcaggcctgtgcctgccagccggggcggcaagaccctgtgcaagggggaccggcaggcccctcctggccccccagcccgcttcccccggcccatctggagcgccagccccccccgggcccccaggagcagcaccccctgccctggaggagctgtgcgggaggacacctaccctgtgggcacccagggcgtgcccagccctgccctggcccagggcggcccccagggctcctggaggttcctgcagtggaacagcatgccccggctgcccacagacctggatgtggagggcccctggttccgccactatgacttccggcagagctgctgggtgcgggccatcagccaggaggaccagctggccccctgctggcaggccgagcaccctgctgagcgggtgcgcagcgcctttgctgcccccagcacagacagcgaccagggcacccccttccgggccagagatgagcagccctgtgcccccaccagcggcccctgcctgtgtggcctgcacctggagagcagccagttccccccaggcttctag

SEQ ID NO: 172759 - DNA, 1650 bp, synthetic construct
  misc_feature 1..1650: note = Description of Artificial Sequence: Synthetic coding sequence
  source 1..1650: mol_type = other DNA
atggatgtggtggaggtggccggctcctggtgggcccaggagcgggaggacatcatcatgaagtatgagaagggccaccgggccggcctgcctgaggacaagggccccaagcccttccgcagctacaacaacaacgtggaccacctgggcatcgtgcatgaaacagagctgccccccctgacagcccgggaggccaagcagatcagaagagagatcagcaggaagagcaagtgggtggacatgctgggggactgggagaagtacaagagcagcaggaagctgattgaccgggcctacaagggcatgcccatgaacatccggggccccatgtggagcgtgctgctgaacatcgaggagatgaagctgaagaaccctggccgctaccagatcatgaaggagaagggcaagaggagcagcgagcacatccagagaattgaccgggacatcagcggcaccctgaggaagcacatgttcttccgggacagatatggcaccaagcagcgggagctgctgcacatcctgctggcctatgaggagtacaaccctgaggtgggctactgccgggacctgagccacatcgccgccctcttcctgctgtacctgcctgaggaggatgccttctgggccctggtgcagctgctggccagcgagcggcacagcctgcagggcttccacagccccaacggcggcaccgtgcagggcctgcaggaccagcaggagcacgtggtggccaccagccagcccaagaccatgggccaccaggacaagaaggacctgtgtggccagtgcagccccctgggctgcctgatccgcatcctgattgatggcatcagcctgggcctgaccctgcggctgtgggatgtgtacctggtggagggggagcaggccctgatgcccatcaccagaattgccttcaaggtgcagcagaagaggctgaccaagaccagccgctgtggcccctgggcccgcttctgcaacagatttgtggacacctgggccagagatgaggacacagtgctgaagcacctgcgggcctccatgaagaagctgaccaggaagcagggcgacctgcccccaccagccaagccagagcagggcagcagcgccagcaggcctgtgcctgccagccggggcggcaagaccctgtgcaagggggaccggcaggcccctcctggccccccagcccgcttcccccggcccatctggagcgccagccccccccgggcccccaggagcagcaccccctgccctggaggagctgtgcgggaggacacctaccctgtgggcacccagggcgtgcccagccctgccctggcccagggcggcccccagggctcctggaggttcctgcagtggaacagcatgccccggctgcccacagacctggatgtggagggcccctggttccgccactatgacttccggcagagctgctgggtgcgggccatcagccaggaggaccagctggccccctgctggcaggccgagcaccctgctgagcgggtgcgcagcgcctttgctgcccccagcacagacagcgaccagggcacccccttccgggccagagatgagcagcagtgtgcccccaccagcggcccctgcctgtgtggcctgcacctggagagcagccagttccccccaggcttctag

SEQ ID NO: 172760 - DNA, 1650 bp, synthetic construct; identical to SEQ ID NO: 172759
  misc_feature 1..1650: note = Description of Artificial Sequence: Synthetic coding sequence
  source 1..1650: mol_type = other DNA

SEQ ID NO: 172761 - DNA, 1584 bp, synthetic construct
  misc_feature 1..1584: note = Description of Artificial Sequence: Synthetic coding sequence
  source 1..1584: mol_type = other DNA
atggatgtggtggaggtggccggctcctggtgggcccaggagcgggaggacatcatcatgaagtatgagaagggccaccgggccggcctgcctgaggacaagggccccaagcccttccgcagctacaacaacaacgtggaccacctgggcatcgtgcatgaaacagagctgccccccctgacagcccgggaggccaagcagatcagaagagagatcagcaggaagagcaagtgggtggacatgctgggggactgggagaagtacaagagcagcaggaagctgattgaccgggcctacaagggcatgcccatgaacatccggggccccatgtggagcgtgctgctgaacatcgaggagatgaagctgaagaaccctggccgctaccagatcatgaaggagaagggcaagaggagcagcgagcacatccagagaattgaccgggacatcagcggcaccctgaggaagcacatgttcttccgggacagatatggcaccaagcagcgggagctgctgcacatcctgctggcctatgaggagtacaaccctgaggtgggctactgccgggacctgagccacatcgccgccctcttcctgctgtacctgcctgaggaggatgccttctgggccctggtgcagctgctggccagcgagcggcacagcctgcagggcttccacagccccaacggcggcaccgtgcagggcctgcaggaccagcaggagcacgtggtggccaccagccagcccaagaccatgggccaccagatcagcctgggcctgaccctgcggctgtgggatgtgtacctggtggagggggagcaggccctgatgcccatcaccagaattgccttcaaggtgcagcagaagaggctgaccaagaccagccgctgtggcccctgggcccgcttctgcaacagatttgtggacacctgggccagagatgaggacacagtgctgaagcacctgcgggcctccatgaagaagctgaccaggaagcagggcgacctgcccccaccagccaagccagagcagggcagcagcgccagcaggcctgtgcctgccagccggggcggcaagaccctgtgcaagggggaccggcaggcccctcctggccccccagcccgcttcccccggcccatctggagcgccagccccccccgggcccccaggagcagcaccccctgccctggaggagctgtgcgggaggacacctaccctgtgggcacccagggcgtgcccagccctgccctggcccagggcggcccccagggctcctggaggttcctgcagtggaacagcatgccccggctgcccacagacctggatgtggagggcccctggttccgccactatgacttccggcagagctgctgggtgcgggccatcagccaggaggaccagctggccccctgctggcaggccgagcaccctgctgagcgggtgcgcagcgcctttgctgcccccagcacagacagcgaccagggcacccccttccgggccagagatgagcagcagtgtgcccccaccagcggcccctgcctgtgtggcctgcacctggagagcagccagttccccccaggcttctag

SEQ ID NO: 172762 - DNA, 1584 bp, synthetic construct; identical to SEQ ID NO: 172761
  misc_feature 1..1584: note = Description of Artificial Sequence: Synthetic coding sequence
  source 1..1584: mol_type = other DNA

SEQ ID NO: 172763 - DNA, 1410 bp, synthetic construct
  misc_feature 1..1410: note = Description of Artificial Sequence: Synthetic coding sequence
  source 1..1410: mol_type = other DNA
atgctgggggactgggagaagtacaagagcagcaggaagctgattgaccgggcctacaagggcatgcccatgaacatccggggccccatgtggagcgtgctgctgaacatcgaggagatgaagctgaagaaccctggccgctaccagatcatgaaggagaagggcaagaggagcagcgagcacatccagagaattgaccgggacatcagcggcaccctgaggaagcacatgttcttccgggacagatatggcaccaagcagcgggagctgctgcacatcctgctggcctatgaggagtacaaccctgaggtgggctactgccgggacctgagccacatcgccgccctcttcctgctgtacctgcctgaggaggatgccttctgggccctggtgcagctgctggccagcgagcggcacagcctgcagggcttccacagccccaacggcggcaccgtgcagggcctgcaggaccagcaggagcacgtggtggccaccagccagcccaagaccatgggccaccaggacaagaaggacctgtgtggccagtgcagccccctgggctgcctgatccgcatcctgattgatggcatcagcctgggcctgaccctgcggctgtgggatgtgtacctggtggagggggagcaggccctgatgcccatcaccagaattgccttcaaggtgcagcagaagaggctgaccaagaccagccgctgtggcccctgggcccgcttctgcaacagatttgtggacacctgggccagagatgaggacacagtgctgaagcacctgcgggcctccatgaagaagctgaccaggaagcagggcgacctgcccccaccagccaagccagagcagggcagcagcgccagcaggcctgtgcctgccagccggggcggcaagaccctgtgcaagggggaccggcaggcccctcctggccccccagcccgcttcccccggcccatctggagcgccagccccccccgggcccccaggagcagcaccccctgccctggaggagctgtgcgggaggacacctaccctgtgggcacccagggcgtgcccagccctgccctggcccagggcggcccccagggctcctggaggttcctgcagtggaacagcatgccccggctgcccacagacctggatgtggagggcccctggttccgccactatgacttccggcagagctgctgggtgcgggccatcagccaggaggaccagctggccccctgctggcaggccgagcaccctgctgagcgggtgcgcagcgcctttgctgcccccagcacagacagcgaccagggcacccccttccgggccagagatgagcagcagtgtgcccccaccagcggcccctgcctgtgtggcctgcacctggagagcagccagttccccccaggcttctag

SEQ ID NO: 172764 - DNA, 1410 bp, synthetic construct
  misc_feature 1..1410: note = Description of Artificial Sequence: Synthetic coding sequence
  source 1..1410: mol_type = other DNA
atgctgggggactgggagaagtacaagagcagcaggaagctgattgaccgggcctacaagggcatgcccatgaacatccggggccccatgtggagcgtgctgctgaacatcgaggagatgaagctgaagaaccctggccgctaccagatcatgaaggagaagggcaagaggagcagcgagcacatccagagaattgaccgggacatcagcggcaccctgaggaagcacatgttcttccgggacagatatggcaccaagcagcgggagctgctgcacatcctgctggcctatgaggagtacaaccctgaggtgggctactgccgggacctgagccacatcgccgccctcttcctgctgtacctgcctgaggaggatgccttctgggccctggtgcagctgctggccagcgagcggcacagcctgcagggcttccacagccccaacggcggcaccgtgcagggcctgcaggaccagcaggagcacgtggtggccaccagccagcccaagaccatgggccaccaggacaagaaggacctgtgtggccagtgcagccccctgggctgcctgatccgcatcctgattgatggcatcagcctgggcctgaccctgcggctgtgggatgtgtacctggtggagggggagcaggccctgatgcccatcaccagaattgccttcaaggtgcagcagaagaggctgaccaagaccagccgctgtggcccctgggcccgcttctgcaacagatttgtggacacctgggccagagatgaggacacagtgctgaagcacctgcgggcctccatgaagaagctgaccaggaagcagggcgacctgcccccaccagccaagccagagcagggcagcagcgccagcaggcctgtgcctgccagccggggcggcaagaccctgtgcaagggggaccggcaggcccctcctggccccccagcctggttcccccggcccatctggagcgccagccccccccgggcccccaggagcagcaccccctgccctggaggagctgtgcgggaggacacctaccctgtgggcacccagggcgtgcccagccctgccctggcccagggcggcccccagggctcctggaggttcctgcagtggaacagcatgccccggctgcccacagacctggatgtggagggcccctggttccgccactatgacttccggcagagctgctgggtgcgggccatcagccaggaggaccagctggccccctgctggcaggccgagcaccctgctgagcgggtgcgcagcgcctttgctgcccccagcacagacagcgaccagggcacccccttccgggccagagatgagcagcagtgtgcccccaccagcggcccctgcctgtgtggcctgcacctggagagcagccagttccccccaggcttctag

SEQ ID NO: 172765 - DNA, 1650 bp, synthetic construct
  misc_feature 1..1650: note = Description of Artificial Sequence: Synthetic coding sequence
  source 1..1650: mol_type = other DNA
atggatgtggtggaggtggccggctcctggtgggcccaggagcgggaggacatcatcatgaagtatgagaagggccaccaggccggcctgcctgaggacaagggccccaagcccttccgcagctacaacaacaacgtggaccacctgggcatcgtgcatgaaacagagctgccccccctgacagcccgggaggccaagcagatcagaagagagatcagcaggaagagcaagtgggtggacatgctgggggactgggagaagtacaagagcagcaggaagctgattgaccgggcctacaagggcatgcccatgaacatccggggccccatgtggagcgtgctgctgaacatcgaggagatgaagctgaagaaccctggccgctaccagatcatgaaggagaagggcaagaggagcagcgagcacatccagagaattgaccgggacatcagcggcaccctgaggaagcacatgttcttccgggacagatatggcaccaagcagcgggagctgctgcacatcctgctggcctatgaggagtacaaccctgaggtgggctactgccgggacctgagccacatcgccgccctcttcctgctgtacctgcctgaggaggatgccttctgggccctggtgcagctgctggccagcgagcggcacagcctgcagggcttccacagccccaacggcggcaccgtgcagggcctgcaggaccagcaggagcacgtggtggccaccagccagcccaagaccatgggccaccaggacaagaaggacctgtgtggccagtgcagccccctgggctgcctgatccgcatcctgattgatggcatcagcctgggcctgaccctgcggctgtgggatgtgtacctggtggagggggagcaggccctgatgcccatcaccagaattgccttcaaggtgcagcagaagaggctgaccaagaccagccgctgtggcccctgggcccgcttctgcaacagatttgtggacacctgggccagagatgaggacacagtgctgaagcacctgcgggcctccatgaagaagctgaccaggaagcagggcgacctgcccccaccagccaagccagagcagggcagcagcgccagcaggcctgtgcctgccagccggggcggcaagaccctgtgcaagggggaccggcaggcccctcctggccccccagcccgcttcccccggcccatctggagcgccagccccccccgggcccccaggagcagcaccccctgccctggaggagctgtgcgggaggacacctaccctgtgggcacccagggcgtgcccagccctgccctggcccagggcggcccccagggctcctggaggttcctgcagtggaacagcatgccccggctgcccacagacctggatgtggagggcccctggttccgccactatgacttccggcagagctgctgggtgcgggccatcagccaggaggaccagctggccccctgctggcaggccgagcaccctgctgagcgggtgcgcagcgcctttgctgcccccagcacagacagcgaccagggcacccccttccgggccagagatgagcagcagtgtgcccccaccagcggcccctgcctgtgtggcctgcacctggagagcagccagttccccccaggcttctag

SEQ ID NO: 172766 - DNA, 1410 bp, synthetic construct; identical to SEQ ID NO: 172764
  misc_feature 1..1410: note = Description of Artificial Sequence: Synthetic coding sequence
  source 1..1410: mol_type = other DNA

SEQ ID NO: 172767 - DNA, 3708 bp, synthetic construct
  misc_feature 1..3708: note = Description of Artificial Sequence: Synthetic coding sequence
  source 1..3708: mol_type = other DNA
atggagccccccagctgcatccaggatgagcccttcccccaccccctggagcctgagcccggggtgtctgcccagcccggccctgggaagcccagcgacaagcgcttccggctgtggtacgtgggcggcagctgcctggaccacaggaccaccctgcccatgctgccctggctgatggccgagatcagaagaagaagccagaagccagaggccggcggctgtggggccccagctgcccgggaggtgatcctggtgctgagcgcccccttcctgcgctgtgtgcctgcccctggagctggggccagcggcggcaccagccccagcgccacccagcccaacccagctgtgttcatctttgagcacaaggcccagcacatcagccgcttcatccacaacagccatgacctgacctactttgcctacctgatcaaggcccagccagatgatcctgagagccagatggcctgccacgtgttccgggccacagaccccagccaggtgcctgatgtgatcagcagcatccggcagctgagcaaggccgccatgaaggaggatgccaagcccagcaaggacaatgaagatgccttctacaacagccagaagtttgaggtgctgtactgcggcaaggtgacagtgacccacaagaaggcccccagcagcctgattgatgactgcatggagaagttcagcctgcacgagcagcagaggctgaagatccagggcgagcagaggggccctgaccccggggaggacctggccgacctggaggtggtggtgcccggcagccctggggactgcctgcctgaggaggctgatggaacagacacccacctgggcctgcctgctggggccagccagcctgccctgaccagcagccgggtgtgcttccctgagcgcatcctggaggacagcggctttgatgagcagcaggagttccgcagccgctgcagctctgtgactggagtgcagaggagagtgcatgagggcagccagaagagccagcccaggagaagacatgccagcgcccccagccacgtgcagcccagcgacagcgagaagaacagaaccatgctgttccaggtgggccgctttgagatcaacctgatcagcccagacaccaagtctgtggtgctggagaagaacttcaaggacatcagcagctgcagccagggcatcaagcacgtggaccacttcggcttcatctgccgggagagccctgagcccggcctgagccagtacatctgctacgtgttccagtgtgccagcgagagcctggtggatgaggtgatgctgaccctgaagcaggccttcagcacagctgctgccctgcagagcgccaagacccagatcaagctgtgtgaggcctgccccatgcacagcctgcacaagctgtgtgagcgcatcgagggcctgtacccaccccgggccaagctggtgatccagaggcacctgagcagcctgacagacaatgagcaggccgacatctttgagcgggtgcagaagatgaagcctgtgtctgaccaggaggagaatgagctggtgatcctgcacctgcggcagctgtgtgaggccaagcagaagacccacgtgcacatcggggagggccccagcaccatcagcaacagcaccatcccagaaaatgccaccagcagcggccgcttcaagctggacatcctgaagaacaaggccaagaggagcctgaccagcagcctggagaacatcttcagcagaggagccaacaggatgaggggccgcctgggctctgtggacagctttgagaggagcaacagcctggccagcgagaaggactacagccctggggacagccccccaggcaccccaccagccagcccccccagcagcgcctggcagaccttcccagaagaagattctgacagcccccagttcagaagaagagcccacaccttcagccacccccccagcagcaccaagaggaagctgaacctgcaggacggccgggcccagggcgtgcgcagccccctgctgcggcagagcagcagcgagcagtgcagtgatggagagggcaggaagaggaccagcagcacctgcagcaatgaaagcctgtctgtgggcggcacctctgtgaccccccggcgcatctcctggaggcagaggatcttcctgcgggtggccagccccatgaacaagagccccagcgccatgcagcagcaggacggcctggacagaaatgagctgctgcccctgagccccctgagccccaccatggaggaggagcccctggtggtgttcctgtctggagaagatgatcctgagaagattgaggagaggaagaagagcaaggagctgcggagcctgtggaggaaggccatccaccagcagatcctgctgctgaggatggagaaggagaaccagaagctggaggccagcagagatgagctgcagagcaggaaggtgaagctggactatgaggaggtgggcgcctgccagaaggaggtgctgatcacctgggacaagaagctgctgaactgccgggccaagatccgctgtgacatggaggacatccacaccctgctgaaggagggcgtgcccaagagccggcggggggagatctggcagttcctggccctgcagtaccgcctgcggcaccggctgcccaacaagcagcagcccccagacatctcctacaaggagctgctgaagcagctgacagcccagcagcacgccatcctggtggacctgggccgcaccttccccacccacccctacttctctgtgcagctgggccctggccagctgagcctcttcaacctgctgaaggcctacagcctgctggacaaggaggtgggctactgccagggcatcagctttgtggccggcgtgctgctgctgcacatgtctgaggagcaggcctttgagatgctgaagttcctgatgtatgacctgggcttcaggaagcagtacagaccagacatgatgagcctgcagatccagatgtaccagctgagccggctgctgcatgactaccaccgggacctgtacaaccacctggaggagaatgagatcagccccagcctgtatgctgccccctggttcctgaccctgtttgccagccagttcagcctgggctttgtggcccgggtgtttgacatcatcttcctgcagggcacagaggtgatcttcaaggtggccctgagcctgctgagcagccaggagaccctcatcatggagtgtgagagctttgaaaatattgtggagttcctgaagaacaccctgcctgacatgaacaccagcgagatggagaagatcatcacccaggtgtttgagatggacatcagcaagcagctgcacgcctatgaggtggagtaccacgtgctgcaggatgagctgcaggagagcagctacagctgtgaagattctgagaccctggagaagctggagcgggccaacagccagctgaagaggcagaacatggacctgctggagaagctgcaggtggcccacaccaagatccaggccctggagagcaacctggagaacctgctgacccgggagaccaagatgaagagcctcatccgcaccctggagcaggagaagatggcctaccagaagacagtggagcagctgaggaagctgctgcctgcagatgccctggtgaactgtgacctgctgctgcgggacctgaactgcaaccccaacaacaaggccaagattggcaacaagccctag

SEQ ID NO: 172768 - DNA, 3897 bp, synthetic construct
  misc_feature 1..3897: note = Description of Artificial Sequence: Synthetic coding sequence
  source 1..3897: mol_type = other DNA
atggagccccccagctgcatccaggatgagcccttcccccaccccctggagcctgagcccggggtgtctgcccagcccggccctgggaagcccagcgacaagcgcttccggctgtggtacgtgggcggcagctgcctggaccacaggaccaccctgcccatgctgccctggctgatggccgagatcagaagaagaagccagaagccagaggccggcggctgtggggccccagctgcccgggaggtgatcctggtgctgagcgcccccttcctgcgctgtgtgcctgcccctggagctggggccagcggcggcaccagccccagcgccacccagcccaacccagctgtgttcatctttgagcacaaggcccagcacatcagccgcttcatccacaacagccatgacctgacctactttgcctacctgatcaaggcccagccagatgatcctgagagccagatggcctgccacgtgttccgggccacagaccccagccaggtgcctgatgtgatcagcagcatccggcagctgagcaaggccgccatgaaggaggatgccaagcccagcaaggacaatgaagatgccttctacaacagccagaagtttgaggtgctgtactgcggcaaggtgacagtgacccacaagaaggcccccagcagcctgattgatgactgcatggagaagttcagcctgcacgagcagcagaggctgaagatccagggcgagcagaggggccctgaccccggggaggacctggccgacctggaggtggtggtgcccggcagccctggggactgcctgcctgaggaggctgatggaacagacacccacctgggcctgcctgctggggccagccagcctgccctgaccagcagccgggtgtgcttccctgagcgcatcctggaggacagcggctttgatgagcagcaggagttccgcagccgctgcagctctgtgactggagtgcagaggagagtgcatgagggcagccagaagagccagcccaggagaagacatgccagcgcccccagccacgtgcagcccagcgacagcgagaagaacagaaccatgctgttccaggtgggccgctttgagatcaacctgatcagcccagacaccaagtctgtggtgctggagaagaacttcaaggacatcagcagctgcagccagggcatcaagcacgtggaccacttcggcttcatctgccgggagagccctgagcccggcctgagccagtacatctgctacgtgttccagtgtgccagcgagagcctggtggatgaggtgatgctgaccctgaagcaggccttcagcacagctgctgccctgcagagcgccaagacccagatcaagctgtgtgaggcctgccccatgcacagcctgcacaagctgtgtgagcgcatcgagggcctgtacccaccccgggccaagctggtgatccagaggcacctgagcagcctgacagacaatgagcaggccgacatctttgagcgggtgcagaagatgaagcctgtgtctgaccaggaggagaatgagctggtgatcctgcacctgcggcagctgtgtgaggccaagcagaagacccacgtgcacatcggggagggccccagcaccatcagcaacagcaccatcccagaaaatgccaccagcagcggccgcttcaagctggacatcctgaagaacaaggccaagaggagcctgaccagcagcctggagaacatcttcagcagaggagccaacaggatgaggggccgcctgggctctgtggacagctttgagaggagcaacagcctggccagcgagaaggactacagccctggggacagccccccaggcaccccaccagccagcccccccagcagcgcctggcagaccttcccagaagaagattctgacagcccccagttcagaagaagagcccacaccttcagccacccccccagcagcaccaagaggaagctgaacctgcaggacggccgggcccagggcgtgcgcagccccctgctgcggcagagcagcagcgagcagtgcagcaacctgagctctgtgcggaggatgtacaaggagagcaacagcagcagcagcctgcccagcctgcacaccagcttcagcgcccccagcttcaccgcccccagcttcctgaagagcttctaccagaacagcggccgcctgagcccccagtatgaaaatgagatccggcaggacacagccagcgagagcagtgatggagagggcaggaagaggaccagcagcacctgcagcaatgaaagcctgtctgtgggcggcacctctgtgaccccccggcgcatctcctggaggcagaggatcttcctgcgggtggccagccccatgaacaagagccccagcgccatgcagcagcaggacggcctggacagaaatgagctgctgcccctgagccccctgagccccaccatggaggaggagcccctggtggtgttcctgagcggggaggatgatcctgagaagattgaggagaggaagaagagcaaggagctgcggagcctgtggaggaaggccatccaccagcagatcctgctgctgaggatggagaaggagaaccagaagctggaggccagcagagatgagctgcagagcaggaaggtgaagctggactatgaggaggtgggcgcctgccagaaggaggtgctgatcacctgggacaagaagctgctgaactgccgggccaagatccgctgtgacatggaggacatccacaccctgctgaaggagggcgtgcccaagagcagaagaggagagatctggcagttcctggccctgcagtaccgcctgcggcaccggctgcccaacaagcagcagcccccagacatctcctacaaggagctgctgaagcagctgacagcccagcagcacgccatcctggtggacctgggccgcaccttccccacccacccctacttctctgtgcagctgggccctggccagctgagcctcttcaacctgctgaaggcctacagcctgctggacaaggaggtgggctactgccagggcatcagctttgtggccggcgtgctgctgctgcacatgtctgaggagcaggcctttgagatgctgaagttcctgatgtatgacctgggcttcaggaagcagtacagaccagacatgatgagcctgcagatccagatgtaccagctgagccggctgctgcatgactaccaccgggacctgtacaaccacctggaggagaatgagatcagccccagcctgtatgctgccccctggttcctgaccctgtttgccagccagttcagcctgggctttgtggcccgggtgtttgacatcatcttcctgcagggcacagaggtgatcttcaaggtggccctgagcctgctgagcagccaggagaccctcatcatggagtgtgagagctttgagaacatcgtggagttcctgaagaacaccctgcctgacatgaacaccagcgagatggagaagatcatcacccaggtgtttgagatggacatcagcaagcagctgcacgcctatgaggtggagtaccacgtgctgcaggatgagctgcaggagagcagctacagctgtgaggacagcgagaccctggagaagctggagcgggccaacagccagctgaagaggcagaacatggacctgctggagaagctgcaggtggcccacaccaagatccaggccctggagagcaacctggagaacctgctgacccgggagaccaagatgaagagcctcatccgcaccctggagcaggagaagatggcctaccagaagacagtggagcagctgaggaagctgctgcctgcagatgccctggtgaactgtgacctgctgctgcgggacctgaactgcaaccccaacaacaaggccaagattggcaacaagccctag

SEQ ID NO: 172769 - DNA, 849 bp, synthetic construct
  misc_feature 1..849: note = Description of Artificial Sequence: Synthetic coding sequence
  source 1..849: mol_type = other DNA
gacaatgagcaggccgacatctttgagcgggtgcagaagatgaagcctgtgtctgaccaggaggagaatgagctggtgatcctgcacctgcggcagctgtgtgaggccaagcagaagacccacgtgcacatcggggagggccccagcaccatcagcaacagcaccatcccagaaaatgccaccagcagcggccgcttcaagctggacatcctgaagaacaaggccaagaggagcctgaccagcagcctggagaacatcttcagcagaggagccaacaggatgaggggccgcctgggctctgtggacagctttgagaggagcaacagcctggccagcgagaaggactacagccctggggacagccccccaggcaccccaccagccagcccccccagcagcgcctggcagaccttcccagaagaagattctgacagcccccagttcagaagaagagcccacaccttcagccacccccccagcagcaccaagaggaagctgaacctgcaggacggccgggcccagggcgtgcgcagccccctgctgcggcagagcagcagcgagcagtgcagtgatggagagggcaggaagaggaccagcagcacctgcagcaatgaaagcctgtctgtgggcggcacctctgtgaccccccggcgcatctcctggaggcagaggatcttcctgcgggtggccagccccatgaacaagagccccagcgccatgcagcagcaggacggcctggacagaaatgagctgctgcccctgagccccctgagccccaccatggaggaggagcccctggtggtgttcctgtctggagaagatgatcctgagaagattgaggagaggtag

SEQ ID NO: 172770 - DNA, 1389 bp, synthetic construct
  misc_feature 1..1389: note = Description of Artificial Sequence: Synthetic coding sequence
  source 1..1389: mol_type = other DNA
atgaacaagagccccagcgccatgcagcagcaggacggcctggacagaaatgagctgctgcccctgagccccctgagccccaccatggaggaggagcccctggtggtgttcctgtctggagaagatgatcctgagaagattgaggagaggaagaagagcaaggagctgcggagcctgtggaggaaggccatccaccagcagatcctgctgctgaggatggagaaggagaaccagaagctggagggcgtgcccaagagcagaagaggagagatctggcagttcctggccctgcagtaccgcctgcggcaccggctgcccaacaagcagcagcccccagacatctcctacaaggagctgctgaagcagctgacagcccagcagcacgccatcctggtggacctgggccgcaccttccccacccacccctacttctctgtgcagctgggccctggccagctgagcctcttcaacctgctgaaggcctacagcctgctggacaaggaggtgggctactgccagggcatcagctttgtggccggcgtgctgctgctgcacatgtctgaggagcaggcctttgagatgctgaagttcctgatgtatgacctgggcttcaggaagcagtacagaccagacatgatgagcctgcagatccagatgtaccagctgagccggctgctgcatgactaccaccgggacctgtacaaccacctggaggagaatgagatcagccccagcctgtatgctgccccctggttcctgaccctgtttgccagccagttcagcctgggctttgtggcccgggtgtttgacatcatcttcctgcagggcacagaggtgatcttcaaggtggccctgagcctgctgagcagccaggagaccctcatcatggagtgtgagagctttgagaacatcgtggagttcctgaagaacaccctgcctgacatgaacaccagcgagatggagaagatcatcacccaggtgtttgagatggacatcagcaagcagctgcacgcctatgaggtggagtaccacgtgctgcaggatgagctgcaggagagcagctacagctgtgaggacagcgagaccctggagaagctggagcgggccaacagccagctgaagaggcagaacatggacctgctggagaagctgcaggtggcccacaccaagatccaggccctggagagcaacctggagaacctgctgacccgggagaccaagatgaagagcctcatccgcaccctggagcaggagaagatggcctaccagaagacagtggagcagctgaggaagctgctgcctgcagatgccctggtgaactgtgacctgctgctgcgggacctgaactgcaaccccaacaacaaggccaagattggcaacaagccctag

SEQ ID NO: 172771 - DNA, 3873 bp, synthetic construct
  misc_feature 1..3873: note = Description of Artificial Sequence: Synthetic coding sequence
  source 1..3873: mol_type = other DNA
atggagccccccagctgcatccaggatgagcccttcccccaccccctggagcctgagcccggggtgtctgcccagcccggccctgggaagcccagcgacaagcgcttccggctgtggtacgtgggcggcagctgcctggaccacaggaccaccctgcccatgctgccctggctgatggccgagatcagaagaagaagccagaagccagaggccggcggctgtggggccccagctgcccgggaggtgatcctggtgctgagcgcccccttcctgcgctgtgtgcctgcccctggagctggggccagcggcggcaccagccccagcgccacccagcccaacccagctgtgttcatctttgagcacaaggcccagcacatcagccgcttcatccacaacagccatgacctgacctactttgcctacctgatcaaggcccagccagatgatcctgagagccagatggcctgccacgtgttccgggccacagaccccagccaggtgcctgatgtgatcagcagcatccggcagctgagcaaggccgccatgaaggaggatgccaagcccagcaaggacaatgaagatgccttctacaacagccagaagtttgaggtgctgtactgcggcaaggtgacagtgacccacaagaaggcccccagcagcctgattgatgactgcatggagaagttcagcctgcacgagcagcagaggctgaagatccagggcgagcagaggggccctgaccccggggaggacctggccgacctggaggtggtggtgcccggcagccctggggactgcctgcctgaggaggctgatggaacagacacccacctgggcctgcctgctggggccagccagcctgccctgaccagcagccgggtgtgcttccctgagcgcatcctggaggacagcggctttgatgagcagcaggagttccgcagccgctgcagctctgtgactggagtgcagaggagagtgcatgagggcagccagaagagccagcccaggagaagacatgccagcgcccccagccacgtgcagcccagcgacagcgagaagaacagaaccatgctgttccaggtgggccgctttgagatcaacctgatcagcccagacaccaagtctgtggtgctggagaagaacttcaaggacatcagcagctgcagccagggcatcaagcacgtggaccacttcggcttcatctgccgggagagccctgagcccggcctgagccagtacatctgctacgtgttccagtgtgccagcgagagcctggtggatgaggtgatgctgaccctgaagcaggccttcagcacagctgctgccctgcagagcgccaagacccagatcaagctgtgtgaggcctgccccatgcacagcctgcacaagctgtgtgagcgcatcgagggcctgtacccaccccgggccaagctggtgatccagaggcacctgagcagcctgacagacaatgagcaggccgacatctttgagcgggtgcagaagatgaagcctgtgtctgaccaggaggagaatgagctggtgatcctgcacctgcggcagctgtgtgaggccaagcagaagacccacgtgcacatcggggagggccccagcaccatcagcaacagcaccatcccagaaaatgccaccagcagcggccgcttcaagctggacatcctgaagaacaaggccaagaggagcctgaccagcagcctggagaacatcttcagcagaggagccaacaggatgaggggccgcctgggctctgtggacagctttgagaggagcaacagcctggccagcgagaaggactacagccctggggacagccccccaggcaccccaccagccagcccccccagcagcgcctggcagaccttcccagaagaagattctgacagcccccagttcagaagaagagcccacaccttcagccacccccccagcagcaccaagaggaagctgaacctgcaggacggccgggcccagggcgtgcgcagccccctgctgcggcagagcagcagcgagcagtgcagcaacctgagctctgtgcggaggatgtacaaggagagcaacagcagcagcagcctgcccagcctgcacaccagcttcagcgcccccagcttcaccgcccccagcttcctgaagagcttctaccagaacagcggccgcctgagcccccagtatgaaaatgagatcagtgatggagagggcaggaagaggaccagcagcacctgcagcaatgaaagcctgtctgtgggcggcacctctgtgaccccccggcgcatctcctggaggcagaggatcttcctgcgggtggccagccccatgaacaagagccccagcgccatgcagcagcaggacggcctggacagaaatgagctgctgcccctgagccccctgagccccaccatggaggaggagcccctggtggtgttcctgagcggggaggatgatcctgagaagattgaggagaggaagaagagcaaggagctgcggagcctgtggaggaaggccatccaccagcagatcctgctgctgaggatggagaaggagaaccagaagctggaggccagcagagatgagctgcagagcaggaaggtgaagctggactatgaggaggtgggcgcctgccagaaggaggtgctgatcacctgggacaagaagctgctgaactgccgggccaagatccgctgtgacatggaggacatccacaccctgctgaaggagggcgtgcccaagagcagaagaggagagatctggcagttcctggccctgcagtaccgcctgcggcaccggctgcccaacaagcagcagcccccagacatctcctacaaggagctgctgaagcagctgacagcccagcagcacgccatcctggtggacctgggccgcaccttccccacccacccctacttctctgtgcagctgggccctggccagctgagcctcttcaacctgctgaaggcctacagcctgctggacaaggaggtgggctactgccagggcatcagctttgtggccggcgtgctgctgctgcacatgtctgaggagcaggcctttgagatgctgaagttcctgatgtatgacctgggcttcaggaagcagtacagaccagacatgatgagcctgcagatccagatgtaccagctgagccggctgctgcatgactaccaccgggacctgtacaaccacctggaggagaatgagatcagccccagcctgtatgctgccccctggttcctgaccctgtttgccagccagttcagcctgggctttgtggcccgggtgtttgacatcatcttcctgcagggcacagaggtgatcttcaaggtggccctgagcctgctgagcagccaggagaccctcatcatggagtgtgagagctttgagaacatcgtggagttcctgaagaacaccctgcctgacatgaacaccagcgagatggagaagatcatcacccaggtgtttgagatggacatcagcaagcagctgcacgcctatgaggtggagtaccacgtgctgcaggatgagctgcaggagagcagctacagctgtgaggacagcgagaccctggagaagctggagcgggccaacagccagctgaagaggcagaacatggacctgctggagaagctgcaggtggcccacaccaagatccaggccctggagagcaacctggagaacctgctgacccgggagaccaagatgaagagcctcatccgcaccctggagcaggagaagatggcctaccagaagacagtggagcagctgaggaagctgctgcctgcagatgccctggtgaactgtgacctgctgctgcgggacctgaactgcaaccccaacaacaaggccaagattggcaacaagccctag

SEQ ID NO: 172772 - DNA, 1197 bp, synthetic construct
  misc_feature 1..1197: note = Description of Artificial Sequence: Synthetic coding sequence
  source 1..1197: mol_type = other DNA
atgcacttcagcacagtgacccgggacatggaggccttcaccgccagcagcctgagcagcctgggcgccgccggcggcttccctggggccgccagccctggagctgacccctacggcccccgggagcccccacctcctccacccaggtatgacccctgtgccgccgccgcccctggggcccctggccccccacctccaccccacgcctacccctttgccccagctgctggggccgccaccagcgctgctgctgagcctgagggccctggggccagctgtgccgccgccgccaaggcccctgtgaagaagaatgccaaggtggccggcgtgtctgtgcagctggagatgaaggccctgtgggatgagttcaaccagctgggcacagagatgattgtgaccaaggccggccgcaggatgttccccaccttccaggtgaagctgtttggcatggaccccatggctgactacatgctgctgatggactttgtgcctgtggatgacaagcgctaccgctatgccttccacagcagctcctggctggtggccggcaaggctgaccctgccaccccaggccgggtgcactaccacccagacagccctgccaagggggcccagtggatgaagcagatcgtgtcctttgacaagctgaagctgaccaacaacctgctggatgacaatggccacatcatcctgaacagcatgcaccgctaccagccccgcttccacgtggtgtatgtggaccccaggaaggacagcgagaagtatgcagaggagaacttcaagacctttgtgtttgaggagacccgcttcaccgctgtgacagcctaccagaaccaccgcatcacccagctgaagatcgccagcaacccctttgccaagggcttccgggactgtgaccctgaggactggcccaggaaccacaggcctggggccctgcccctgatgtctgcctttgcccggagcaggaaccctgtggccagccccacccagcccagcggcacagagaagggcggccacgtgctgaaggacaaggaggtgaaggccgagaccagcaggaacaccccagagcgggaggtggagctgctgagagatgctgggggctgtgtgaacctgggcctgccctgcccagctgagtgccagcccttcaacacccagggcctggtggccggccgcacagctggggaccggctgtgctag

SEQ ID NO: 172773 - DNA, 1488 bp, synthetic construct
  misc_feature 1..1488: note = Description of Artificial Sequence: Synthetic coding sequence
  source 1..1488: mol_type = other DNA
atgcacttcagcacagtgacccgggacatggaggccttcaccgccagcagcctgagcagcctgggcgccgccggcggcttccctggggccgccagccctggagctgacccctacggcccccgggagcccccacctcctccacccaggtatgacccctgtgccgccgccgcccctggggcccctggccccccacctccaccccacgcctacccctttgccccagctgctggggccgccaccagcgctgctgctgagcctgagggccctggggccagctgtgccgccgccgccaaggcccctgtgaagaagaatgccaaggtggccggcgtgtctgtgcagctggagatgaaggccctgtgggatgagttcaaccagctgggcacagagatgattgtgaccaaggccggccgcaggatgttccccaccttccaggtgaagctgtttggcatggaccccatggctgactacatgctgctgatggactttgtgcctgtggatgacaagcgctaccgctatgccttccacagcagctcctggctggtggccggcaaggctgaccctgccaccccaggccgggtgcactaccacccagacagccctgccaagggggcccagtggatgaagcagatcgtgtcctttgacaagctgaagctgaccaacaacctgctggatgacaatggccacatcatcctgaacagcatgcaccgctaccagccccgcttccacgtggtgtatgtggaccccaggaaggacagcgagaagtatgcagaggagaacttcaagacctttgtgtttgaggagacccgcttcaccgctgtgacagcctaccagaaccaccgcatcacccagctgaagatcgccagcaacccctttgccaagggcttccgggactgtgaccctgaggactggcccaggaaccacaggcctggggccctgcccctgatgtctgcctttgcccggagcaggaaccctgtggccagccccacccagcccagcggcacagagaaggatgctgctgaggcccggcgggagttccagagagatgctgggggccctgctgtgctgggggaccctgcccaccccccccagctgctggcccgggtgctgagccccagcctgcccggggccggcggggccggcggcctggtgcccctgcccggggcccctgggggccggcccagcccccccaaccctgagctgcggctggaggcccctggggccagcgagcccctgcaccaccacccctacaagtacccagctgctgcctatgaccactacctgggcgccaagagcaggcctgccccctaccccctgcccggcctgcggggccacggctaccacccccacgcccacccccaccaccaccaccaccctgtgtccccagctgctgctgctgctgctgctgctgctgctgctgctgctgctgccaacatgtacagcagcgctggggccgcccctcctggcagctatgactactgccccaggtag

SEQ ID NO: 172774 - DNA, 1119 bp, synthetic construct
  misc_feature 1..1119: note = Description of Artificial Sequence: Synthetic coding sequence
  source 1..1119: mol_type = other DNA
atgcacttcagcacagtgacccgggacatggaggccttcaccgccagcagcctgagcagcctgggcgccgccggcggcttccctggggccgccagccctggagctgacccctacggcccccgggagcccccacctcctccacccaggtatgacccctgtgccgccgccgcccctggggcccctggccccccacctccaccccacgcctacccctttgccccagctgctggggccgccaccagcgctgctgctgagcctgagggccctggggccagctgtgccgccgccgccaaggcccctgtgaagaagaatgccaaggtggccggcgtgtctgtgcagctggagatgaaggccctgtgggatgagttcaaccagctgggcacagagatgattgtgaccaaggccggccgcaggatgttccccaccttccaggtgaagctgtttggcatggaccccatggctgactacatgctgctgatggactttgtgcctgtggatgacaagcgctaccgctatgccttccacagcagctcctggctggtggccggcaaggctgaccctgccaccccaggccgggtgcactaccacccagacagccctgccaagggggcccagtggatgaagcagatcgtgtcctttgacaagctgaagctgaccaacaacctgctggatgacaatggccacatcatcctgaacagcatgcaccgctaccagccccgcttccacgtggtgtatgtggaccccaggaaggacagcgagaagtatgcagaggagaacttcaagacctttgtgtttgaggagacccgcttcaccgctgtgacagcctaccagaaccaccgcatcacccagctgaagatcgccagcaacccctttgccaagggcttccgggactgtgaccctgaggactggcccaggaaccacaggcctggggccctgcccctgatgtctgcctttgcccggagcaggaaccctgtggccagccccacccagcccagcggcacagagaagggcctggtgacagagggcagcggcctgcagcccggcctgctggatgtgctgctgaagccacccagcaagaagtctgagagcctgcggcccccccactgcaaggacacctag

SEQ ID NO: 172775 - DNA, 1158 bp, synthetic construct
  misc_feature 1..1158: note = Description of Artificial Sequence: Synthetic coding sequence
  source 1..1158: mol_type = other DNA
atggccgccttcctgtctgctggcctgggcatcctggcccccagcgagacctaccccctgcccaccaccagcagcggctgggagccccggctgggcagccccttccccagcggcccctgcaccagcagcactggagcccaggccgtggccgagcccaccggccagggccccaagaacccccgggtgtcccgggtgacagtgcagctggagatgaagcccctgtgggaggagttcaaccagctgggcacagagatgattgtgaccaaggccggccgcaggatgttcccccccttccaggtgaagatcctgggcatggacagcctggccgactatgccctgctgatggacttcatccccctggatgacaagcgctaccgctatgccttccacagcagcgcctggctggtggccggcaaggctgaccctgccaccccaggccgggtgcacttccacccagacagccctgccaagggggcccagtggatgaggcagatcgtgtcctttgacaagctgaagctgaccaacaacctgctggatgacaatggccacatcatcctgaacagcatgcaccgctaccagccccgcttccacgtggtgtttgtggaccccaggaaggacagcgagagatatgcccaggagaacttcaagagcttcatcttcacagagacccagttcaccgctgtgacagcctaccagaaccaccgcatcacccagctgaagatcgccagcaacccctttgccaagggcttccgggagagtgacctggacagctggcctgtggccccccggcccctgctgtctgtgcctgcccggagccacagcagcctgagcccctgtgtgctgaagggggccacagaccgggagaaggaccccaacaaggccagcgccagcaccagcaagaccccagcctggctgcaccaccagctgctgcccccacctgaggtgctgctggccccagccacctacagacctgtgacctaccagagcctgtacagcggggcccccagccacctgggcatccccaggaccaggcctgccccctaccccctgcccaacatccgggctgaccgggaccagggcggcctgcccctgcctgctggcctgggcctgctgagccccaccgtggtgtgcctgggccctggccaggacagccagtag

SEQ ID NO: 172776 - DNA, 2454 bp, synthetic construct
  misc_feature 1..2454: note = Description of Artificial Sequence: Synthetic coding sequence
  source 1..2454: mol_type = other DNA
atgatggatggccccaggagtgatgtgggccgctggggcggcaaccccctgcagccccccaccacccccagccctgagcctgagcctgagccagatggccgcagccggcggggcggcggccgctccttctgggcccgctgctgcggctgctgcagctgcagaaatgctgctgatgatgactggggccctgagcccagcgacagccggggccggggcagcagcagcggcacccggcggcccggcagccggggcagtgacagccggcggcctgtgtcccggggcagcggcgtgaatgctgctggagatggcaccatccgggagggcatgctggtggtgaatggagtggacctgctgagcagcagaagtgaccagaacagaagagagcaccacacagatgaatatgaatatgatgagctgattgtgcggcggggccagcccttccacatgctgctgctgctgagcaggacctatgagagcagtgaccgcatcaccctggagctgctgattggcaacaaccctgaggtgggcaagggcacccacgtgatcatccctgtgggcaaaggaggcagcggcggctggaaggcccaggtggtgaaggccagcggccagaacctgaacctgcgggtgcacaccagccccaatgccatcatcggcaagttccagttcaccgtgaggacccagagtgatgctggggagttccagctgccctttgaccccagaaatgagatctacatcctcttcaacccctggtgcccagaagatattgtgtatgtggaccacgaggactggaggcaggagtatgtgctgaatgaaagtggccgcatctactatggaacagaggcccagattggagagaggacctggaactacggccagtttgaccatggagtgctggatgcctgcctgtacatcctggacagaagaggcatgccctacggcggccgcggggaccctgtgaatgtgtccagggtcatcagcgccatggtgaacagcctggatgacaatggagtgctgattggcaactggagcggggactacagccggggcaccaaccccagcgcctgggtgggctctgtggagatcctgctgagctacctgaggacaggctacagcgtgccctacggccagtgctgggtgtttgctggggtgaccaccaccgtgctgcgctgcctgggcctggccaccaggacagtgaccaacttcaacagcgcccatgacacagacaccagcctgaccatggacatctactttgatgagaacatgaagcccctggagcacctgaaccatgattctgtgtggaacttccacgtgtggaatgactgctggatgaagaggccagacctgcccagcggctttgatggctggcaggtggtggatgccaccccccaggagaccagcagcggcatcttctgctgcggcccctgcagcgtggagagcatcaagaatggcctggtgtacatgaagtatgacacccccttcatctttgctgaggtgaacagcgacaaggtgtactggcagaggcaggatgatggcagcttcaagatcgtgtatgtggaggagaaggccatcggcaccctgattgtgaccaaggccatcagcagcaacatgagggaggacatcacctacctgtacaagcaccctgagggcagtgatgctgagaggaaggctgtggagacagctgctgcccacggcagcaagcccaacgtgtatgccaacagaggcagcgcagaagatgtggccatgcaggtggaggcccaggatgctgtgatgggccaggacctgatggtgtctgtgatgctgatcaaccacagcagcagcagaagaacagtgaagctgcacctgtacctgtctgtgaccttctacacaggagtgtctggcaccatcttcaaggagaccaagaaggaggtggagctggcccctggggccagtgacagagtgaccatgcctgtggcctacaaggagtaccggccccacctggtggaccagggcgccatgctgctgaatgtgtctggccacgtgaaggagagcggccaggtgctggccaagcagcacaccttccggctgcggaccccagacctgagcctgaccctgctgggcgctgctgtggtgggccaggagtgtgaggtgcagatcgtgttcaagaaccccctgcctgtgaccctgaccaacgtggtgttccggctggagggcagcggcctgcagaggcccaagatcctgaatgtgggggacatcggcggcaatgaaacagtgaccctgcggcagagctttgtgcctgtgcggcccggcccccggcagctgattgccagcctggacagcccccagctgagccaggtgcatggagtcatccaggtggatgtggccccagcccctggagatggcggcttcttcagtgatgctggaggagacagccacctgggggagaccatccccatggccagcagaggaggagcctag

SEQ ID NO: 172777 - DNA, 1200 bp, synthetic construct
  misc_feature 1..1200: note = Description of Artificial Sequence: Synthetic coding sequence
  source 1..1200: mol_type = other DNA
atgcacaagtaccagccccgggtgcacgtgatcaggaaggacttcagcagtgacctgagccccaccaagcctgtgcctgtgggagatggagtgaagaccttcaacttccctgagaccgtcttcaccaccgtgacagcctaccagaaccagcagatcacccggctgaagattgacaggaacccctttgccaagggcttccgggacagcggcaggaacagaacaggcctggaggccatcatggagacctacgccttctggaggcctcctgtgaggaccctgacctttgaggacttcaccaccatgcagaagcagcaggccagcaagaagaccagccagggctacacagtgaaccagcacagcagcgagacagatgccatcgagctgtatgaaagaagagtgtggctgatggagcggcggggcagcacaggcaccagccccaccaccagcagcacaggcacccccagccccagcgccagcagccacctgctgagccccagctgcagcccccccaccttccacctggcccccaacaccttcaacgtgggctgccgggagagccagctgtgcaacctgaacctgagtgactacccaccctgtgcccggagcaacatggccgccctgcagagctacccaggcctgagtgacagcggctacaaccggctgcagagcggcaccaccagcgccacccagcccagcgagaccttcatgccccagaggacccccagcctcatcagcggcatccccaccccacccagcctgcccggcaacagcaagatggaggcctacggcggccagctgggcagcttccccaccagccagttccagtatgtgatgcaggccggaaatgctgccagcagcagcagcagcccccacatgtttggaggcagccacatgcagcagagcagctacaatgccttcagcctgcacaacccctacaacctgtatggctacaacttccccaccagcccccggctggccgccagccctgagaagctgagcgccagccagagcaccctgctgtgcagcagccccagcaatggagcctttggagagcggcagtacctgcccagcggcatggagcacagcatgcacatgatcagccccagccccaacaaccagcaggccaccaacacctgtgatggccggcagtacggggctgtgcccggcagcagcagccagatgtctgtgcacatggtgtag

SEQ ID NO: 172778 - DNA, 1809 bp, synthetic construct
  misc_feature 1..1809: note = Description of Artificial Sequence: Synthetic coding sequence
  source 1..1809: mol_type = other DNA
atgtctgagaggagaagatctgctgtggccctgagcagccgggcccacgccttctctgtggaggccctgattggcagcaacaagaagaggaagctgcgggactgggaggagaagggcctggacctgtccatggaggccctgagccctgctggccccctgggggacacagaagatgctgctgcccacggcctggagccccacccagacagcgagcagagcacaggcagtgacagcgaggtgctgacagagaggaccagctgcagcttcagcacccacacagacctggccagcggggccgccggccctgtgcctgctgccatgagctccatggaggagatccaggtggagctgcagtgtgccgacctgtggaagcgcttccatgacattggaacagagatgatcatcaccaaggccggccgcaggatgtttcctgccatgagggtgaagatcaccggcctggacccccaccagcagtactacatcgccatggacatcgtgcctgtggacaacaagcgctaccgctacgtgtaccacagcagcaagtggatggtggccggaaatgctgacagccctgtgcccccccgggtgtacatccacccagacagcctggccagcggggacacctggatgaggcaggtggtgtcctttgacaagctgaagctgaccaacaatgagctggatgaccagggccacatcatcctgcacagcatgcacaagtaccagccccgggtgcacgtgatcaggaaggacttcagcagtgacctgagccccaccaagcctgtgcctgtgggagatggagtgaagaccttcaacttccctgagaccgtcttcaccaccgtgacagcctaccagaaccagcagatcacccggctgaagattgacaggaacccctttgccaagggcttccgggacagcggcaggaacagaacaggcctggaggccatcatggagacctacgccttctggaggcctcctgtgaggaccctgacctttgaggacttcaccaccatgcagaagcagcagggcggcagcacaggcaccagccccaccaccagcagcacaggcacccccagccccagcgccagcagccacctgctgagccccagctgcagcccccccaccttccacctggcccccaacaccttcaacgtgggctgccgggagagccagctgtgcaacctgaacctgagtgactacccaccctgtgcccggagcaacatggccgccctgcagagctacccaggcctgagtgacagcggctacaaccggctgcagagcggcaccaccagcgccacccagcccagcgagaccttcatgccccagaggacccccagcctcatcagcggcatccccaccccacccagcctgcccggcaacagcaagatggaggcctatggaggccagctgggcagcttccccaccagccagttccagtatgtgatgcaggccggaaatgctgccagcagcagcagcagcccccacatgtttggaggcagccacatgcagcagagcagctacaatgccttcagcctgcacaacccctacaacctgtatggctacaacttccccaccagcccccggctggccgccagccctgagaagctgagcgccagccagagcaccctgctgtgcagcagccccagcaatggagccttcggggagcggcagtacctgcccagcggcatggagcacagcatgcacatgatcagccccagccccaacaaccagcaggccaccaacacctgtgatggccggcagtatggagctgtgcccggcagcagcagccagatgtctgtgcacatggtgtag

SEQ ID NO: 172779 - DNA, 762 bp, synthetic construct
  misc_feature 1..762: note = Description of Artificial Sequence: Synthetic coding sequence
  source 1..762: mol_type = other DNA
cgggtgaggacaggcctggaggccatcatggagacctacgccttctggaggcctcctgtgaggaccctgacctttgaggacttcaccaccatgcagaagcagcaggccagcaagaagaccagccagggctacacagtgaaccagcacagcagcgagacagatgccatcgagctgtatgaaagaagagtgtggctgatggagcggcggggcagcacaggcaccagccccaccaccagcagcacaggcacccccagccccagcgccagcagccacctgctgagccccagctgcagcccccccaccttccacctggcccccaacaccttcaacgtgggctgccgggagagccagctgtgcaacctgaacctgagtgactacccaccctgtgcccggagcaacatggccgccctgcagagctacccaggcctgagtgacagcggctacaaccggctgcagagcggcaccaccagcgccacccagcccagcgagaccttcatgccccagaggacccccagcctcatcagcggcatccccaccccacccagcctgcccacagcccgctggaagcccaccgtggcctcctggggccccttccccctgcccagcttctccatgagctgccggcaggccatgctgcccccagccccccaccaccacacctgcagcggggccgccacctgcagccgggcccccaccatgcccagccccttcaccaccctgaccacctgcatggacaccatcagccccctgcccctgggctag

SEQ ID NO: 172780 - DNA, 993 bp, synthetic construct
  misc_feature 1..993: note = Description of Artificial Sequence: Synthetic coding sequence
  source 1..993: mol_type = other DNA
ggcaggaacagaacaggcctggaggccatcatggagacctacgccttctggaggcctcctgtgaggaccctgacctttgaggacttcaccaccatgcagaagcagcaggccagcaagaagaccagccagggctacacagtgaaccagcacagcagcgagacagatgccatcgagctgtatgaaagaagagtgtggctgatggagcggcggggcagcacaggcaccagccccaccaccagcagcacaggcacccccagccccagcgccagcagccacctgctgagccccagctgcagcccccccaccttccacctggcccccaacaccttcaacgtgggctgccgggagagccagctgtgcaacctgaacctgagtgactacccaccctgtgcccggagcaacatggccgccctgcagagctacccaggcctgagtgacagcggctacaaccggctgcagagcggcaccaccagcgccacccagcccagcgagaccttcatgccccagaggacccccagcctcatcagcggcatccccaccccacccagcctgcccggcaacagcaagatggaggcctatggaggccagctgggcagcttccccaccagccagttccagtatgtgatgcaggccggaaatgctgccagcagcagcagcagcccccacatgtttggaggcagccacatgcagcagagcagctacaatgccttcagcctgcacaacccctacaacctgtatggctacaacttccccaccagcccccggctggccgccagccctgagaagctgagcgccagccagagcaccctgctgtgcagcagccccagcaatggagccttcggggagcggcagtacctgcccagcggcatggagcacagcatgcacatgatcagccccagccccaacaaccagcaggccaccaacacctgtgatggccggcagtatggagctgtgcccggcagcagcagccagatgtctgtgcacatggtgtag

SEQ ID NO: 172781 - DNA, 1347 bp, synthetic construct
  misc_feature 1..1347: note = Description of Artificial Sequence: Synthetic coding sequence
  source 1..1347: mol_type = other DNA
atggccatgtctgagctgggcaccaggaagcccagtgatggcaccgtgagccacctgctgaatgtggtggagagcgagctgcaggccggccgggagaagggggaccccacagagaagcagctgcagatcatcctggaggatgcccccctgtggcagcgcttcaaggaggtgaccaatgagatgattgtgaccaagaatggccgcaggatgtttcctgtgctgaagatctctgtgacaggcctggaccccaatgccatgtacagcctgctgctggactttgtgcccacagacagccaccgctggaagtatgtgaatggagagtgggtgcctgctgggaagccagaggtgagcagccacagctgtgtgtacatccacccagacagccccaactttggagcccactggatgaaggcccccatctccttcagcaaggtgaagctgaccaacaagctgaatggaggcggccagatcatgctgaacagcctgcacaagtatgagccccaggtgcacatcgtgcgggtgggcagcgcccacaggatggtgaccaactgcagcttccctgagacccagttcatcgctgtgacagcctaccagaatgaggagatcacagccctgaagatcaagtacaacccctttgccaaggccttcctggatgccaaggagaggaaccacctgagagatgtgcctgaggccatcagcgagagccagcacgtgacctacagccacctgggcggctggatcttcagcaacccagatggagtgtgcacagctggcaacagcaactaccagtatgctgcccccctgcccctgcctgccccccacacccaccacggctgtgagcactacagcggcctgcggggccaccggcaggccccctaccccagcgcctacatgcacaggaaccacagccccagcgtgaacctgattgagagcagcagcaacaacctgcaggtgttcagcggccctgacagctggaccagcctgagcagcacccctcatgccagcatcctgtctgtgccccacaccaacggccccatcaaccctggccccagcccctacccctgcctgtggaccatcagcaatggagctgggggccccagcggccctggccctgaggtgcacgccagcacccctggggccttcctgctgggcaacccagctgtgaccagccccccatctgtgctgagcacccaggcccccaccagcgctggggtggaggtgctgggggagcccagcctgaccagcattgctgtgtccacctggacagctgtggccagccacccctttgctggctggggcggccctggagctgggggccaccacagccccagcagcctggatggatag

SEQ ID NO: 172782 - DNA, 978 bp, synthetic construct
  misc_feature 1..978: note = Description of Artificial Sequence: Synthetic coding sequence
  source 1..978: mol_type = other DNA
atgattgtgaccaagaatggccgcaggatgtttcctgtgctgaagatctctgtgacaggcctggaccccaatgccatgtacagcctgctgctggactttgtgcccacagacagccaccgctggaagtatgtgaatggagagtgggtgcctgctgggaagccagaggtgagcagccacagctgtgtgtacatccacccagacagccccaactttggagcccactggatgaaggcccccatctccttcagcaaggtgaagctgaccaacaagctgaatggaggcggccagatcatgctgaacagcctgcacaagtatgagccccaggtgcacatcgtgcgggtgggcagcgcccacaggatggtgaccaactgcagcttccctgagacccagttcatcgctgtgacagcctaccagaatgaggagatcacagccctgaagatcaagtacaacccctttgccaaggccttcctggatgccaaggagaggaaccacctgagagatgtgcctgaggccatcagcgagagccagcacgtgacctacagccacctgaacctgattgagagcagcagcaacaacctgcaggtgttttctggccctgacagctggaccagcctgagcagcaccccccacgccagcatcctgtctgtgccccacaccaacggccccatcaaccctggccccagcccctacccctgcctgtggaccatcagcaatggagctgggggccccagcggccctggccctgaggtgcacgccagcacccctggggccttcctgctgggcaacccagctgtgaccagcccccccagcgtgctgagcacccaggcccccaccagcgctggggtggaggtgctgggggagcccagcctgaccagcattgctgtgtccacctggacagctgtggccagccacccctttgctggctggggcggccctggggccggcggccaccacagccccagcagcctggatggatag

SEQ ID NO: 172783 - DNA, 957 bp, synthetic construct
  misc_feature 1..957: note = Description of Artificial Sequence: Synthetic coding sequence
  source 1..957: mol_type = other DNA
tgaagaatgtttcctgtgctgaagatctctgtgacaggcctggaccccaatgccatgtacagcctgctgctggactttgtgcccacagacagccaccgctggaagtatgtgaatggagagtgggtgcctgctgggaagccagaggtgagcagccacagctgtgtgtacatccacccagacagccccaactttggagcccactggatgaaggcccccatctccttcagcaaggtgaagctgaccaacaagctgaatggaggcggccagatcatgctgaacagcctgcacaagtatgagccccaggtgcacatcgtgcgggtgggcagcgcccacaggatggtgaccaactgcagcttccctgagacccagttcatcgctgtgacagcctaccagaatgaggagatcacagccctgaagatcaagtacaacccctttgccaaggccttcctggatgccaaggagaggaaccacctgagagatgtgcctgaggccatcagcgagagccagcacgtgacctacagccacctgaacctgattgagagcagcagcaacaacctgcaggtgttcagcggccctgacagctggaccagcctgagcagcacccctcatgccagcatcctgtctgtgccccacaccaacggccccatcaaccctggccccagcccctacccctgcctgtggaccatcagcaatggagctgggggccccagcggccctggccctgaggtgcacgccagcacccctggggccttcctgctgggcaacccagctgtgaccagccccccatctgtgctgagcacccaggcccccaccagcgctggggtggaggtgctgggggagcccagcctgaccagcattgctgtgtccacctggacagctgtggccagccacccctttgctggctggggcggccctggagctgggggccaccacagccccagcagcctggatggatag

SEQ ID NO: 172784 - DNA, 846 bp, synthetic construct
  misc_feature 1..846: note = Description of Artificial Sequence: Synthetic coding sequence
  source 1..846: mol_type = other DNA
tgaaaggagcgggagctgaactggttctaccgccggcagagggtgctgtttgcccacgtgtaccccaccttcaccaacaccagctgcctgtgcaagtgcaagatcacagccctgaagatcaagtacaacccctttgccaaggccttcctggatgccaaggagaggaaccacctgagagatgtgcctgaggccatcagcgagagccagcacgtgacctacagccacctgggcggctggatcttcagcaacccagatggagtgtgcacagctggcaacagcaactaccagtatgctgcccccctgcccctgcctgccccccacacccaccacggctgtgagcactacagcggcctgcggggccaccggcaggccccctaccccagcgcctacatgcacaggaaccacagccccagcgtgaacctgattgagagcagcagcaacaacctgcaggtgttttctggccctgacagctggaccagcctgagcagcaccccccacgccagcatcctgtctgtgccccacaccaacggccccatcaaccctggccccagcccctacccctgcctgtggaccatcagcaatggagctgggggccccagcggccctggccctgaggtgcacgccagcacccctggggccttcctgctgggcaacccagctgtgaccagcccccccagcgtgctgagcacccaggcccccaccagcgctggggtggaggtgctgggggagcccagcctgaccagcattgctgtgtccacctggacagctgtggccagccacccctttgctggctggggcggccctggggccggcggccaccacagccccagcagcctggatggatag

SEQ ID NO: 172785 - DNA, 1344 bp, synthetic construct
  misc_feature 1..1344: note = Description of Artificial Sequence: Synthetic coding sequence
  source 1..1344: mol_type = other DNA
atggagttcaccgccagccccaagccccagctgagcagccgggccaatgccttcagcattgctgccctgatgagcagcggcggcagcaaggagaaggaggccacagagaacaccatcaagcccctggagcagtttgtggagaagagcagctgtgcccagcccctgggggagctgaccagcctggatgcccacggggagtttggaggcggcagcggcagcagccccagcagcagcagcctgtgcacagagcccctcatccccaccacccccatcatccccagcgaggagatggccaagatcgcctgcagcctggagaccaaggagctgtgggacaagttccacgagctgggcacagagatgatcatcaccaagtctggaagaaggatgttccccaccatccgggtgtccttcagcggcgtggaccctgaggccaagtacatcgtgctgatggacatcgtgcctgtggacaacaagcgctaccgctatgcctaccacaggagctcctggctggtggccggcaaggctgacccccccctgcctgcccggctgtatgtgcacccagacagccccttcaccggggagcagctgctgaagcagatggtgtcctttgagaaggtgaagctgaccaacaatgagctggaccagcacggccacatcatcctgaacagcatgcacaagtaccagccccgggtgcacatcatcaagaagaaggaccacacagccagcctgctgaacctgaagtctgaggagttccgcaccttcatcttccctgagaccgtcttcaccgctgtgacagcctaccagaaccagctgatcaccaagctgaagattgacagcaacccctttgccaagggcttccgggacagcagccggctgacagacatcgagcgggagagcgtggagagcctcatccagaagcacagctatgcccggagccccatccgcacctatggaggagaagaagatgtgctgggagatgagagccagaccacccccaacagaggcagcgccttcaccaccagtgacaacctgagcctgagctcctgggtgagcagcagcagcagcttccctggcttccagcacccccagagcctgacagccctgggcaccagcacagccagcatcgccacccccatcccccaccccatccagggcagcctgcccccctacagccggctgggcatgcccctgacccccagcgccatcgccagctccatgcagggcagcggccccaccttccccagcttccacatgccccgctaccaccactacttccagcagggcccctatgctgccatccagggcctgcggcacagcagcgctgtgatgaccccatttgtgtag

SEQ ID NO: 172786 - DNA, 1608 bp, synthetic construct
  misc_feature 1..1608: note = Description of Artificial Sequence: Synthetic coding sequence
  source 1..1608: mol_type = other DNA
atgggcatcgtggagcccggctgtggggacatgctgactggaacagagcccatgcctggcagtgatgagggccgggcccctggagctgacccccagcaccgctacttctacccagagcccggggcccaggatgctgatgagcggcggggcggcggcagcctgggcagcccctacccaggaggagccctggtgcctgccccacccagccgcttcctgggcgcctatgcctacccaccccggccccaggccgccggcttccctggagctggggagagcttccccccaccagcagatgctgagggctaccagcccggggagggctatgctgccccagaccccagggctggcctgtacccaggccccagagaagattatgccctgcctgctggcctggaggtgtctgggaagctgcgggtggccctgaacaaccacctgctgtggagcaagttcaaccagcaccagacagagatgatcatcaccaagcagggccgcaggatgttccccttcctgtccttcaccgtggccggcctggagcccaccagccactacaggatgtttgtggatgtggtgctggtggaccagcaccactggagataccagagcggcaagtgggtgcagtgtgggaaggccgagggctccatgcctggcaaccggctgtatgtgcacccagacagccccaacacaggagcccactggatgaggcaggaggtgtcctttgggaagctgaagctgaccaacaacaagggggccagcaacaacgtgacccagatgattgtgctgcagagcctgcacaagtaccagccccggctgcacatcgtggaggtgaatgatggagagcctgaggccgcctgcaatgccagcaacacccacatcttcaccttccaggagacccagttcatcgctgtgacagcctaccagaatgctgagatcacccagctgaagattgacaacaacccctttgccaagggcttccgggagaactttgagagcatgtacacctctgtggacaccagcatccccagccccccaggccccaactgccagttcctgggcggggaccactacagccccctgctgcccaaccagtaccctgtgcccagccgcttctacccagacctgcccggccaggccaaggatgtggtgccccaggcctactggctgggcgccccccgggaccacagctatgaagctgagttccgggctgtgtccatgaagccagccttcctgcccagcgcccctggccccaccatgagctactaccggggccaggaggtgctggcccctggggccggctggcctgtggccccccagtacccacccaagatgggccctgcctcctggttccggcccatgaggaccctgcccatggagcccggccctgggggcagcgagggccggggccctgaggaccagggcccccccctggtgtggacagagatcgcccccatccggcctgagagcagtgacagcggcctgggggagggggacagcaagagaagaagagtgagcccctaccccagcagcggggacagcagcagccctgctggggcccccagcccctttgacaaggaggccgagggccagttctacaactacttccccaactag

SEQ ID NO: 172787 - DNA, 1203 bp, synthetic construct
  misc_feature 1..1203: note = Description of Artificial Sequence: Synthetic coding sequence
  source 1..1203: mol_type = other DNA
atgttccccagcgtgcgggtgaaggtgaagggcctggaccccgggaagcagtaccacgtggccattgatgtggtgcctgtggacagcaagcgctaccgctacgtgtaccacagcagccagtggatggtggccggcaacacagaccacctgtgcatcatcccccgcttctacgtgcacccagacagcccctgcagcggggagacctggatgaggcagatcatcagctttgacaggatgaagctgaccaacaatgagatggatgacaagggccacatcatcctgcagagcatgcacaagtacaagccccgggtgcacgtgattgagcagggcagctctgtggacctgagccagatccagagcctgcccacagaaggagtgaagaccttctccttcaaggagacagagttcaccaccgtgacagcctaccagaaccagcagatcaccaagctgaagattgaaagaaacccctttgccaagggcttccgggacaccggcaggaacagaggagtgctggatggcctgctggagacctacccctggaggcccagcttcaccctggacttcaagacctttggagctgacacccagagcggcagcagcggcagcagccctgtgaccagcagcggcggggcccccagccccctgaacagcctgctgagccccctgtgcttcagccccatgttccacctgcccaccagcagcctgggcatgccctgcccagaggcctacctgcccaacgtgaacctgcccctgtgctacaagatctgccccaccaacttctggcagcagcagcccctggtgctgcctgcccctgagcggctggccagcagcaacagcagccagagcctggcccccctgatgatggaggtgcccatgctgagcagcctgggcgtgaccaacagcaagagcggcagcagcgaggacagcagtgaccagtacctgcaggcccccaacagcaccaaccagatgctgtatggcctgcagagccctggcaacatcttcctgcccaacagcatcaccccagaggccctgagctgcagcttccaccccagctatgacttctaccgctacaacttctccatgcccagccgcctcatcagcggcagcaaccacctgaaggtgaatgatgacagccaggtgtcctttggagagggcaagtgcaaccacgtgcactggtacccagccatcaaccactacctgtag

SEQ ID NO: 172788 - DNA, 1563 bp, synthetic construct
  misc_feature 1..1563: note = Description of Artificial Sequence: Synthetic coding sequence
  source 1..1563: mol_type = other DNA
atggccctgagcagccgggcccgggccttctctgtggaggccctggtgggccggcccagcaagaggaagctgcaggaccccatccaggccgagcagcctgagctgcgggagaagaagggcggggaggaggaggaggagaggaggagcagcgctgctgggaagtctgagcccctggagaagcagcccaagacagagcccagcaccagcgccagcagcggctgcggcagtgacagcggctacggcaacagcagcgagagcctggaggagaaggacatccagatggagctgcagggcagcgagctgtggaagcgcttccatgacatcggcacagagatgatcatcaccaaggccggccgcaggatgttccccagcgtgcgggtgaaggtgaagggcctggaccccgggaagcagtaccacgtggccattgatgtggtgcctgtggacagcaagcgctaccgctacgtgtaccacagcagccagtggatggtggccggcaacacagaccacctgtgcatcatcccccgcttctacgtgcacccagacagcccctgcagcggggagacctggatgaggcagatcatcagctttgacaggatgaagctgaccaacaatgagatggatgacaagggccacatcatcctgcagagcatgcacaagtacaagccccgggtgcacgtgattgagcagggcagctctgtggacctgagccagatccagagcctgcccacagaaggagtgaagaccttctccttcaaggagacagagttcaccaccgtgacagcctaccagaaccagcagatcaccaagctgaagattgaaagaaacccctttgccaagggcttccgggacaccggcaggaacagaggagtgctggatggcctgctggagacctacccctggaggcccagcttcaccctggacttcaagacctttggagctgacacccagagcggcagcagcggcagcagccctgtgaccagcagcggcggggcccccagccccctgaacagcctgctgagccccctgtgcttcagccccatgttccacctgcccaccagcagcctgggcatgccctgcccagaggcctacctgcccaacgtgaacctgcccctgtgctacaagatctgccccaccaacttctggcagcagcagcccctggtgctgcctgcccctgagcggctggccagcagcaacagcagccagagcctggcccccctgatgatggaggtgcccatgctgagcagcctgggcgtgaccaacagcaagagcggcagcagcgaggacagcagtgaccagtacctgcaggcccccaacagcaccaaccagatgctgtatggcctgcagagccctggcaacatcttcctgcccaacagcatcaccccagaggccctgagctgcagcttccaccccagctatgacttctaccgctacaacttctccatgcccagccgcctcatcagcggcagcaaccacctgaaggtgaatgatgacagccaggtgtcctttggagagggcaagtgcaaccacgtgcactggtacccagccatcaaccactacctgtag

SEQ ID NO: 172789 - DNA, 1563 bp, synthetic construct; identical to SEQ ID NO: 172788
  misc_feature 1..1563: note = Description of Artificial Sequence: Synthetic coding sequence
  source 1..1563: mol_type = other DNA

SEQ ID NO: 172790 - DNA, 1203 bp, synthetic construct; identical to SEQ ID NO: 172787
  misc_feature 1..1203: note = Description of Artificial Sequence: Synthetic coding sequence
  source 1..1203: mol_type = other DNA

SEQ ID NO: 172791 - DNA, 2232 bp, synthetic construct
  misc_feature 1..2232: note = Description of Artificial Sequence: Synthetic coding sequence
  source 1..2232: mol_type = other DNA
atgagcctgtccatgagggaccccgtcatccctggcacctccatggcctaccaccccttcctgccccaccgggccccagactttgccatgtctgctgtgctgggccaccagccccccttcttccctgccctgaccctgcccccaaatggagctgctgccctgagcctgcccggggccctggccaagcccatcatggaccagctggtgggcgctgctgagaccggcatccccttcagcagcctgggcccccaggcccacctgcggcccctgaagaccatggagcctgaggaggaggtggaggatgaccccaaggtgcacctggaggccaaggagctgtgggaccagttccacaagaggggcacagagatggtgatcaccaagagcggccgcaggatgttcccccccttcaaggtgcgctgcagcggcctggacaagaaggccaagtacatcctgctgatggacatcatcgccgcagatgactgccgctacaagttccacaacagccgctggatggtggccggcaaggctgaccctgagatgcccaagaggatgtacatccacccagacagccctgccactggagagcagtggatgagcaaggtggtgaccttccacaagctgaagctgaccaacaacatcagtgacaagcacggcttcaccctggccttccccagcgaccacgccacctggcagggcaactacagctttggcacccagaccatcctgaacagcatgcacaagtaccagccccgcttccacatcgtgcgggccaatgacatcctgaagctgccctacagcaccttccgcacctacctgtttcctgagacagagttcatcgctgtgacagcctaccagaatgacaagatcacccagctgaagattgacaacaacccctttgccaagggcttccgggacacaggaaatggccggcgggagaagaggaagcagctgaccctgcagagcatgagggtgtttgatgagcggcacaagaaggaaaatggcaccagtgatgagagcagcagcgagcaggccgccttcaactgctttgcccaggccagcagccctgctgccagcacagtgggcaccagcaacctgaaggacctgtgccccagcgagggggagagtgatgctgaggccgagagcaaggaggagcacggccctgaggcctgtgatgctgccaagatcagcaccaccaccagcgaggagccctgccgggacaagggcagccctgctgtgaaggcccacctgtttgctgctgagcggccccgggacagcggccgcctggacaaggccagcccagacagccgccacagccctgccaccatcagcagcagcacccggggcctgggcgctgaggagcggcgcagccctgtgcgggagggcacagccccagccaaggtggaggaggcccgggccctgcccgggaaggaggcctttgcccccctgactgtgcagacagatgctgctgctgcccacctggcccagggccccctgcccggcctgggctttgcccctggcctggccggccagcagttcttcaacggccaccccctcttcctgcaccccagccagtttgccatgggcggggccttcagctccatggctgctgctggcatgggccccctgctggccaccgtgtctggggccagcactggagtgtctggcctggacagcacagccatggccagcgctgctgctgcccagggcctgagcggggccagcgctgccaccctgcccttccacctgcagcagcacgtgctggccagccagggcctggccatgagccccttcggcagcctcttcccctacccctacacctacatggctgctgctgctgctgccagcagcgctgctgccagcagctctgtgcaccgccaccccttcctgaacctgaacaccatgaggccccggctgcgctacagcccctacagcatccctgtgcctgtgcctgatggcagcagcctgctgaccacagccctgcccagcatggctgctgctgctggccccctggatggcaaggtggccgccctggccgccagccctgcctctgtggccgtggacagcggcagcgagctgaacagccgcagcagcaccctgagcagcagctccatgagcctgagccccaagctgtgtgccgagaaggaggccgccaccagcgagctgcagagcatccagaggctggtgtctggcctggaggccaagccagacaggagccgcagcgccagcccctag

SEQ ID NO: 172792 - DNA, 2172 bp, synthetic construct
  misc_feature 1..2172: note = Description of Artificial Sequence: Synthetic coding sequence
  source 1..2172: mol_type = other DNA
atgagcctgtccatgagggaccccgtcatccctggcacctccatggcctaccaccccttcctgccccaccgggccccagactttgccatgtctgctgtgctgggccaccagccccccttcttccctgccctgaccctgcccccaaatggagctgctgccctgagcctgcccggggccctggccaagcccatcatggaccagctggtgggcgctgctgagaccggcatccccttcagcagcctgggcccccaggcccacctgcggcccctgaagaccatggagcctgaggaggaggtggaggatgaccccaaggtgcacctggaggccaaggagctgtgggaccagttccacaagaggggcacagagatggtgatcaccaagagcggccgcaggatgttcccccccttcaaggtgcgctgcagcggcctggacaagaaggccaagtacatcctgctgatggacatcatcgccgcagatgactgccgctacaagttccacaacagccgctggatggtggccggcaaggctgaccctgagatgcccaagaggatgtacatccacccagacagccctgccactggagagcagtggatgagcaaggtggtgaccttccacaagctgaagctgaccaacaacatcagtgacaagcacggcttcaccatcctgaacagcatgcacaagtaccagccccgcttccacatcgtgcgggccaatgacatcctgaagctgccctacagcaccttccgcacctacctgtttcctgagacagagttcatcgctgtgacagcctaccagaatgacaagatcacccagctgaagattgacaacaacccctttgccaagggcttccgggacacaggaaatggccggcgggagaagaggaagcagctgaccctgcagagcatgagggtgtttgatgagcggcacaagaaggaaaatggcaccagtgatgagagcagcagcgagcaggccgccttcaactgctttgcccaggccagcagccctgctgccagcacagtgggcaccagcaacctgaaggacctgtgccccagcgagggggagagtgatgctgaggccgagagcaaggaggagcacggccctgaggcctgtgatgctgccaagatcagcaccaccaccagcgaggagccctgccgggacaagggcagccctgctgtgaaggcccacctgtttgctgctgagcggccccgggacagcggccgcctggacaaggccagcccagacagccgccacagccctgccaccatcagcagcagcacccggggcctgggcgctgaggagcggcgcagccctgtgcgggagggcacagccccagccaaggtggaggaggcccgggccctgcccgggaaggaggcctttgcccccctgactgtgcagacagatgctgctgctgcccacctggcccagggccccctgcccggcctgggctttgcccctggcctggccggccagcagttcttcaacggccaccccctcttcctgcaccccagccagtttgccatgggcggggccttcagctccatggctgctgctggcatgggccccctgctggccaccgtgtctggggccagcactggagtgtctggcctggacagcacagccatggccagcgctgctgctgcccagggcctgagcggggccagcgctgccaccctgcccttccacctgcagcagcacgtgctggccagccagggcctggccatgagccccttcggcagcctcttcccctacccctacacctacatggctgctgctgctgctgccagcagcgctgctgccagcagctctgtgcaccgccaccccttcctgaacctgaacaccatgaggccccggctgcgctacagcccctacagcatccctgtgcctgtgcctgatggcagcagcctgctgaccacagccctgcccagcatggctgctgctgctggccccctggatggcaaggtggccgccctggccgccagccctgcctctgtggccgtggacagcggcagcgagctgaacagccgcagcagcaccctgagcagcagctccatgagcctgagccccaagctgtgtgccgagaaggaggccgccaccagcgagctgcagagcatccagaggctggtgtctggcctggaggccaagccagacaggagccgcagcgccagcccctag

SEQ ID NO: 172793 - DNA, 1803 bp, synthetic construct
  misc_feature 1..1803: note = Description of Artificial Sequence: Synthetic coding sequence
  source 1..1803: mol_type = other DNA
atgagcctgtccatgagggaccccgtcatccctggcacctccatggcctaccaccccttcctgccccaccgggccccagactttgccatgtctgctgtgctgggccaccagccccccttcttccctgccctgaccctgcccccaaatggagctgctgccctgagcctgcccggggccctggccaagcccatcatggaccagctggtgggcgctgctgagaccggcatccccttcagcagcctgggcccccaggcccacctgcggcccctgaagaccatggagcctgaggaggaggtggaggatgaccccaaggtgcacctggaggccaaggagctgtgggaccagttccacaagaggggcacagagatggtgatcaccaagagcggccgcaggatgttcccccccttcaaggtgcgctgcagcggcctggacaagaaggccaagtacatcctgctgatggacatcatcgccgcagatgactgccgctacaagttccacaacagccgctggatggtggccggcaaggctgaccctgagatgcccaagaggatgtacatccacccagacagccctgccactggagagcagtggatgagcaaggtggtgaccttccacaagctgaagctgaccaacaacatcagtgacaagcacggcttcaccctggccttccccagcgaccacgccacctggcagggcaactacagctttggcacccagaccatcctgaacagcatgcacaagtaccagccccgcttccacatcgtgcgggccaatgacatcctgaagctgccctacagcaccttccgcacctacctgtttcctgagacagagttcatcgctgtgacagcctaccagaatgacaagatcacccagctgaagattgacaacaacccctttgccaagggcttccgggacacaggaaatggccggcgggagaagaggaagcagctgaccctgcagagcatgagggtgtttgatgagcggcacaagaaggaaaatggcaccagtgatgagagcagcagcgagcaggccgccttcaactgctttgcccaggccagcagccctgctgccagcacagtgggcaccagcaacctgaaggacctgtgccccagcgagggggagagtgatgctgaggccgagagcaaggaggagcacggccctgaggcctgtgatgctgccaagatcagcaccaccaccagcgaggagccctgccgggacaagggcagccctgctgtgaaggcccacctgtttgctgctgagcggccccgggacagcggccgcctggacaaggccagcccagacagccgccacagccctgccaccatcagcagcagcacccggggcctgggcgctgaggagcggcgcagccctgtgcgggagggcacagccccagccaaggtggaggaggcccgggccctgcccgggaaggaggcctttgcccccctgactgtgcagacagatgctgctgctgctgctgccagcagctctgtgcaccgccaccccttcctgaacctgaacaccatgaggccccggctgcgctacagcccctacagcatccctgtgcctgtgcctgatggcagcagcctgctgaccacagccctggccgccagccctgcctctgtggccgtggacagcggcagcgagctgaacagccgcagcagcaccctgagcagcagctccatgagcctgagccccaagctgtgtgccgagaaggaggccgccaccagcgagctgcagagcatccagaggctggtgtctggcctggaggccaagccagacaggagccgcagcgccagcccctag

SEQ ID NO: 172794 - DNA, 1638 bp, synthetic construct
  misc_feature 1..1638: note = Description of Artificial Sequence: Synthetic coding sequence
  source 1..1638: mol_type = other DNA
atgctgcaggacaagggcctgtctgagagcgaggaggccttccgggcccctggccctgccctgggggaggccagcgctgccaatgcccctgagcccgccctggccgcccctggcctgagcggggccgccctgggcagccccccaggccctggagcagatgtggtggccgctgctgctgctgagcagaccatcgagaacatcaaggtgggcctgcacgagaaggagctgtggaagaagttccatgaagctggaacagagatgatcatcaccaaggccggccgcaggatgttccccagctacaaggtgaaggtgacaggcatgaaccccaagaccaagtacatcctgctgattgatattgtgcctgcagatgaccaccgctacaagttctgtgacaacaagtggatggtggccggcaaggccgagcccgccatgcctggccgcctgtatgtgcacccagacagccctgccactggagcccactggatgaggcagctggtgtccttccagaagctgaagctgaccaacaaccacctggaccccttcggccacatcatcctgaacagcatgcacaagtaccagccccggctgcacatcgtgaaggcagatgaaaataatgccttcggcagcaagaacacagccttctgcacccacgtgtttcctgagaccagcttcatctctgtgaccagctaccagaaccacaagatcacccagctgaagattgagaacaacccctttgccaagggcttccggggcagtgatgacagcgacctgcgggtggcccggctgcagagcaaggagtaccctgtgatcagcaagagcatcatgaggcagaggctcatcagcccccagctgagcgccaccccagatgtgggccccctgctgggcacccaccaggccctgcagcactaccagcatgaaaatggagcccacagccagctggccgagccccaggacctgcccctgagcaccttccccacccagagggacagcagcctcttctaccactgcctgaagagaagagatggcaccaggcacctggacctgccctgcaagaggagctacctggaggcccccagctctgtgggggaggaccactacttccgcagccccccaccctatgaccagcagatgctgagccccagctactgcagcgaggtgaccccccgggaggcctgcatgtacagcggcagcggccctgagattgctggggtgtctggagtggatgacctgcccccaccacccctgagctgcaacatgtggacctctgtgagcccctacaccagctacagcgtgcagaccatggagaccgtgccctaccagcccttccccacccacttcaccgccaccaccatgatgccccggctgcccaccctgagcgcccagagcagccagcccccaggaaatgcccacttctctgtgtacaaccagctgagccagagccaggtgcgggagcggggccccagcgccagcttcccccgggagcggggcctgccccagggctgtgagaggaagccacccagcccccacctgaatgctgccaatgagttcctgtacagccagaccttcagcctgagccgggagagcagcctgcagtaccacagcggcatgggcaccgtggagaactggacagatggatag

SEQ ID NO: 172795 - DNA, 1641 bp, synthetic construct
  misc_feature 1..1641: note = Description of Artificial Sequence: Synthetic coding sequence
  source 1..1641: mol_type = other DNA
atgctgcaggacaagggcctgtctgagagcgaggaggccttccgggcccctggccctgccctgggggaggccagcgctgccaatgcccctgagcccgccctggccgcccctggcctgagcggggccgccctgggcagccccccaggccctggagcagatgtggtggccgctgctgctgctgagcagaccatcgagaacatcaaggtgggcctgcacgagaaggagctgtggaagaagttccatgaagctggaacagagatgatcatcaccaaggccggccgcaggatgttccccagctacaaggtgaaggtgacaggcatgaaccccaagaccaagtacatcctgctgattgatattgtgcctgcagatgaccaccgctacaagttctgtgacaacaagtggatggtggccggcaaggccgagcccgccatgcctggccgcctgtatgtgcacccagacagccctgccactggagcccactggatgaggcagctggtgtccttccagaagctgaagctgaccaacaaccacctggaccccttcggccacatcatcctgaacagcatgcacaagtaccagccccggctgcacatcgtgaaggcagatgaaaataatgccttcggcagcaagaacacagccttctgcacccacgtgtttcctgagaccagcttcatctctgtgaccagctaccagaaccacaagatcacccagctgaagattgagaacaacccctttgccaagggcttccggggcagtgatgacagcgacctgcgggtggcccggctgcagagcaaggagtaccctgtgatcagcaagagcatcatgaggcagaggctcatcagcccccagctgagcgccaccccagatgtgggccccctgctgggcacccaccaggccctgcagcactaccagcatgaaaatggagcccacagccagctggccgagccccaggacctgcccctgagcaccttccccacccagagggacagcagcctcttctaccactgcctgaagagaagagcagatggcaccaggcacctggacctgccctgcaagaggagctacctggaggcccccagctctgtgggggaggaccactacttccgcagccccccaccctatgaccagcagatgctgagccccagctactgcagcgaggtgaccccccgggaggcctgcatgtacagcggcagcggccctgagattgctggggtgtctggagtggatgacctgcccccaccacccctgagctgcaacatgtggacctctgtgagcccctacaccagctacagcgtgcagaccatggagaccgtgccctaccagcccttccccacccacttcaccgccaccaccatgatgccccggctgcccaccctgagcgcccagagcagccagcccccaggaaatgcccacttctctgtgtacaaccagctgagccagagccaggtgcgggagcggggccccagcgccagcttcccccgggagcggggcctgccccagggctgtgagaggaagccacccagcccccacctgaatgctgccaatgagttcctgtacagccagaccttcagcctgagccgggagagcagcctgcagtaccacagcggcatgggcaccgtggagaactggacagatggatag

SEQ ID NO: 172796 - DNA, 1557 bp, synthetic construct
  misc_feature 1..1557: note = Description of Artificial Sequence: Synthetic coding sequence
  source 1..1557: mol_type = other DNA
atggctgatgctgatgagggcttcggcctggcccacacccccctggagccagatgccaaggacctgccctgtgacagcaagccagagagcgccctgggcgcccccagcaagagccccagcagcccccaggccgccttcacccagcagggcatggagggcatcaaggtgttcctgcacgagcgggagctgtggctgaagttccacgaggtgggcacagagatgatcatcaccaaggccggccgcaggatgttccccagctacaaggtgaaggtgacaggcctgaaccccaagaccaagtacatcctgctgatggacatcgtgcctgcagatgaccaccgctacaagtttgctgacaacaagtggagcgtgacaggcaaggccgagcccgccatgcctggccgcctgtatgtgcacccagacagccctgccaccggggcccactggatgaggcagctggtgtccttccagaagctgaagctgaccaacaaccacctggaccccttcggccacatcatcctgaacagcatgcacaagtaccagccccggctgcacatcgtgaaggcagatgagaacaacggcttcggcagcaagaacacagccttctgcacccacgtgtttcctgagacagccttcatcgctgtgaccagctaccagaaccacaagatcacccagctgaagattgagaacaacccctttgccaagggcttccggggcagtgatgacatggagctgcacaggatgagcaggatgcagagcaaggagtaccctgtggtgcccaggagcacagtgcggcagaaggtggccagcaaccacagccccttcagcagcgagagccgggccctgagcaccagcagcaacctgggcagccagtaccagtgtgaaaatggagtgtctggccccagccaggacctgctgcccccacccaacccctaccccctgccccaggagcacagccagatctaccactgcaccaagaggaaggaggaggagtgcagcaccacagaccacccctacaagaagccctacatggagaccagccccagcgaggaggacagcttctaccgcagcagctacccccagcagcagggcctgggcgccagctacagaacagagagcgcccagaggcaggcctgcatgtatgccagcagcgcccctccttctgagcctgtgcccagcctggaggacatcagctgcaacacctggcccagcatgcccagctacagcagctgcaccgtgaccaccgtgcagcccatggaccggctgccctaccagcacttcagcgcccacttcaccagcggccccctggtgccccggctggccggcatggccaaccacggcagcccccagctgggggagggcatgttccagcaccagacctctgtggcccaccagcctgtggtgcggcagtgtggcccccagacaggcctgcagagccctggcaccctgcagcccccagagttcctgtacagccatggagtgcccaggaccctgagcccccaccagtaccacagcgtgcacggcgtgggcatggtgcctgagtggagcgacaacagctag

SEQ ID NO: 172797 - DNA, 1407 bp, synthetic construct
  misc_feature 1..1407: note = Description of Artificial Sequence: Synthetic coding sequence
  source 1..1407: mol_type = other DNA
atggagggcatcaaggtgttcctgcacgagcgggagctgtggctgaagttccacgaggtgggcacagagatgatcatcaccaaggccggccgcaggatgttccccagctacaaggtgaaggtgacaggcctgaaccccaagaccaagtacatcctgctgatggacatcgtgcctgcagatgaccaccgctacaagtttgctgacaacaagtggagcgtgacaggcaaggccgagcccgccatgcctggccgcctgtatgtgcacccagacagccctgccaccggggcccactggatgaggcagctggtgtccttccagaagctgaagctgaccaacaaccacctggaccccttcggccacatcatcctgaacagcatgcacaagtaccagccccggctgcacatcgtgaaggcagatgagaacaacggcttcggcagcaagaacacagccttctgcacccacgtgtttcctgagacagccttcatcgctgtgaccagctaccagaaccacaagatcacccagctgaagattgagaacaacccctttgccaagggcttccggggcagtgatgacatggagctgcacaggatgagcaggatgcagagcaaggagtaccctgtggtgcccaggagcacagtgcggcagaaggtggccagcaaccacagccccttcagcagcgagagccgggccctgagcaccagcagcaacctgggcagccagtaccagtgtgaaaatggagtgtctggccccagccaggacctgctgcccccacccaacccctaccccctgccccaggagcacagccagatctaccactgcaccaagaggaaggaggaggagtgcagcaccacagaccacccctacaagaagccctacatggagaccagccccagcgaggaggacagcttctaccgcagcagctacccccagcagcagggcctgggcgccagctacagaacagagagcgcccagaggcaggcctgcatgtatgccagcagcgcccctccttctgagcctgtgcccagcctggaggacatcagctgcaacacctggcccagcatgcccagctacagcagctgcaccgtgaccaccgtgcagcccatggaccggctgccctaccagcacttcagcgcccacttcaccagcggccccctggtgccccggctggccggcatggccaaccacggcagcccccagctgggggagggcatgttccagcaccagacctctgtggcccaccagcctgtggtgcggcagtgtggcccccagacaggcctgcagagccctggcaccctgcagcccccagagttcctgtacagccatggagtgcccaggaccctgagcccccaccagtaccacagcgtgcacggcgtgggcatggtgcctgagtggagcgacaacagctag

SEQ ID NO: 172798 - DNA, 1557 bp, synthetic construct; identical to SEQ ID NO: 172796
  misc_feature 1..1557: note = Description of Artificial Sequence: Synthetic coding sequence
  source 1..1557: mol_type = other DNA

SEQ ID NO: 172799 - DNA, 1269 bp, synthetic construct
  misc_feature 1..1269: note = Description of Artificial Sequence: Synthetic coding sequence
  source 1..1269: mol_type = other DNA
atggacatcgtgcctgcagatgaccaccgctacaagtttgctgacaacaagtggagcgtgacaggcaaggccgagcccgccatgcctggccgcctgtatgtgcacccagacagccctgccactggagcccactggatgaggcagctggtgtccttccagaagctgaagctgaccaacaaccacctggaccccttcggccacatcatcctgaacagcatgcacaagtaccagccccggctgcacatcgtgaaggcagatgaaaataatggatttggcagcaagaacacagccttctgcacccacgtgtttcctgagacagccttcatcgctgtgaccagctaccagaaccacaagatcacccagctgaagattgagaacaacccctttgccaagggcttccggggcagtgatgacatggagctgcacaggatgagcaggatgcagagcaaggagtaccctgtggtgcccaggagcacagtgcggcagaaggtggccagcaaccacagccccttcagcagcgagagccgggccctgagcaccagcagcaacctgggcagccagtaccagtgtgaaaatggagtgtctggccccagccaggacctgctgcccccacccaacccctaccccctgccccaggagcacagccagatctaccactgcaccaagaggaaggaggaggagtgcagcaccacagaccacccctacaagaagccctacatggagaccagccccagtgaagaagattccttctaccgcagcagctacccccagcagcagggcctgggcgccagctacagaacagaaagtgcccagaggcaggcctgcatgtatgccagcagcgccccacccagcgagcctgtgcccagcctggaggacatcagctgcaacacctggcccagcatgcccagctacagcagctgcaccgtgaccaccgtgcagcccatggaccggctgccctaccagcacttcagcgcccacttcaccagcggccccctggtgccccggctggccggcatggccaaccacggcagcccccagctgggggagggcatgttccagcaccagacctctgtggcccaccagcctgtggtgcggcagtgtggcccccagacaggcctgctgcacaacagacacttcctggagaaggagcgggagcggggggagcgggagcggcggcgggagaccgtggccaagaggacccccaggacccgcttcttcatcagccccaacgtgcacatctgcacccagggccgctggatgctgatctag

SEQ ID NO: 172800 - DNA, 1050 bp, synthetic construct
  misc_feature 1..1050: note = Description of Artificial Sequence: Synthetic coding sequence
  source 1..1050: mol_type = other DNA
atggctgatgctgatgagggcttcggcctggcccacacccccctggagccagatgccaaggacctgccctgtgacagcaagccagagagcgccctgggcgcccccagcaagagccccagcagcccccaggccgccttcacccagcagggcatggagggcatcaaggtgttcctgcacgagcgggagctgtggctgaagttccacgaggtgggcacagagatgatcatcaccaaggccggccgcaggatgttccccagctacaaggtgaaggtgacaggcctgaaccccaagaccaagtacatcctgctgatggacatcgtgcctgcagatgaccaccgctacaagtttgctgacaacaagtggagcgtgacaggcaaggccgagcccgccatgcctggccgcctgtatgtgcacccagacagccctgccaccggggcccactggatgaggcagctggtgtccttccagaagctgaagctgaccaacaaccacctggaccccttcggccacatcatcctgaacagcatgcacaagtaccagccccggctgcacatcgtgaaggcagatgagaacaacggcttcggcagcaagaacacagccttctgcacccacgtgtttcctgagacagccttcatcgctgtgaccagctaccagaaccacaagatcacccagctgaagattgagaacaacccctttgccaagggcttccggggcagtgatgacatggagctgcacaggatgagcaggatgcagagcaaggagtaccctgtggtgcccaggagcacagtgcggcagaaggtggccagcaaccacagccccttcagcagcgagagccgggccctgagcaccagcagcaacctgggcagccagtaccagtgtgaaaatggagtgtctggccccagccaggacctgctgcccccacccaacccctaccccctgccccaggagcacagccagatctaccactgcaccaagaggaaaggagaatgtgaccacccctggagcatctgcttcctgagctacctgttcctgagcctgggctggggctag

SEQ ID NO: 172801 - DNA, 1311 bp, synthetic construct
  misc_feature 1..1311: note = Description of Artificial Sequence: Synthetic coding sequence
  source 1..1311: mol_type = other DNA
atgtaccacccccgggagctgtaccccagcctgggcgccggctaccgcctgggccctgcccagcccggggctgacagcagcttccccccagccctggccgagggctaccgctacccagagctggacacccccaagctggactgcttcctgagcggcatggaggccgcccccaggaccctggccgcccacccccccctgcccctgctgcccccagccatgggcacagagcccgcccccagcgcccctgaggccctgcacagcctgcccggggtgtccctgagcctggagaaccgggagctgtggaaggagttcagctctgtgggcacagagatgatcatcaccaaggccggccgcaggatgtttcctgcctgccgggtgtctgtgacaggcctggaccctgaggcccgctacctgttcctgctggatgtgattcctgtggatggagcccgctaccgctggcagggccgccgctgggagcccagcggcaaggccgagccccggctgcctgacagagtgtacatccacccagacagccctgccactggagcccactggatgaggcagcctgtgtccttccaccgggtgaagctgaccaacagcaccctggacccccacggccacctgatcctgcacagcatgcacaagtaccagccccgcatccacctggtgcgggccgcccagctgtgcagccagcactggggcggcatggccagcttccgcttccctgagaccaccttcatctctgtgacagcctaccagaacccccagatcacccagctgaagattgctgccaacccctttgccaagggcttcagagaaaatggaagaaactgcaagcgggagagagatgcccgggtgaagaggaagctgcggggccctgagcctgctgccacagaggcctacggcagcggggacaccccaggcggcccctgtgacagcaccctgggcggggacatccgggagagtgaccctgagcaggccccagcccctggagaggccacagctgccccagcccccctgtgtggcggccccagcgctgaggcctacctgctgcaccctgctgccttccatggagcccccagccacctgcccaccaggagccccagcttccctgaggccccagacagcggccgcagcgccccctacagcgctgccttcctggagctgccccacggcagcggcggcagcggctacccagctgcccccccagctgtgccctttgccccccacttcctgcagggcggccccttccccctgccctacacagcccctgggggctacctggatgtgggcagcaagcccatgtactag

SEQ ID NO: 172802 - DNA, 1311 bp, synthetic construct; identical to SEQ ID NO: 172801
  misc_feature 1..1311: note = Description of Artificial Sequence: Synthetic coding sequence
  source 1..1311: mol_type = other DNA

SEQ ID NO: 172803 - DNA, 888 bp, synthetic construct
  misc_feature 1..888: note = Description of Artificial Sequence: Synthetic coding sequence
  source 1..888: mol_type = other DNA
atgtaccacccccgggagctgtaccccagcctgggcgccggctaccgcctgggccctgcccagcccggggctgacagcagcttccccccagccctggccgagggctaccgctacccagagctggacacccccaagctggactgcttcctgagcggcatggaggccgcccccaggaccctggccgcccacccccccctgcccctgctgcccccagccatgggcacagagcccgcccccagcgcccctgaggccctgcacagcctgcccggggtgtccctgagcctggagaaccgggagctgtggaaggagttcagctctgtgggcacagagatgatcatcaccaaggccggccgcaggatgtttcctgcctgccgggtgtctgtgacaggcctggaccctgaggcccgctacctgttcctgctggatgtgattcctgtggatggagcccgctaccgctggcagggccgccgctgggagcccagcggcaaggccgagccccggctgcctgacagagtgtacatccacccagacagccctgccactggagcccactggatgaggcagcctgtgtccttccaccgggtgaagctgaccaacagcaccctggacccccacggccacctgatcctgcacagcatgcacaagtaccagccccgcatccacctggtgcgggccgcccagctgtgcagccagcactggggcggcatggccagcttccgcttccctgagaccaccttcatctctgtgacagcctaccagaacccccagatcacccagctgaagattgctgccaacccctttgccaagggcttcagagaaaatggaagaaactgcaagcgctgggagctgttcatccacctgttcatgcacagcaccaacgtgtactag

SEQ ID NO: 172804 - DNA, 1974 bp, synthetic construct
  misc_feature 1..1974: note = Description of Artificial Sequence: Synthetic coding sequence
  source 1..1974: mol_type = other DNA
atggagatggagaccacagagcctgagccagactgtgtggtgcagccccccagccccccagatgacttcagctgccagatgaggctgtctgagaagatcacccccctgaagacctgcttcaagaagaaggaccagaagaggctgggcaccggcaccctgcggagcctgcggcccatcctgaacaccctgctggagagcggcagcctggatggagtcttccgcagcaggaaccagagcacagatgagaacagcctgcacgagcccatgatgaagaaggccatggagatcaacagcagctgccccccagctgagaacaacatgtctgtgctgatcccagacaggaccaacgtgggggaccagatccctgaggcccaccccagcacagaggcccctgagcgggtggtgcccatccaggaccacagcttccccagcgagaccctgagcggcaccgtggccgacagcaccccagcccacttccagacagacctgctgcaccctgtgtccagtgatgtgcccaccagcccagactgcctggacaaggtgattgattatgtgcccggcatcttccaggagaacagcttcaccatccagtacatcctggacaccagtgacaagctgagcacagagctgttccaggacaagtctgaggaggccagcctggacctggtgtttgagctggtgaaccagctgcagtaccacacccaccaggagaatggcatcgagatctgcatggacttcctgcagggcacctgcatctacggccgggactgcctgaagcaccacacagtgctgccctaccactggcagatcaagaggaccaccacccagaagtggcagagcgtcttcaatgacagccaggagcacctggagcgcttctactgcaacccagaaaatgacaggatgaggatgaagtatggaggccaggagttctgggccgacctgaatgccatgaatgtgtatgagaccacagaatttgaccagctgcggcggctgagcaccccacccagcagcaatgtgaacagcatctaccacacagtgtggaagttcttctgccgggaccacttcggctggagggagtacccagagagcgtcatccgcctcatcgaggaggccaacagccggggcctgaaggaggtgcgcttcatgatgtggaacaaccactacatcctgcacaacagcttcttccggcgggagatcaagagaagacccctcttccgcagctgcttcatcctgctgccctacctgcagaccctgggcggcgtgcccacccaggcccccccacccctggaggccaccagcagcagccagatcatctgcccagatggagtgaccagcgccaacttctacccagagacctgggtgtacatgcaccccagccaggacttcatccaggtgcctgtgtctgctgaggacaagagctaccgcatcatctacaacctcttccacaagacagtgcctgagttcaagtaccgcatcctgcagatcctgcgggtgcagaaccagttcctgtgggagaagtacaagaggaagaaggagtacatgaacaggaagatgtttggccgggaccgcatcatcaatgaaagacacctgttccacggcaccagccaggatgtggtggatggcatctgcaagcacaactttgacccccgggtgtgtgggaagcacgccaccatgtttggccagggcagctactttgccaagaaggccagctacagccacaacttcagcaagaagagcagcaaaggagtgcacttcatgttcctggccaaggtgctgaccggccgctacaccatgggcagccacggcatgaggcggcccccacctgtgaaccctggctctgtgaccagtgacctgtatgacagctgtgtggacaacttctttgagccccagatcttcgtcatcttcaatgatgaccagagctacccctacttcgtcatccagtatgaggaggtgagcaacacagtgtccatctag

SEQ ID NO: 172805 - DNA, 1974 bp, synthetic construct; identical to SEQ ID NO: 172804
  misc_feature 1..1974: note = Description of Artificial Sequence: Synthetic coding sequence
  source 1..1974: mol_type = other DNA

SEQ ID NO: 172806 - DNA, 1521 bp, synthetic construct
  misc_feature 1..1521: note = Description of Artificial Sequence: Synthetic coding sequence
  source 1..1521: mol_type = other DNA
atggagatggagaccacagagcctgagccagactgtgtggtgcagccccccagccccccagatgacttcagctgccagatgaggctgtctgagaagatcacccccctgaagacctgcttcaagaagaaggaccagaagaggctgggcaccggcaccctgcggagcctgcggcccatcctgaacaccctgctggagagcggcagcctggatggagtcttccgcagcaggaaccagagcacagatgagaacagcctgcacgagcccatgatgaagaaggccatggagatcaacagcagctgccccccagctgagaacaacatgtctgtgctgatcccagacaggaccaacgtgggggaccagatccctgaggcccaccccagcacagaggcccctgagcgggtggtgcccatccaggaccacagcttccccagcgagaccctgagcggcaccgtggccgacagcaccccagcccacttccagacagacctgctgcaccctgtgtccagtgatgtgcccaccagcccagactgcctggacaaggtgattgattatgtgcccggcatcttccaggagaacagcttcaccatccagtacatcctggacaccagtgacaagctgagcacagagctgttccaggacaagtctgaggaggccagcctggacctggtgtttgagctggtgaaccagctgcagtaccacacccaccaggagaatggcatcgagatctgcatggacttcctgcagggcacctgcatctacggccgggactgcctgaagcaccacacagtgctgccctaccactggcagatcaagaggaccaccacccagaagtggcagagcgtcttcaatgacagccaggagcacctggagcgcttctactgcaacccagaaaatgacaggatgaggatgaagtatggaggccaggagttctgggccgacctgaatgccatgaatgtgtatgagaccacagaatttgaccagctgcggcggctgagcaccccacccagcagcaatgtgaacagcatctaccacacagtgtggaagttcttctgccgggaccacttcggctggagggagtacccagagagcgtcatccgcctcatcgaggaggccaacagccggggcctgaaggaggtgcgcttcatgatgtggaacaaccactacatcctgcacaacagcttcttccggcgggagatcaagagaagacccctcttccgcagctgcttcatcctgctgccctacctgcagaccctgggcggcgtgcccacccaggcccccccacccctggaggccaccagcagcagccagatcatctgcccagatggagtgaccagcgccaacttctacccagagacctgggtgtacatgcaccccagccaggacttcatccaggtgcctgtgtctgctgaggacaagagctaccgcatcatctacaacctcttccacaagacagtgcctgagttcaagtaccgcatcctgcagatcctgcgggtgcagaaccagttcctgtgggagaagtag

SEQ ID NO: 172807 - DNA, 1965 bp, synthetic construct
  misc_feature 1..1965: note = Description of Artificial Sequence: Synthetic coding sequence
  source 1..1965: mol_type = other DNA
atggagatggagaccacagagcctgagccagactgtgtggtgcagccccccagccccccagatgacttcagctgccagatgaggctgtctgagaagatcacccccctgaagacctgcttcaagaagaaggaccagaagaggctgggcaccggcaccctgcggagcctgcggcccatcctgaacaccctgctggagagcggcagcctggatggagtcttccgcagcaggaaccagagcacagatgagaacagcctgcacgagcccatgatgaagaaggccatggagatcaacagcagctgccccccagctgagaacaacatgtctgtgctgatcccagacaggaccaacgtgggggaccagatccctgaggcccaccccagcacagaggcccctgagcgggtggtgcccatccaggaccacagcttccccagcgagaccctgagcggcaccgtggccgacagcaccccagcccacttccagacagacctgctgcaccctgtgtccagtgatgtgcccaccagcccagactgcctggacaaggtgattgattatgtgcccggcatcttccaggagaacagcttcaccatccagtacatcctggacaccagtgacaagctgagcacagagctgttccaggacaagtctgaggaggccagcctggacctggtgtttgagctggtgaaccagctgcagtaccacacccaccaggagaatggcatcgagatctgcatggacttcctgcagggcacctgcatctacggccgggactgcctgaagcaccacacagtgctgccctaccactggcagatcaagaggaccaccacccagaagtggcagagcgtcttcaatgacagccaggagcacctggagcgcttctactgcaacccagaaaatgacaggatgaggatgaagtatggaggccaggagttctgggccgacctgaatgccatgaatgtgtatgagaccacagaatttgaccagctgcggcggctgagcaccccacccagcagcaatgtgaacagcatctaccacacagtgtggaagttcttctgccgggaccacttcggctggagggagtacccagagagcgtcatccgcctcatcgaggaggccaacagccggggcctgaaggaggtgcgcttcatgatgtggaacaaccactacatcctgcacaacagcttcttccggcgggagatcaagagaagacccctcttccgcagctgcttcatcctgctgccctacctgcagaccctgggcggcgtgcccacccaggcccccccacccctggaggccaccagcagcagccagatcatctgcccagatggagtgaccagcgccaacttctacccagagacctgggtgtacatgcaccccagccaggacttcatccaggtgcctgtgtctgctgaggacaagagctaccgcatcatctacaacctcttccacaagacagtgcctgagttcaagtaccgcatcctgcagatcctgcgggtgcagaaccagttcctgtgggagaagtacaagaggaagaaggagtacatgaacaggaagatgtttggccgggaccgcatcatcaatgaaagacacctgttccacggcaccagccaggatgtggtggatggcatctgcaagcacaactttgacccccgggtgtgtgggaagcacgccaccatgtttggccagggcagctactttgccaagaaggccagctacagccacaacttcagcaagaagagcagcaaaggagtgcacttcatgttcctggccaaggtgctgaccggccgctacaccatgggcagccacggcatgaggcggcccccacctgtgaaccctggctctgtgaccagtgacctgtatgacagctgtgtggacaacttctttgagccccagatcttcgtcatcttcaatgatgaccagagctacccctacttcgtcatccagtatgaggaggtgagcaacacctag

SEQ ID NO: 172808 - DNA, 1974 bp, synthetic construct; identical to SEQ ID NO: 172804
  misc_feature 1..1974: note = Description of Artificial Sequence: Synthetic coding sequence
  source 1..1974: mol_type = other DNA

SEQ ID NO: 172809 - DNA, 1974 bp, synthetic construct; identical to SEQ ID NO: 172804
  misc_feature 1..1974: note = Description of Artificial Sequence: Synthetic coding sequence
  source 1..1974: mol_type = other DNA

SEQ ID NO: 172810 - DNA, 1662 bp, synthetic construct
  misc_feature 1..1662: note = Description of Artificial Sequence: Synthetic coding sequence
  source 1..1662: mol_type = other DNA
atgggcgccctggagatgcaggatgaggaggacagaattgaggccctgaagcaggtggccgacaagctgccccggcccaacctgctgctgctgaagcacctggtgtatgtgctgcacctgatcagcaagaacagcgaggtgaacaggatggacagcagcaacctggccatctgcatcggccccaacatgctgaccctggagaatgaccagagcctgagctttgaggcccagaaggacctgaacaacaaggtgaagaccctggtggagttcctgattgacaactgctttgagatctttggagagaacatccctgtgcacagcagcatcaccagtgatgacagcctggagcacacagacagcagtgatgtgtccaccctgcagaatgacagcgcctatgacagcaatgaccctgatgtggagagcaacagcagcagcggcatcagcagccccagccggcagccccaggtgcccatggccacagctgctggcctggacagcgctggcccccaggatgcccgggaggtgtccccagagcccatcgtgtccacagtggcccggctgaagagcagcctggcccagcctgaccggcgctacagcgagcccagcatgcccagcagccaggagtgcctggagagccgggtgaccaaccagaccctgaccaagtctgagggggacttccctgtgccccgggtgggcagccggctggagagcgaggaggccgaggaccccttccctgaggaggtgtttcctgctgtgcagggcaagaccaagaggcctgtggacctgaagatcaagaacctggcccctggctctgtgctgccccgggccctggtgctgaaggccttcagcagcagcagcctggatgccagcagtgacagcagccctgtggccagccccagcagccccaagaggaacttcttcagccgccaccagagcttcaccaccaagacagagaagggcaagcccagccgggagatcaagaagcacagcatgtccttcacctttgccccccacaagaaggtgctgaccaagaacctgtctgctggcagcggcaagagccaggacttcacccgggaccacgtgccccggggcgtgaggaaggagagccagctggccggcagaattgtgcaggagaatggctgtgagacccacaaccagacagcccggggcttctgcctgcggccccacgccctgtctgtggatgatgtgttccagggcgctgactgggagcggcccggcagccccccatcctatgaggaggccatgcagggccctgctgcccggctggtggccagcgagagccagacagtgggctccatgacagtgggctccatgagggccaggatgctggaggcccactgcctgctgccccccctgcccccagcccaccacgtggaggacagccgccaccggggcagcaaggagcccctgcccggccacggcctgagccccctgcctgagcgctggaagcagagcaggacagtgcacgccagcggggacagcctgggccacgtgtctggccctggccggcctgagctgctgcccctgaggacagtgtctgagagcgtgcagaggaacaagagggactgcctggtgcggcgctgcagccagcctgtgtttgaggccgaccagttccagtatgccaaggagagctacatctag

SEQ ID NO: 172811 - DNA, 801 bp, synthetic construct
  misc_feature 1..801: note = Description of Artificial Sequence: Synthetic coding sequence
  source 1..801: mol_type = other DNA
atgaagctgcggagcagccacaatgccagcaagaccctgaatgccaacaacatggagaccctgattgagtgccagagcgagggggacatcaaggagcaccccctgctggccagctgtgagagcgaggacagcatctgccagctgattgaggtgaagaagaggaagaaggtgctgtcctggcccttcctgatgaggcggctgagccctgccagtgacttcagcggggccctggagacagacctgaaggccagcctgtttgaccagcccctgagcatcatctgtggggacagcgacaccctgccccggcccatccaggacatcctgaccatcctgtgcctgaagggccccagcacagagggcatcttcagaagagctgccaatgagaaggccaggaaggagctgaaggaggagctgaacagcggagatgctgtggacctggagcggctgcctgtgcacctgctggccgtggtgttcaaggacttcctgcggagcatccccaggaagctgctgagcagtgacctgtttgaggagtggatgggcgccctggagatgcaggatgaggaggacagaattgaggccctgaagcaggtggccgacaagctgccccggcccaacctgctgctgctgaagcacctggtgtatgtgctgcacctgatcagcaagaacagcgaggtgaacaggatggacagcagcaacctggccatctgcatcggccccaacatgctgaccctggagaatgaccagagcctgagctttgaggcccagaaggacctgaacaacaaggtgtgcagcgcctactag

SEQ ID NO: 172812 - DNA, 2196 bp, synthetic construct
  misc_feature 1..2196: note = Description of Artificial Sequence: Synthetic coding sequence
  source 1..2196: mol_type = other DNA
atgaagctgcggagcagccacaatgccagcaagaccctgaatgccaacaacatggagaccctgattgagtgccagagcgagggggacatcaaggagcaccccctgctggccagctgtgagagcgaggacagcatctgccagctgattgaggtgaagaagaggaagaaggtgctgtcctggcccttcctgatgaggcggctgagccctgccagtgacttcagcggggccctggagacagacctgaaggccagcctgtttgaccagcccctgagcatcatctgtggggacagcgacaccctgccccggcccatccaggacatcctgaccatcctgtgcctgaagggccccagcacagagggcatcttcagaagagctgccaatgagaaggccaggaaggagctgaaggaggagctgaacagcggagatgctgtggacctggagcggctgcctgtgcacctgctggccgtggtgttcaaggacttcctgcggagcatccccaggaagctgctgagcagtgacctgtttgaggagtggatgggcgccctggagatgcaggatgaggaggacagaattgaggccctgaagcaggtggccgacaagctgccccggcccaacctgctgctgctgaagcacctggtgtatgtgctgcacctgatcagcaagaacagcgaggtgaacaggatggacagcagcaacctggccatctgcatcggccccaacatgctgaccctggagaatgaccagagcctgagctttgaggcccagaaggacctgaacaacaaggtgaagaccctggtggagttcctgattgacaactgctttgagatctttggagagaacatccctgtgcacagcagcatcaccagtgatgacagcctggagcacacagacagcagtgatgtgtccaccctgcagaatgacagcgcctatgacagcaatgaccctgatgtggagagcaacagcagcagcggcatcagcagccccagccggcagccccaggtgcccatggccacagctgctggcctggacagcgctggcccccaggatgcccgggaggtgtccccagagcccatcgtgtccacagtggcccggctgaagagcagcctggcccagcctgaccggcgctacagcgagcccagcatgcccagcagccaggagtgcctggagagccgggtgaccaaccagaccctgaccaagtctgagggggacttccctgtgccccgggtgggcagccggctggagagcgaggaggccgaggaccccttccctgaggaggtgtttcctgctgtgcagggcaagaccaagaggcctgtggacctgaagatcaagaacctggcccctggctctgtgctgccccgggccctggtgctgaaggccttcagcagcagcagcctggatgccagcagtgacagcagccctgtggccagccccagcagccccaagaggaacttcttcagccgccaccagagcttcaccaccaagacagagaagggcaagcccagccgggagatcaagaagcacagcatgtccttcacctttgccccccacaagaaggtgctgaccaagaacctgtctgctggcagcggcaagagccaggacttcacccgggaccacgtgccccggggcgtgaggaaggagagccagctggccggcagaattgtgcaggagaatggctgtgagacccacaaccagacagcccggggcttctgcctgcggccccacgccctgtctgtggatgatgtgttccagggcgctgactgggagcggcccggcagccccccatcctatgaggaggccatgcagggccctgctgcccggctggtggccagcgagagccagacagtgggctccatgacagtgggctccatgagggccaggatgctggaggcccactgcctgctgccccccctgcccccagcccaccacgtggaggacagccgccaccggggcagcaaggagcccctgcccggccacggcctgagccccctgcctgagcgctggaagcagagcaggacagtgcacgccagcggggacagcctgggccacgtgtctggccctggccggcctgagctgctgcccctgaggacagtgtctgagagcgtgcagaggaacaagagggactgcctggtgcggcgctgcagccagcctgtgtttgaggccgaccagttccagtatgccaaggagagctacatctag

SEQ ID NO: 172813 - DNA, 828 bp, synthetic construct
  misc_feature 1..828: note = Description of Artificial Sequence: Synthetic coding sequence
  source 1..828: mol_type = other DNA
atggccacagctgctggcctggacagcgctggcccccaggatgcccgggaggtgtccccagagcccatcgtgtccacagtggcccggctgaagagcagcctggcccagcctgaccggcgctacagcgagcccagcatgcccagcagccaggagtgcctggagagccgggtgaccaaccagaccctgaccaagtctgagggggacttccctgtgccccgggtgggcagccggctggagagcgaggaggccgaggaccccttccctgaggaggtgtttcctgctgtgcagggcaagaccaagaggcctgtggacctgaagatcaagaacctggcccctggctctgtgctgccccgggccctggtgctgaaggccttcagcagcagcagcctggatgccagcagtgacagcagccctgtggccagccccagcagccccaagaggaacttcttcagccgccaccagagcttcaccaccaagacagagaagggcaagcccagccgggagatcaagaagcacagcatgtccttcacctttgccccccacaagaaggtgctgaccaagaacctgtctgctggcagcggcaagagccaggacttcacccgggaccacgtgccccggggcgtgaggaaggagagccagctggccggccgcatcgtgcaggagaatggctgtgagacccacaaccagacagcccggggcttctgcctgcggccccacgccctgtctgtggatgatgtgttccagggcgctgactgggagaggcctggcagcccccccagctatgaggaggccatgcagggccctgctgcccggccctggggcgcctag

SEQ ID NO: 172814 - DNA, 327 bp, synthetic construct
  misc_feature 1..327: note = Description of Artificial Sequence: Synthetic coding sequence
  source 1..327: mol_type = other DNA
atgaccaggaagatcttcaccaacacccgggagcgctggaggcagcagaatgtgaacagcgcctttgccaagctgaggaagctgatccccacccaccccccagacaagaagctgagcaagaatgagaccctgcggctggccatgagatacatcaacttcctggtgaaggtgctgggggagcagagcctgcagcagacaggagtggccgcccagggcaacatcctgggcctcttcccccagggcccccacctgcccggcctggaggacaggaccctgctggagaactaccaggtgcccagccctggccccagccaccacatcccctag

SEQ ID NO: 172815 - DNA, 780 bp, synthetic construct
  misc_feature 1..780: note = Description of Artificial Sequence: Synthetic coding sequence
  source 1..780: mol_type = other DNA
atggccagcccccagggcggccagatcgccatcgccatgaggctgaggaaccagctgcagagcgtgtacaagatggaccccctgagaaatgaggaggaggtgcgggtgaagatcaaggacctgaatgagcacatcgtgtgctgcctgtgtgccggctactttgtggatgccaccaccatcacagagtgcctgcacaccttctgcaagagctgcatcgtgaagtacctgcagaccagcaagtactgccccatgtgcaacatcaagatccacgagacccagcccctgctgaacctgaagctggacagagtgatgcaggacatcgtgtacaagctggtgcccggcctgcaggacagcgaggagaagaggatccgggagttctaccagagccggggcctggacagagtgacccagcccactggagaggagcccgccctgagcaacctgggcctgcccttcagcagctttgaccacagcaaggcccactactaccgctatgatgagcagctgaacctgtgcctggagcggctgagcagcggcaaggacaagaacaagtctgtgctgcagaacaagtatgtgcgctgcagcgtgcgggcagaggtgcgccacctgcggcgggtgctgtgccaccggctgatgctgaacccccagcacgtgcagctgctgtttgacaatgaggtgctgcctgaccacatgaccatgaagcagatctggctgagccgctggtttgggaagcccagccccctgctgctgcagtacagcgtgaaggagaagagaagatag

SEQ ID NO: 172816 - DNA, 876 bp, synthetic construct
  misc_feature 1..876: note = Description of Artificial Sequence: Synthetic coding sequence
  source 1..876: mol_type = other DNA
atggaggccccagccagcgcccagaccccccacccccatgagcccatcagctttggcatcgaccagatcctgaacagcccagaccaggacagcgccccagccccccggggcccagatggagccagctacctgggcggccccccaggcggccggcctggggccacctaccccagcctgcctgccagctttgctggcctgggcgccccctttgaagatgctggcagctacagcgtgaacctgagcctggccccagctggggtcatccgggtgcctgcccaccggcccctgcctggagctgtgcccccacccctgcccagcgccctgcctgccatgcccagcgtgcccaccgtgagcagcctgggcggcctgaacttcccctggatggagagcagccgccgctttgtgaaggaccgcttcaccgctgctgctgccctgacccccttcaccgtgacccggcgcatcggccacccctaccagaacagaacaccacccaagaggaagaagcccaggaccagcttcagccgggtgcagatctgtgagctggagaagcgcttccaccggcagaagtacctggccagcgctgagagagctgccctggccaagagcctgaagatgacagatgcccaggtgaagacctggttccagaacagaaggaccaagtggaggcggcagacagctgaggagcgggaggccgagcggcagcaggccagccggctgatgctgcagctgcagcatgatgccttccagaagagcctgaatgacagcatccagcctgaccccctgtgcctgcacaacagcagcctgtttgccctgcagaacctgcagccctgggaggaggacagcagcaaggtgcctgctgtgaccagcctggtgtag

SEQ ID NO: 172817 - DNA, 312 bp, synthetic construct
  misc_feature 1..312: note = Description of Artificial Sequence: Synthetic coding sequence
  source 1..312: mol_type = other DNA
atggccgagagctggagcggccaggccctgcaggccctgcctgccaccgtgctgggcgccctgggcagcgagttcctgcgggagtgggaggcccaggacatgagggtgaccctcttcaagctgctgctgctgtggctggtgctgagcctgctgggcatccagctggcctggggcttctacggcaacacagtgacaggcctgtaccacaggcctggcctgggcggccagaatggcagcaccccagatggcagcacccacttccccagctgggagatggccgccaatgagcccctgaagacccaccgggagtag

SEQ ID NO: 172818 - DNA, 387 bp, synthetic construct
  misc_feature 1..387: note = Description of Artificial Sequence: Synthetic coding sequence
  source 1..387: mol_type = other DNA
atggccagcgaggcctctgtgcggctgggcgtgcccccaggccgcctgtggatccagaggcctggcatctatgaagatgaggagggccgcacctgggtgacagtggtggtgcgcttcaaccccagcagaagagagtgggcccgggccagccagggcagccgctatgagcccagcatcaccgtgcacctgtggcagatggctgtgcacacccgggagctgctgagcagcggccagatgcccttcagccagctgcctgctgtgtggcagctgtacccaggcaggaagtacagagctgctgacagcagcttctgggagattgctgaccacggccagattgacagcatggagcagctggtgctgacctaccagcctgagaggaaggactag

SEQ ID NO: 172819 - DNA, 387 bp, synthetic construct; identical to SEQ ID NO: 172818
  misc_feature 1..387: note = Description of Artificial Sequence: Synthetic coding sequence
  source 1..387: mol_type = other DNA

SEQ ID NO: 172820 - DNA, 4776 bp, synthetic construct
  misc_feature 1..4776: note = Description of Artificial Sequence: Synthetic coding sequence
  source 1..4776: mol_type = other DNA
atgggaaatgctgagagccagcacgtggagcacgagttctacggggagaagcacgccagcctgggcaggaagcacaccagccgcagcctgcggctgagccacaagaccaggaggaccaggcatgccagcagcggcaaggtgatccacaggaacagcgaggtgtccaccaggagcagcagcacccccagcatcccccagagcctggccgagaatggcctggagcccttcagccaggacggcaccctggaggactttggcagccccatctgggtggacagagtggacatgggcctgcggcctgtgtcctacacagacagctctgtgaccccatctgtggacagcagcatcgtgctgacagctgcctctgtgcagagcatgccagacacagaggagagccggctgtatggagatgatgccacctacctggccgagggcggccggcggcagcacagctacaccagcaatggccccaccttcatggagacagccagcttcaagaagaagaggagcaagtctgctgacatctggagggaggacagcctggagttcagcctgagtgacctgagccaggagcacctgaccagcaatgaggagatcctgggcagcgctgaggagaaggactgtgaggaggcccggggcatggagacccgggccagcccccggcagctgagcacctgccagagggccaacagcctgggggacctgtatgcccagaagaacagcggcgtgacagccaacggcggccctggcagcaagtttgctggctactgcaggaacctggtgtctgacatccccaacctggccaaccacaagatgcctcctgctgctgctgaggagaccccaccctacagcaactacaacaccctgccctgcaggaagagccactgcctgtctgagggcgccaccaacccccagatcagccacagcaacagcatgcagggcagaagagccaagaccacccaggatgtgaatgctggggagggcagcgagtttgctgacagcggcatcgagggcgccaccacagacacagacctgctgagccgccgcagcaatgccaccaacagcagctacagccccaccaccggccgggcctttgtgggcagtgacagcggcagcagcagcactggagatgctgcccggcagggcgtgtatgagaacttccggcgggagctggagatgagcaccaccaacagcgagagcctggaggaggccggcagcgcccacagtgatgagcagagcagcggcaccctgagcagccctggccagagcgacatcctgctgacagctgcccagggcaccgtgaggaaggccggggccctggccgtgaagaacttcctggtgcacaagaagaacaagaaggtggagagcgccaccaggaggaagtggaagcactactgggtgtccctgaagggctgcaccctcttcttctatgaaagtgatggccgctctggaattgaccacaacagcatccccaagcatgctgtgtgggtggagaacagcatcgtgcaggccgtgcctgagcaccccaagaaggactttgtgttctgcctgagcaacagcctgggagatgccttcctgttccagaccaccagccagacagagctggagaactggatcacagccatccacagcgcctgtgccacagctgtggcccggcaccaccacaaggaggacaccctgcggctgctgaagtctgagatcaagaagctggagcagaagattgacatggatgagaagatgaagaagatgggagagatgcagctgagctctgtgacagacagcaagaagaagaagaccatcctggaccagatctttgtgtgggagcagaacctggagcagttccagatggacctcttccgcttccgctgctacctggccagcctgcagggcggggagctgcccaaccccaagaggctgctggcctttgccagccggcccaccaaggtggccatgggccgcctgggcatcttctctgtgtcctccttccacgccctggtggccgccaggactggagaaacaggagtgagaagaaggacccaggccatgagccgcagcgccagcaagagaagaagccgcttcagcagcctgtggggcctggacaccaccagcaagaagaagcagggccggcccagcatcaaccaggtgtttggagagggcacagaggccgtgaagaagagcctggagggcatctttgatgacatcgtgcctgatggcaagcgggagaaggaggtggtgctgcccaacgtgcaccagcacaacccagactgtgacatctgggtgcatgagtacttcacccccagctggttctgcctgcccaacaaccagcctgccctgactgtggtgcggcctggggacacagcccgggacaccctggagctgatctgcaagacccaccagctggaccacagcgcccactacctgcggctgaagttcctgattgagaacaagatgcagctgtatgtgccccagcctgaggaggacatctatgagctgctgtacaaggagattgagatctgccccaaggtgacccagagcatccacatcgagaagagtgacacagctgctgacacctacggcttcagcctgagctctgtggaggaggatggcatccggcggctgtatgtgaacagcgtgaaggagaccggcctggccagcaagaagggcctgaaggctggagatgagatcctggagatcaacaacagagctgctgatgccctgaacagctccatgctgaaggacttcctgagccagcccagcctgggcctgctggtgaggacctacccagagctggaggagggcgtggagctgctggagagccccccccaccgggtggatggccctgctgacctgggggagagccccctggccttcctgaccagcaaccctggccacagcctgtgcagcgagcagggcagcagcgctgagacagcccctgaggagacagagggccctgacctggagagcagtgatgaaacagaccacagcagcaagagcacagagcaggtggccgccttctgccgcagcctgcacgagatgaaccccagcgaccagagccccagcccccaggacagcacaggcccccagctggccaccatgaggcagctgagtgatgctgacaagctgaggaaggtgatctgtgagctgctggagacagagaggacctacgtgaaggacctgaactgcctgatggagcgctacctgaagcccctgcagaaggagaccttcctgacccaggatgagctggatgtgctgtttggaaacctgacagagatggtggagttccaggtggagttcctgaagaccctggaggatggagtgcggctggtgcctgacctggagaagctggagaaggtggaccagttcaagaaggtgctcttcagcctgggcggcagcttcctgtactatgctgaccgcttcaagctgtacagcgccttctgtgccagccacaccaaggtgcccaaggtgctggtgaaggccaagacagacacagccttcaaggccttcctggatgcccagaaccccaagcagcagcacagcagcaccctggagagctacctgatcaagcccatccagaggatcctgaagtaccccctgctgctgcgggagctgtttgccctgacagatgctgagagcgaggagcactaccacctggatgtggccatcaagaccatgaacaaggtggccagccacatcaatgagatgcagaagatccacgaggagtttggagctgtgtttgaccagctgattgctgagcagacaggagagaagaaggaggtggccgacctgtccatgggagacctgctgctgcacaccaccgtcatctggctgaaccccccagccagcctgggcaagtggaagaaggagcctgagctggccgcctttgtgttcaagacagctgtggtgctggtgtacaaggatggcagcaagcagaagaagaagctggtgggcagccaccggctgagcatctatgaggactgggaccccttccgcttccgccacatgatccccacagaggccctgcaggtgcgggccctggccagcgcagatgctgaggccaatgctgtgtgtgagatcgtgcacgtgaagtctgagagcgagggccggcctgagagggtcttccacctgtgctgcagcagccctgagagcaggaaggacttcctgaaggctgtgcacagcatcctgcgggacaagcaccggcggcagctgctgaagacagagagcctgcccagcagccagcagtatgtgccctttggaggcaagaggctgtgtgccctgaagggggcccggcctgccatgagcagagctgtgtctgcccccagcaagagcctgggcagaagaagaagaaggctggccaggaaccgcttcaccatcgacagtgatgctgtgtctgccagcagccctgagaaggagagccagcagcccccaggcggcggggacacagaccgctgggtggaggagcagtttgacctggcccagtatgaggagcaggatgacatcaaggagacagacatcctgagtgatgatgatgagttctgtgagagcgtgaagggggcctctgtggaccgggacctgcaggagcggctgcaggccaccagcatcagccagcgggagcggggcaggaagaccctggacagccacgccagcaggatggcccagctgaagaagcaggccgccctgagcggcatcaatggaggcctggagagcgccagcgaggaggtgatctgggtgagaagagaagattttgcccccagcaggaagctgaacacagagatctag

SEQ ID NO: 172821 - DNA, 3216 bp, synthetic construct
  misc_feature 1..3216: note = Description of Artificial Sequence: Synthetic coding sequence
  source 1..3216: mol_type = other DNA
atggagacagccagcttcaagaagaagaggagcaagtctgctgacatctggagggaggacagcctggagttcagcctgagtgacctgagccaggagcacctgaccagcaatgaggagatcctgggcagcgctgaggagaaggactgtgaggaggcccggggcatggagacccgggccagcccccggcagctgagcacctgccagagggccaacagcctgggggacctgtatgcccagaagaacagcggcgtgacagccaatggaggccctggcagcaagtttgctggctactgcaggaacctggtgtctgacatccccaacctggccaaccacaagatgcccccagctgctgctgaggagaccccaccctacagcaactacaacaccctgccctgcaggaagagccactgcctgtctgagggcgccaccaacccccagatcagccacagcaacagcatgcagggccggcgggccaagaccacccaggatgtgaatgctggggagggcagcgagtttgctgacagcggcattgaaggagccaccacagacacagacctgctgagcagaagaagcaatgccaccaacagcagctacagccccaccaccggccgggcctttgtgggcagtgacagcggcagcagcagcactggagatgctgcccggcagggcgtgtatgagaacttcagaagagagctggagatgagcaccaccaacagcgagagcctggaggaggccggcagcgcccacagtgatgagcagagcagcggcaccctgagcagccctggccagagcgacatcctgctgacagctgcccagggcaccgtgaggaaggccggggccctggccgtgaagaacttcctggtgcacaagaagaacaagaaggtggagagcgccaccaggaggaagtggaagcactactgggtgtccctgaagggctgcaccctcttcttctatgaaagtgatggccgcagcggcatcgaccacaacagcatccccaagcatgctgtgtgggtggagaacagcatcgtgcaggccgtgcctgagcaccccaagaaggactttgtgttctgcctgagcaacagcctgggagatgccttcctgttccagaccaccagccagacagagctggagaactggatcacagccatccacagcgcctgtgccacagctgtggcccggcaccaccacaaggaggacaccctgcggctgctgaagtctgagatcaagaagctggagcagaagattgacatggatgagaagatgaagaagatgggagagatgcagctgagctctgtgacagacagcaagaagaagaagaccatcctggaccagatctttgtgtgggagcagaacctggagcagttccagatggacctcttccgcttccgctgctacctggccagcctgcagggcggggagctgcccaaccccaagaggctgctggcctttgccagccggcccaccaaggtggccatgggccgcctgggcatcttctctgtgagcagcttccacgccctggtggccgccaggactggagagaccggggtgagaagaaggacccaggccatgagccgcagcgccagcaagaggaggagccgcttcagcagcctgtggggcctggacaccaccagcaagaagaagcagggccggcccagcatcaaccaggtgtttggagagggcacagaagctgtgaagaagagcctggagggcatctttgatgacatcgtgcctgatggcaagcgggagaaggaggtggtgctgcccaacgtgcaccagcacaacccagactgtgacatctgggtgcatgagtacttcacccccagctggttctgcctgcccaacaaccagcctgccctgactgtggtgcggcctggggacacagcccgggacaccctggagctgatctgcaagacccaccagctggaccacagcgcccactacctgcggctgaagttcctgattgagaacaagatgcagctgtatgtgccccagcctgaggaggacatctatgagctgctgtacaaggagattgagatctgccccaaggtgacccagagcatccacatcgagaagagtgacacagctgctgacacctacggcttcagcctgagctctgtggaggaggatggcatccggcggctgtatgtgaacagcgtgaaggagaccggcctggccagcaagaagggcctgaaggctggagatgagatcctggagatcaacaacagagctgctgatgccctgaacagctccatgctgaaggacttcctgagccagcccagcctgggcctgctggtgaggacctacccagagctggaggagggcgtggagctgctggagagccccccccaccgggtggatggccctgctgacctgggggagagccccctggccttcctgaccagcaaccctggccacagcctgtgcagcgagcagggcagcagcgctgagacagcccctgaggagacagagggccctgacctggagagcagtgatgaaacagaccacagcagcaagagcacagagcaggtggccgccttctgccgcagcctgcacgagatgaaccccagcgaccagagccccagcccccaggacagcacaggcccccagctggccaccatgaggcagctgagtgatgctgacaagctgaggaaggtgatctgtgagctgctggagacagagaggacctacgtgaaggacctgaactgcctgatggagcgctacctgaagcccctgcagaaggagaccttcctgacccaggatgagctggatgtgctgtttggaaacctgacagagatggtggagttccaggtggagttcctgaagaccctggaggatggagtgcggctggtgcctgacctggagaagctggagaaggtggaccagttcaagaaggtgctcttcagcctgggcggcagcttcctgtactatgctgaccgcttcaagctgtacagcgccttctgtgcccacaagagcagccagggccctggagagagccaggacagacatggcttccagggcatcctgggctgcccagagcctgaggccgccgccctgattcatgctggggtggtgccccaccaggcccaccctgaggacccccaggtgcccaccagcgcccagggcgctgtgcggccagacagatgtggggagcggggggccctgcccccaggccggggccaccaggaccacgagcagggctgccagagccaccagtag

SEQ ID NO: 172822 - DNA, 678 bp, synthetic construct
  misc_feature 1..678: note = Description of Artificial Sequence: Synthetic coding sequence
  source 1..678: mol_type = other DNA
atgggaaatgctgagagccagcacgtggagcacgagttctacggggagaagcacgccagcctgggcaggaagcacaccagccgcagcctgcggctgagccacaagaccaggaggaccaggcatgccagcagcggcaaggtgatccacaggaacagcgaggtgtccaccaggagcagcagcacccccagcatcccccagagcctggccgagaatggcctggagcccttcagccaggacggcaccctggaggactttggcagccccatctgggtggacagagtggacatgggcctgcggcctgtgtcctacacagacagctctgtgaccccatctgtggacagcagcatcgtgctgacagctgcctctgtgcagagcatgccagacacagaggagagccggctgtatggagatgatgccacctacctggccgagggcggccggcggcagcacagctacaccagcaatggccccaccttcatggagacagccagcttcaagaagaagaggagcaagtctgctgacatctggagggaggacagcctggagttcagcctgagtgacctgagccaggagcacctgaccagcaatgaggagatcctgggcagcgctgaggagaaggactgtgaggaggcccggggcatggagacccgggccagcccccggcagctgagcacctag

SEQ ID NO: 172823 - DNA, 4596 bp, synthetic construct
  misc_feature 1..4596: note = Description of Artificial Sequence: Synthetic coding sequence
  source 1..4596: mol_type = other DNA
atgggaaatgctgagagccagcacgtggagcacgagttctacggggagaagcacgccagcctgggcaggaagcacaccagccgcagcctgcggctgagccacaagaccaggaggaccaggcatgccagcagcggcaaggtgatccacaggaacagcgaggtgtccaccaggagcagcagcacccccagcatcccccagagcctggccgagaatggcctggagcccttcagccaggacggcaccctggaggactttggcagccccatctgggtggacagagtggacatgggcctgcggcctgtgtcctacacagacagctctgtgaccccatctgtggacagcagcatcgtgctgacagctgcctctgtgcagagcatgccagacacagaggagagccggctgtatggagatgatgccacctacctggccgagggcggccggcggcagcacagctacaccagcaatggccccaccttcatggagacagccagcttcaagaagaagaggagcaagtctgctgacatctggagggaggacagcctggagttcagcctgagtgacctgagccaggagcacctgaccagcaatgaggagatcctgggcagcgctgaggagaaggactgtgaggaggcccggggcatggagacccgggccagcccccggcagctgagcacctgccagagggccaacagcctgggggacctgtatgcccagaagaacagcggcgtgacagccaacggcggccctggcagcaagtttgctggctactgcaggaacctggtgtctgacatccccaacctggccaaccacaagatgcctcctgctgctgctgaggagaccccaccctacagcaactacaacaccctgccctgcaggaagagccactgcctgtctgagggcgccaccaacccccagatcagccacagcaacagcatgcagggcagaagagccaagaccacccaggatgtgaatgctggggagggcagcgagtttgctgacagcggcatcgagggcgccaccacagacacagacctgctgagccgccgcagcaatgccaccaacagcagctacagccccaccaccggccgggcctttgtgggcagtgacagcggcagcagcagcactggagatgctgcccggcagggcgtgtatgagaacttccggcgggagctggagatgagcaccaccaacagcgagagcctggaggaggccggcagcgcccacagtgatgagcagagcagcggcaccctgagcagccctggccagagcgacatcctgctgacagctgcccagggcaccgtgaggaaggccggggccctggccgtgaagaacttcctggtgcacaagaagaacaagaaggtggagagcgccaccaggaggaagtggaagcactactgggtgtccctgaagggctgcaccctcttcttctatgaaagtgatggccgctctggaattgaccacaacagcatccccaagcatgctgtgtgggtggagaacagcatcgtgcaggccgtgcctgagcaccccaagaaggactttgtgttctgcctgagcaacagcctgggagatgccttcctgttccagaccaccagccagacagagctggagaactggatcacagccatccacagcgcctgtgccacagctgtggcccggcaccaccacaaggaggacaccctgcggctgctgaagtctgagatcaagaagctggagcagaagattgacatggatgagaagatgaagaagatgggagagatgcagctgagctctgtgacagacagcaagaagaagaagaccatcctggaccagatctttgtgtgggagcagaacctggagcagttccagatggacctcttccgcttccgctgctacctggccagcctgcagggcggggagctgcccaaccccaagaggctgctggcctttgccagccggcccaccaaggtggccatgggccgcctgggcatcttctctgtgtcctccttccacgccctggtggccgccaggactggagaaacaggagtgagaagaaggacccaggccatgagccgcagcgccagcaagagaagaagccgcttcagcagcctgtggggcctggacaccaccagcaagaagaagcagggccggcccagcatcaaccagcgggagaaggaggtggtgctgcccaacgtgcaccagcacaacccagactgtgacatctgggtgcatgagtacttcacccccagctggttctgcctgcccaacaaccagcctgccctgactgtggtgcggcctggggacacagcccgggacaccctggagctgatctgcaagctgtacaaggagattgagatctgccccaaggtgacccagagcatccacatcgagaagagtgacacagctgctgacacctacggcttcagcctgagctctgtggaggaggatggcatccggcggctgtatgtgaacagcgtgaaggagaccggcctggccagcaagaagggcctgaaggctggagatgagatcctggagatcaacaacagagctgctgatgccctgaacagctccatgctgaaggacttcctgagccagcccagcctgggcctgctggtgaggacctacccagagctggaggagggcgtggagctgctggagagccccccccaccgggtggatggccctgctgacctgggggagagccccctggccttcctgaccagcaaccctggccacagcctgtgcagcgagcagggcagcagcgctgagacagcccctgaggagacagagggccctgacctggagagcagtgatgaaacagaccacagcagcaagagcacagagcaggtggccgccttctgccgcagcctgcacgagatgaaccccagcgaccagagccccagcccccaggacagcacaggcccccagctggccaccatgaggcagctgagtgatgctgacaagctgaggaaggtgatctgtgagctgctggagacagagaggacctacgtgaaggacctgaactgcctgatggagcgctacctgaagcccctgcagaaggagaccttcctgacccaggatgagctggatgtgctgtttggaaacctgacagagatggtggagttccaggtggagttcctgaagaccctggaggatggagtgcggctggtgcctgacctggagaagctggagaaggtggaccagttcaagaaggtgctcttcagcctgggcggcagcttcctgtactatgctgaccgcttcaagctgtacagcgccttctgtgccagccacaccaaggtgcccaaggtgctggtgaaggccaagacagacacagccttcaaggccttcctggatgcccagaaccccaagcagcagcacagcagcaccctggagagctacctgatcaagcccatccagaggatcctgaagtaccccctgctgctgcgggagctgtttgccctgacagatgctgagagcgaggagcactaccacctggatgtggccatcaagaccatgaacaaggtggccagccacatcaatgagatgcagaagatccacgaggagtttggagctgtgtttgaccagctgattgctgagcagacaggagagaagaaggaggtggccgacctgtccatgggagacctgctgctgcacaccaccgtcatctggctgaaccccccagccagcctgggcaagtggaagaaggagcctgagctggccgcctttgtgttcaagacagctgtggtgctggtgtacaaggatggcagcaagcagaagaagaagctggtgggcagccaccggctgagcatctatgaggactgggaccccttccgcttccgccacatgatccccacagaggccctgcaggtgcgggccctggccagcgcagatgctgaggccaatgctgtgtgtgagatcgtgcacgtgaagtctgagagcgagggccggcctgagagggtcttccacctgtgctgcagcagccctgagagcaggaaggacttcctgaaggctgtgcacagcatcctgcgggacaagcaccggcggcagctgctgaagacagagagcctgcccagcagccagcagtatgtgccctttggaggcaagaggctgtgtgccctgaagggggcccggcctgccatgagcagagctgtgtctgcccccagcaagagcctgggcagaagaagaagaaggctggccaggaaccgcttcaccatcgacagtgatgctgtgtctgccagcagccctgagaaggagagccagcagcccccaggcggcggggacacagaccgctgggtggaggagcagtttgacctggcccagtatgaggagcaggatgacatcaaggagacagacatcctgagtgatgatgatgagttctgtgagagcgtgaagggggcctctgtggaccgggacctgcaggagcggctgcaggccaccagcatcagccagcgggagcggggcaggaagaccctggacagccacgccagcaggatggcccagctgaagaagcaggccgccctgagcggcatcaatggaggcctggagagcgccagcgaggaggtgatctgggtgagaagagaagattttgcccccagcaggaagctgaacacagagatctag

SEQ ID NO: 172824 - DNA, 2493 bp, synthetic construct
  misc_feature 1..2493: note = Description of Artificial Sequence: Synthetic coding sequence
  source 1..2493: mol_type = other DNA
atgggctccatgttccgctctgaggaggtggccctggtgcagctgttcctgcccacagctgctgcctacacctgtgtgtcccggctgggggagctgggcctggtggagttccgggacctgaatgcctctgtgtctgccttccagaggagatttgtggtggatgtgcggcgctgtgaggagctggagaagaccttcaccttcctgcaggaggaggtgagaagagctggcctggtgctgcccccacccaagggccgcctgcctgcccccccaccccgggacctgctgcgcatccaggaggagacagagcggctggcccaggagctgagagatgtgcggggcaaccagcaggccctgcgggcccagctgcaccagctgcagctgcatgctgctgtgctgcggcagggccacgagccccagctggccgccgcccacacagatggagccagcgagaggacccccctgctgcaggcccctgggggcccccaccaggacctgcgggtgaactttgtggccggggctgtggagccccacaaggccccagccctggagcggctgctgtggagggcctgccggggcttcctgattgccagcttccgggagctggagcagcccctggagcaccctgtgactggagagcccgccacctggatgaccttcctgatctcctactggggcgagcagatcggccagaagatcaggaagatcacagactgcttccactgccacgtgttccccttcctgcagcaggaggaggcccggctgggcgccctgcagcagctgcagcagcagagccaggagctgcaggaggtgctgggggagacagagcgcttcctgagccaggtgctgggccgggtgctgcagctgctgcccccaggccaggtgcaggtgcacaagatgaaggctgtgtacctggccctgaaccagtgcagcgtgtccaccacccacaagtgcctgattgctgaggcctggtgcagcgtgcgggacctgcctgccctgcaggaggccctgcgggacagctccatggaggagggcgtgtctgctgtggcccaccgcatcccctgccgggacatgccacccaccctcatccgcaccaaccgcttcaccgccagcttccagggcatcgtggatgcctacggcgtgggccgctaccaggaggtgaacccagccccctacaccatcatcaccttccccttcctgtttgctgtgatgtttggagatgtgggccacggcctgctgatgttcctgtttgccctggccatggtgctggccgagaacagacctgctgtgaaggccgcccagaatgagatctggcagaccttcttccggggccgctacctgctgctgctgatgggcctcttcagcatctacacaggcttcatctacaatgaatgcttcagccgggccaccagcatcttccccagcggctggagcgtggccgccatggccaaccagagcggctggagcgatgccttcctggcccagcacaccatgctgaccctggaccccaacgtgactggagtcttcctgggcccctaccccttcggcatcgaccccatctggagcctggccgccaaccacctgtccttcctgaacagcttcaagatgaagatgtctgtcatcctgggcgtggtgcacatggccttcggcgtggtgctgggcgtcttcaaccacgtgcacttcggccagaggcaccggctgctgctggagaccctgcctgagctgaccttcctgctgggcctgtttggctacctggtgttcctggtgatctacaagtggctgtgtgtgtgggccgcccgggccgccagcgcccccagcatcctgatccacttcatcaacatgttcctgttcagccacagccccagcaaccggctgctgtacccccggcaggaggtggtgcaggccaccctggtggtgctggccctggccatggtgcccatcctgctgctgggcacccccctgcacctgctgcaccgccacagaagaaggctgcggcggcggcctgctgaccggcaggaggagaacaaggccggcctgctggacctgcctgatgcctctgtgaatggctggagcagtgatgaggagaaggccggcggcctggatgatgaggaggaggccgagctggtgcccagcgaggtgctgatgcaccaggccatccacaccatcgagttctgcctgggctgtgtgagcaacacagccagctacctgcggctgtgggccctgagcctggcccacgcccagctgtctgaggtgctgtgggccatggtgatgagaattggcctgggcctgggccgggaggtgggcgtggccgctgtggtgctggtgcccatctttgctgcctttgctgtgatgacagtggccatcctgctggtgatggagggcctgagcgccttcctgcacgccctgcggctgcactgggtggagttccagaacaagttctacagcggcaccggctacaagctgagccccttcacctttgctgccacagatgactag

SEQ ID NO: 172825 - DNA, 657 bp, synthetic construct
  misc_feature 1..657: note = Description of Artificial Sequence: Synthetic coding sequence
  source 1..657: mol_type = other DNA
atgggctccatgttccgctctgaggaggtggccctggtgcagctgttcctgcccacagctgctgcctacacctgtgtgtcccggctgggggagctgggcctggtggagttccgggacctgaatgcctctgtgtctgccttccagaggagatttgtggtggatgtgcggcgctgtgaggagctggagaagaccttcaccttcctgcaggaggaggtgagaagagctggcctggtgctgcccccacccaagggccgcctgcctgcccccccaccccgggacctgctgcgcatccaggaggagacagagcggctggcccaggagctgagagatgtgcggggcaaccagcaggccctgcgggcccagctgcaccagctgcagctgcatgctgctgtgctgcggcagggccacgagccccagctggccgccgcccacacagatggagccagcgagaggacccccctgctgcaggcccctgggggcccccaccaggacctgcgggtgaactttgtggccggggctgtggagccccacaaggccccagccctggagcggctgctgtggagggcctgccggggcttcctgattgccagcttccgggagctggagcagcccctggagcaccctgtgactggagagcccgccacctggatgacctag

SEQ ID NO: 172826 - DNA, 186 bp, synthetic construct
  misc_feature 1..186: note = Description of Artificial Sequence: Synthetic coding sequence
  source 1..186: mol_type = other DNA
gatgatgaggaggaggccgagctggtgcccagcgaggtgctgatgcaccaggccatccacaccatcgagttctgcctgggctgtgtgagcaacacagccagctacctgcggctgtgggccctgagcctggcccacgcccgctggaacagcaggaccagcagcacccaggcccgggccaccagctag

SEQ ID NO: 172827 - DNA, 1845 bp, synthetic construct
  misc_feature 1..1845: note = Description of Artificial Sequence: Synthetic coding sequence
  source 1..1845: mol_type = other DNA
atgaccttcctgatctcctactggggcgagcagatcggccagaagatcaggaagatcacagactgcttccactgccacgtgttccccttcctgcagcaggaggaggcccggctgggcgccctgcagcagctgcagcagcagagccaggagctgcaggaggtgctgggggagacagagcgcttcctgagccaggtgctgggccgggtgctgcagctgctgcccccaggccaggtgcaggtgcacaagatgaaggctgtgtacctggccctgaaccagtgcagcgtgtccaccacccacaagtgcctgattgctgaggcctggtgcagcgtgcgggacctgcctgccctgcaggaggccctgcgggacagctccatggaggagggcgtgtctgctgtggcccaccgcatcccctgccgggacatgccacccaccctcatccgcaccaaccgcttcaccgccagcttccagggcatcgtggatgcctacggcgtgggccgctaccaggaggtgaacccagccccctacaccatcatcaccttccccttcctgtttgctgtgatgtttggagatgtgggccacggcctgctgatgttcctgtttgccctggccatggtgctggccgagaacagacctgctgtgaaggccgcccagaatgagatctggcagaccttcttccggggccgctacctgctgctgctgatgggcctcttcagcatctacacaggcttcatctacaatgaatgcttcagccgggccaccagcatcttccccagcggctggagcgtggccgccatggccaaccagagcggctggagcgatgccttcctggcccagcacaccatgctgaccctggaccccaacgtgactggagtcttcctgggcccctaccccttcggcatcgaccccatctggagcctggccgccaaccacctgtccttcctgaacagcttcaagatgaagatgtctgtcatcctgggcgtggtgcacatggccttcggcgtggtgctgggcgtcttcaaccacgtgcacttcggccagaggcaccggctgctgctggagaccctgcctgagctgaccttcctgctgggcctgtttggctacctggtgttcctggtgatctacaagtggctgtgtgtgtgggccgcccgggccgccagcgcccccagcatcctgatccacttcatcaacatgttcctgttcagccacagccccagcaaccggctgctgtacccccggcaggaggtggtgcaggccaccctggtggtgctggccctggccatggtgcccatcctgctgctgggcacccccctgcacctgctgcaccgccacagaagaaggctgcggcggcggcctgctgaccggcaggaggagaacaaggccggcctgctggacctgcctgatgcctctgtgaatggctggagcagtgatgaggagaaggccggcggcctggatgatgaggaggaggccgagctggtgcccagcgaggtgctgatgcaccaggccatccacaccatcgagttctgcctgggctgtgtgagcaacacagccagctacctgcggctgtgggccctgagcctggcccacgcccagctgtctgaggtgctgtgggccatggtgatgagaattggcctgggcctgggccgggaggtgggcgtggccgctgtggtgctggtgcccatctttgctgcctttgctgtgatgacagtggccatcctgctggtgatggagggcctgagcgccttcctgcacgccctgcggctgcactgggtggagttccagaacaagttctacagcggcaccggctacaagctgagccccttcacctttgctgccacagatgactag

SEQ ID NO: 172828 - DNA, 357 bp, synthetic construct
  misc_feature 1..357: note = Description of Artificial Sequence: Synthetic coding sequence
  source 1..357: mol_type = other DNA
atggtgcccatcctgctgctgggcacccccctgcacctgctgcaccgccacagaagaaggctgcggcggcggcctgctgaccggcaggaggagaacaaggccggcctgctggacctgcctgatgcctctgtgaatggctggagcagtgatgaggagaaggccggcggcctggatgatgaggaggaggccgagctggtgcccagcgaggtgctgatgcaccaggccatccacaccatcgagttctgcctgggctgtgtgagcaacacagccagctacctgcggctgtgggccctgagcctggcccacgcccgctggaacagcaggaccagcagcacccaggcccgggccaccagctag

SEQ ID NO: 172829 - DNA, 1671 bp, synthetic construct
  misc_feature 1..1671: note = Description of Artificial Sequence: Synthetic coding sequence
  source 1..1671: mol_type = other DNA
atggagggccccctgtctgtgtttggagacaggagcactggagagaccatccgcagccagaatgtgatggctgctgccagcatcgccaacatcgtgaagagcagcctgggccctgtgggcctggacaagatgctggtggatgacattggagatgtgaccatcaccaatgatggagccaccatcctgaagctgctggaggtggagcaccctgctgccaaggtgctgtgtgagctggccgacctgcaggacaaggaggtgggagatggcaccacctctgtggtgatcatcgctgctgagctgctgaagaatgctgatgagctggtgaagcagaagatccaccccaccagcgtcatcagcggctaccgcctggcctgcaaggaggccgtgcgctacatcaatgaaaacctgattgtgaacacagatgagctgggccgggactgcctgatcaatgctgccaagacctccatgagcagcaagatcatcggcatcaacggggacttctttgccaacatggtggtggatgctgtgctggccatcaagtacacagacatccggggccagccccgctaccctgtgaacagcgtgaacatcctgaaggcccacggccgcagccagatggagagcatgctgatcagcggctacgccctgaactgtgtggtgggcagccagggcatgcccaagagaattgtgaatgccaagatcgcctgcctggacttcagcctgcagaagaccaagatgaagctgggcgtgcaggtggtgatcacagatcctgagaagctggaccagatccggcagcgggagagtgacatcaccaaggagcgcatccagaagatcctggccactggagccaacgtcatcctgaccactggaggcattgatgacatgtgcctgaagtactttgtggaggccggggccatggctgtgagaagagtgctgaagagggacctgaagagaattgccaaggccagcggggccaccatcctgagcaccctggccaacctggagggggaggagacctttgaggccgccatgctgggccaggccgaggaggtggtgcaggagcgcatctgtgatgatgagctgatcctgatcaagaacaccaaggcccggaccagcgccagcatcatcctgcggggggccaatgacttcatgtgtgatgagatggagaggagcctgcatgatgccctgtgtgtggtgaagagggtgctggagagcaagtctgtggtgcctgggggcggcgctgtggaggccgccctgagcatctacctggagaactatgccacctccatgggcagccgggagcagctggccatcgccgagtttgcccggagcctgctggtgatccccaacaccctggccgtgaatgctgcccaggacagcacagacctggtggccaagctgcgggccttccacaatgaggcccaggtgaaccctgagaggaagaacctgaagtggattggcctggacctgagcaatggcaagccccgggacaacaagcaggccggcgtgtttgagcccaccatcgtgaaggtgaagagcctgaagtttgccacagaggccgccatcaccatcctgagaattgatgacctgatcaagctgcaccctgagagcaaggatgacaagcacggcagctatgaagatgctgtgcacagcggggccctgaatgactag

SEQ ID NO: 172830 - DNA, 1206 bp, synthetic construct
  misc_feature 1..1206: note = Description of Artificial Sequence: Synthetic coding sequence
  source 1..1206: mol_type = other DNA
atgagcagcaagatcatcggcatcaatggagacttctttgccaacatggtggtggatgctgtgctggccatcaagtacacagacatccggggccagccccgctaccctgtgaacagcgtgaacatcctgaaggcccacggccgcagccagatggagagcatgctgatcagcggctacgccctgaactgtgtggtgggcagccagggcatgcccaagagaattgtgaatgccaagatcgcctgcctggacttcagcctgcagaagaccaagatgaagctgggcgtgcaggtggtgatcacagatcctgagaagctggaccagatccggcagcgggagagtgacatcaccaaggagcgcatccagaagatcctggccaccggggccaacgtcatcctgaccaccggcggcattgatgacatgtgcctgaagtactttgtggaggccggggccatggctgtgcggcgggtgctgaagagggacctgaagagaattgccaaggccagcggggccaccatcctgagcaccctggccaacctggagggggaggagacctttgaagctgccatgctgggccaggccgaggaggtggtgcaggagcgcatctgtgatgatgagctgatcctgatcaagaacaccaaggcccggaccagcgccagcatcatcctgcggggggccaatgacttcatgtgtgatgagatggagaggagcctgcatgatgccctgtgtgtggtgaagagggtgctggagagcaagtctgtggtgcctgggggcggcgctgtggaggccgccctgagcatctacctggagaactatgccacctccatgggcagccgggagcagctggccatcgccgagtttgcccggagcctgctggtgatccccaacaccctggccgtgaatgctgcccaggacagcacagacctggtggccaagctgcgggccttccacaatgaggcccaggtgaaccctgagaggaagaacctgaagtggattggcctggacctgagcaatggcaagccccgggacaacaagcaggccggcgtgtttgagcccaccatcgtgaaggtgaagagcctgaagtttgccacagaagctgccatcaccatcctgagaattgatgacctgatcaagctgcaccctgagagcaaggatgacaagcacggcagctatgaagatgctgtgcacagcggggccctgaatgactag

SEQ ID NO: 172831 - DNA, 1302 bp, synthetic construct
  misc_feature 1..1302: note = Description of Artificial Sequence: Synthetic coding sequence
  source 1..1302: mol_type = other DNA
atggagggccccctgtctgtgtttggagacaggagcactggagagaccatccgcagccagaatgtgatggctgctgccagcatcgccaacatcgtgaagagcagcctgggccctgtgggcctggacaagatgctggtggatgacattggagatgtgaccatcaccaatgatggagccaccatcctgaagctgctggaggtggagcaccctgctgccaaggtgctgtgtgagctggccgacctgcaggacaaggaggtgggagatggcaccacctctgtggtgatcatcgctgctgagctgctgaagaatgctgatgagctggtgaagcagaagatccaccccaccagcgtcatcagcggctaccgcctggcctgcaaggaggccgtgcgctacatcaatgaaaacctgattgtgaacacagatgagctgggccgggactgcctgatcaatgctgccaagacctccatgagcagcaagatcatcggcatcaacggggacttctttgccaacatggtggtggatgctgtgctggccatcaagtacacagacatccggggccagccccgctaccctgtgaacagcgtgaacatcctgaaggcccacggccgcagccagatggagagcatgctgatcagcggctacgccctgaactgtgtggtgggcagccagggcatgcccaagagaattgtgaatgccaagatcgcctgcctggacttcagcctgcagaagaccaagatgaagctgggcgtgcaggtggtgatcacagatcctgagaagctggaccagatccggcagcgggagagtgacatcaccaaggagcgcatccagaagatcctggccactggagccaacgtcatcctgaccactggaggcattgatgacatgtgcctgaagtactttgtggaggccggggccatggctgtgagaagagtgctgaagagggacctgaagagaattgccaaggccagcggggccaccatcctgagcaccctggccaacctggagggggaggagacctttgaggccgccatgctgggccaggccgaggaggtggtgcaggagcgcatctgtgatgatgagctgatcctgatcaagaacaccaaggcccggaccagcgccagcatcatcctgcggggggccaatgacttcatgtgtgatgagatggagaggagcctgcatgatgccctgtgtgtggtgaagagggtgctggagagcaagtctgtggtgcctgggggcggcgctgtggaggccgccctgagcatctacctggagaactatgccacctccatggactggagctag

SEQ ID NO: 172832 - DNA, 648 bp, synthetic construct
  misc_feature 1..648: note = Description of Artificial Sequence: Synthetic coding sequence
  source 1..648: mol_type = other DNA
atgctggccggccagctggaggcccgggaccccaaggagggcacccaccctgaggacccctgccctggggccggggctgtgatggagaagacagctgtggccgctgaggtgctgacagaggactgcaacacaggagagatgccacccctgcagcagcagatcatccggctgcaccaggagctgggccggcagaagagcctgtgggcagatgtgcacggcaagctgcggagccacattgatgccctgcgggagcagaacatggagctgcgggagaagctgcgggccctgcagctgcagcgctggaaggccaggaagaagtctgctgccagcccccatgctggccaggagagccacaccctggccctggagcccgccttcggcaagatcagccccctgtctgcagatgaggagaccatccccaagtatgccggccacaagaaccagagcgccaccctgctgggccagaggagcagcagcaacaacagcgccccacccaagcccatgagcctgaagattgaaagaatcagctcctggaagaccccaccccaggagaacagagacaagaacctgagcagaagacggcaggacagaagagccacccccaccggccggcccaccccctgtgccgagaggagaggaggagtgtag

SEQ ID NO: 172833 - DNA, 981 bp, synthetic construct
  misc_feature 1..981: note = Description of Artificial Sequence: Synthetic coding sequence
  source 1..981: mol_type = other DNA
atggagaagaccccagctgctgctgaggtgccccgggaggacagcaatgctggggagatgcccagcctgcagcagcagatcaccagcctgcaccaggagctgggccggcagcagagcctgtgggccgacatccacaggaagctgcagagccacatggatgccctgaggaagcagaaccgggagctgcgggaggagctgcggggcctgcagaggcagcagtgggaggccggcaagaagccagctgccagcccccacgccggccgggagagccacaccctggccctggagcccgccttcggcaagatcagccacctgtctgcagatgaggacaccacccccaagtatgccggcaggaagagccagagcgccaccctgctgggccagcgctggagcagcaaccacctggccccacccaagcccatgagcctgaagacagagcgcatcaacagcggcaagaccccaccccaggaggaccgggagaagagccccccaggccggcggcaggacaggagccctgcccccaccggccggcccaccccaggagctgagcggcggggcgtgtctgaagatggcaagatcatgcaccccagcagccgcagcccccagaacagcggcggcaggaagagccctgtgcaggccagccaggccaccaccctgcaggagcagacagctgctgcccggggagctgacaggagcagctctgtgctgggcagcagcgagggcggcttcctgagccgggtgcaggctgatgaatttgccagcagcgccccagattctgctgagcggcagaacctgcctgtgaacccccccagcagcctggagatcgcccaggccatggacaccaagatgaagaaggaggaggtgcaggaggagaagaggcaccccaagggcaaggcagatgactgcagaagaagtggcttccccagcgagttccctggggccctgcatgctgcccccagccggcaggacatgggcccctag

SEQ ID NO: 172834 - DNA, 1326 bp, synthetic construct
  misc_feature 1..1326: note = Description of Artificial Sequence: Synthetic coding sequence
  source 1..1326: mol_type = other DNA
atggcccccaagggcatcctgggcagcttccccacagccatgaacctgagcctggagggcaaggtgaaggagaccgtgcacaatgccttctgggaccacctgaaggagcagctgagcgccaccccaccagacttcagctgtgccctggagctgctgaaggagatcaaggagatcctgctgagcctgctgctgccccggcagaaccggctgcgcatcgagattgaggaggccctggacatggacctgctgaagcaggaggccgagcacggggccctgaaggtgctgtacctgagcaaatatgtgctgaacatgatggccctgctgtgtgcccctgtgagagatgaggccgtgcagaagctggagaacatcacagatcctgtgtggctgctgcggggcatcttccaggtgctgggccgcatgaagatggacatggtgaactacaccatccagagcctgcagccccacctgcaggagcacagcatccagtatgagcgggccaagttccaggagctgctgaacaagcagcccagcctgctgaaccacaccaccaagtggctgacccaggccgccggggacctgaccatgagcccccccacctgcccagacaccagtgacagcagctctgtggccggccccagccccaatgaagctgccaacaaccctgagcccctgagccccaccatggtgctgtgccagggcttcctgaacctgctgctgtgggacctggagaatgaggagttccctgagaccctgctgatggacaggacccggctgcaggagctgaagagccagctgcaccagctgactgtgatggcctctgtgctgctggtggccagcagcttcagcggctctgtgctgtttggcagcccccagtttgtggacaagctgaagaggatcaccaagagcctgctggaggacttccacagcaggcctgaggaggccatcctgactgtgtctgagcaggtgtcccaggagatccaccagagcctgaagaacatgggcctggtggccctgagcagtgacaacacagccagcctgatgggccagctgcagaacatcgccaagaaggagaactgtgtgtgcagcgtcatcgaccagaggatccacctgttcctgaagtgctgcctggtgctgggcgtgcagaggagcctgctggacctgcccggcggcctgaccctcatcgaggccgagctggccgagctgggccagaagtttgtgaacctgacccaccacaaccagcaggtgtttggcccctactacacagagatcctgaagaccctcatcagccctgcccaggccctggagaccaaggtggagagcgtgtag

SEQ ID NO: 172835 - DNA, 1551 bp, synthetic construct
  misc_feature 1..1551: note = Description of Artificial Sequence: Synthetic coding sequence
  source 1..1551: mol_type = other DNA
atgacccggggcggcggcggcggggacaccatcagcaagatgccagatgtgaaggagagcgtgccccccaagtacccaggggacagcgagggccgcagctgcaagccagagaccagcggccccccccaggaggacaagagcggcagcgaggaccccccacccttcctgtctgtgacaggcctgacagagaccgtgaatgaggtgtccaagctgagcaacaagattggcatgaactgtgactactacatggaggagaaggtgctgccccccagcagcctggagggcaaggtgaaggagaccgtgcacaatgccttctgggaccacctgaaggagcagctgagcgccaccccaccagacttcagctgtgccctggagctgctgaaggagatcaaggagatcctgctgagcctgctgctgccccggcagaaccggctgagaattgaaattgaggaggccctggacatggacctgctgaagcaggaggccgagcacggggccctgaaggtgctgtacctgagcaaatatgtgctgaacatgatggccctgctgtgtgcccctgtgagagatgaagctgtgcagaagctggagaacatcacagatcctgtgtggctgctgcggggcatcttccaggtgctgggccgcatgaagatggacatggtgaactacaccatccagagcctgcagccccacctgcaggagcacagcatccagtatgaaagagccaagttccaggagctgctgaacaagcagcccagcctgctgaaccacaccaccaagtggctgacccaggccgccggggacctgaccatgagcccccccacctgcccagacaccagtgacagcagctctgtggccggccccagccccaatgaggccgccaacaaccctgagcccctgagccccaccatggtgctgtgccagggcttcctgaacctgctgctgtgggacctggagaatgaggagttccctgagaccctgctgatggacaggacccggctgcaggagctgaagagccagctgcaccagctgactgtgatggcctctgtgctgctggtggccagcagcttcagcggctctgtgctgtttggcagcccccagtttgtggacaagctgaagaggatcaccaagagcctgctggaggacttccacagcaggcctgaggaggccatcctgactgtgtctgagcaggtgtcccaggagatccaccagagcctgaagaacatgggcctggtggccctgagcagtgacaacacagccagcctgatgggccagctgcagaacatcgccaagaaggagaactgtgtgtgcagcgtgattgaccagaggatccacctgttcctgaagtgctgcctggtgctgggcgtgcagaggagcctgctggacctgcccggcggcctgaccctgattgaagctgagctggccgagctgggccagaagtttgtgaacctgacccaccacaaccagcaggtgtttggcccctactacacagagatcctgaagaccctcatcagccctgcccaggccctggagaccaaggtggagagcgtgtag

SEQ ID NO: 172836 - DNA, 822 bp, synthetic construct
  misc_feature 1..822: note = Description of Artificial Sequence: Synthetic coding sequence
  source 1..822: mol_type = other DNA
ggcctgagccaccgggccaccccccagcctgctgccccaccccgctggtacgcccctggccggcaggccgcccggcccacagagaggacccctgtggatgacccccggcggggcagaagaagcctggagggcaaggtgaaggagaccgtgcacaatgccttctgggaccacctgaaggagcagctgagcgccaccccaccagacttcagctgtgccctggagctgctgaaggagatcaaggagatcctgctgagcctgctgctgccccggcagaaccggctgcgcatcgagattgaggaggccctggacatggacctgctgaagcaggaggccgagcacggggccctgaaggtgctgtacctgagcaaatatgtgctgaacatgatggccctgctgtgtgcccctgtgagagatgaggccgtgcagaagctggagaacatcacagatcctgtgtggctgctgcggggcatcttccaggtgctgggccgcatgaagatggacatggtgaactacaccatccagagcctgcagccccacctgcaggagcacagcatccagtatgagcgggccaagttccaggagctgctgaacaagcagcccagcctgctgaaccacaccaccaagtggctgacccaggccgccggggacctgaccatgagcccccccacctgcccagacaccagtgacagcagctctgtggccggccccagccccaatgaagctgccaacaaccctgagcccctgagccccaccatggtgctgtgccagggcttcctgaacctgctgctgtgggacctggagaatgaggagttccctgagtag

SEQ ID NO: 172837 - DNA, 1326 bp, synthetic construct; identical to SEQ ID NO: 172834
  misc_feature 1..1326: note = Description of Artificial Sequence: Synthetic coding sequence
  source 1..1326: mol_type = other DNA

SEQ ID NO: 172838 - DNA, 312 bp, synthetic construct
  misc_feature 1..312: note = Description of Artificial Sequence: Synthetic coding sequence
  source 1..312: mol_type = other DNA
atggcccccaagggcatcctgggcagcttccccacagccatgaacctgagcctggagggcaaggtgaaggagaccgtgcacaatgccttctgggaccacctgaaggagcagctgagcgccaccccaccagacttcagctgtgccctggagctgctgaaggagatcaaggagatcctgctgagcctgctgctgccccggcagaaccggctgcgcatcgagattgaggaggccctggacatggacctgctgaagcaggaggccgagcacggggccctgaaggtgctgtacctgagcaaatatgtgctgaactag

SEQ ID NO: 172839 - DNA, 1512 bp, synthetic construct
  misc_feature 1..1512: note = Description of Artificial Sequence: Synthetic coding sequence
  source 1..1512: mol_type = other DNA
atgccagatgtgaaggagagcgtgccccccaagtacccaggggacagcgagggccgcagctgcaagccagagaccagcggccccccccaggaggacaagagcggctctgaagatcctccacccttcctgtctgtgacaggcctgacagaaacagtgaatgaggtgtccaagctgagcaacaagattggcatgaactgtgactactacatggaggagaaggtgctgccccccagcagcctggagggcaaggtgaaggagaccgtgcacaatgccttctgggaccacctgaaggagcagctgagcgccaccccaccagacttcagctgtgccctggagctgctgaaggagatcaaggagatcctgctgagcctgctgctgccccggcagaaccggctgcgcatcgagattgaggaggccctggacatggacctgctgaagcaggaggccgagcacggggccctgaaggtgctgtacctgagcaaatatgtgctgaacatgatggccctgctgtgtgcccctgtgagagatgaggccgtgcagaagctggagaacatcacagatcctgtgtggctgctgcggggcatcttccaggtgctgggccgcatgaagatggacatggtgaactacaccatccagagcctgcagccccacctgcaggagcacagcatccagtatgagcgggccaagttccaggagctgctgaacaagcagcccagcctgctgaaccacaccaccaagtggctgacccaggccgccggggacctgaccatgagcccccccacctgcccagacaccagtgacagcagctctgtggccggccccagccccaatgaagctgccaacaaccctgagcccctgagccccaccatggtgctgtgccagggcttcctgaacctgctgctgtgggacctggagaatgaggagttccctgagaccctgctgatggacaggacccggctgcaggagctgaagagccagctgcaccagctgactgtgatggcctctgtgctgctggtggccagcagcttcagcggctctgtgctgtttggcagcccccagtttgtggacaagctgaagaggatcaccaagagcctgctggaggacttccacagcaggcctgaggaggccatcctgactgtgtctgagcaggtgtcccaggagatccaccagagcctgaagaacatgggcctggtggccctgagcagtgacaacacagccagcctgatgggccagctgcagaacatcgccaagaaggagaactgtgtgtgcagcgtcatcgaccagaggatccacctgttcctgaagtgctgcctggtgctgggcgtgcagaggagcctgctggacctgcccggcggcctgaccctcatcgaggccgagctggccgagctgggccagaagtttgtgaacctgacccaccacaaccagcaggtgtttggcccctactacacagagatcctgaagaccctcatcagccctgcccaggccctggagaccaaggtggagagcgtgtag

SEQ ID NO: 172840 - DNA, 1413 bp, synthetic construct
  misc_feature 1..1413: note = Description of Artificial Sequence: Synthetic coding sequence
  source 1..1413: mol_type = other DNA
atgacccggggcggcggcggcggcgtgctgtctgtgacaggcctgacagagaccgtgaatgaggtgtccaagctgagcaacaagattggcatgaactgtgactactacatggaggagaaggtgctgccccccagcagcctggagggcaaggtgaaggagaccgtgcacaatgccttctgggaccacctgaaggagcagctgagcgccaccccaccagacttcagctgtgccctggagctgctgaaggagatcaaggagatcctgctgagcctgctgctgccccggcagaaccggctgagaattgaaattgaggaggccctggacatggacctgctgaagcaggaggccgagcacggggccctgaaggtgctgtacctgagcaaatatgtgctgaacatgatggccctgctgtgtgcccctgtgagagatgaagctgtgcagaagctggagaacatcacagatcctgtgtggctgctgcggggcatcttccaggtgctgggccgcatgaagatggacatggtgaactacaccatccagagcctgcagccccacctgcaggagcacagcatccagtatgaaagagccaagttccaggagctgctgaacaagcagcccagcctgctgaaccacaccaccaagtggctgacccaggccgccggggacctgaccatgagcccccccacctgcccagacaccagtgacagcagctctgtggccggccccagccccaatgaggccgccaacaaccctgagcccctgagccccaccatggtgctgtgccagggcttcctgaacctgctgctgtgggacctggagaatgaggagttccctgagaccctgctgatggacaggacccggctgcaggagctgaagagccagctgcaccagctgactgtgatggcctctgtgctgctggtggccagcagcttcagcggctctgtgctgtttggcagcccccagtttgtggacaagctgaagaggatcaccaagagcctgctggaggacttccacagcaggcctgaggaggccatcctgactgtgtctgagcaggtgtcccaggagatccaccagagcctgaagaacatgggcctggtggccctgagcagtgacaacacagccagcctgatgggccagctgcagaacatcgccaagaaggagaactgtgtgtgcagcgtgattgaccagaggatccacctgttcctgaagtgctgcctggtgctgggcgtgcagaggagcctgctggacctgcccggcggcctgaccctgattgaagctgagctggccgagctgggccagaagtttgtgaacctgacccaccacaaccagcaggtgtttggcccctactacacagagatcctgaagaccctcatcagccctgcccaggccctggagaccaaggtggagagcgtgtag

SEQ ID NO: 172841 - DNA, 1398 bp, synthetic construct
  misc_feature 1..1398: note = Description of Artificial Sequence: Synthetic coding sequence
  source 1..1398: mol_type = other DNA
atgacccggggcggcggcggcggcggcctgacagaaacagtgaatgaggtgtccaagctgagcaacaagattggcatgaactgtgactactacatggaggagaaggtgctgccccccagcagcctggagggcaaggtgaaggagaccgtgcacaatgccttctgggaccacctgaaggagcagctgagcgccaccccaccagacttcagctgtgccctggagctgctgaaggagatcaaggagatcctgctgagcctgctgctgccccggcagaaccggctgcgcatcgagattgaggaggccctggacatggacctgctgaagcaggaggccgagcacggggccctgaaggtgctgtacctgagcaaatatgtgctgaacatgatggccctgctgtgtgcccctgtgagagatgaggccgtgcagaagctggagaacatcacagatcctgtgtggctgctgcggggcatcttccaggtgctgggccgcatgaagatggacatggtgaactacaccatccagagcctgcagccccacctgcaggagcacagcatccagtatgagcgggccaagttccaggagctgctgaacaagcagcccagcctgctgaaccacaccaccaagtggctgacccaggccgccggggacctgaccatgagcccccccacctgcccagacaccagtgacagcagctctgtggccggccccagccccaatgaagctgccaacaaccctgagcccctgagccccaccatggtgctgtgccagggcttcctgaacctgctgctgtgggacctggagaatgaggagttccctgagaccctgctgatggacaggacccggctgcaggagctgaagagccagctgcaccagctgactgtgatggcctctgtgctgctggtggccagcagcttcagcggctctgtgctgtttggcagcccccagtttgtggacaagctgaagaggatcaccaagagcctgctggaggacttccacagcaggcctgaggaggccatcctgactgtgtctgagcaggtgtcccaggagatccaccagagcctgaagaacatgggcctggtggccctgagcagtgacaacacagccagcctgatgggccagctgcagaacatcgccaagaaggagaactgtgtgtgcagcgtcatcgaccagaggatccacctgttcctgaagtgctgcctggtgctgggcgtgcagaggagcctgctggacctgcccggcggcctgaccctcatcgaggccgagctggccgagctgggccagaagtttgtgaacctgacccaccacaaccagcaggtgtttggcccctactacacagagatcctgaagaccctcatcagccctgcccaggccctggagaccaaggtggagagcgtgtag

SEQ ID NO: 172842 - DNA, 165 bp, synthetic construct
  misc_feature 1..165: note = Description of Artificial Sequence: Synthetic coding sequence
  source 1..165: mol_type = other DNA
atgacccggggcggcggcggcggggacaccatcagcaagatgccagatgtgaaggagagcgtgccccccaagtacccaggggacagcgagggccgcagctgcaagccagagaccagcggccccccccaggaggacaagagcggcagcgaggaccccccaccctag

SEQ ID NO: 172843 - DNA, 165 bp, synthetic construct; identical to SEQ ID NO: 172842
  misc_feature 1..165: note = Description of Artificial Sequence: Synthetic coding sequence
  source 1..165: mol_type = other DNA

SEQ ID NO: 172844 - DNA, 597 bp, synthetic construct
  misc_feature 1..597: note = Description of Artificial Sequence: Synthetic coding sequence
  source 1..597: mol_type = other DNA
atgttctttgagcggcacctggagaacctgctgaagcacttcatccctggcaccacagatcctgctgtgatcctggacctgctgcccctgtgcaggaactacgtgcggcgggtgcacgtggaccagttcctgccccctgtgcagctgcctgcccagctgcggcctggggaccagagcgacagcggcagcgagggggagatggaggagcccaccgtggaccactaccagctgggggacctggtggccggcctgagccacctggaggagctggacctggtgtatgatgtgaaggactgtggcatgaactttgagtggaacctcttcctgttcacctacagagactgcctgagcctggccgccgccatcaaggcctgccacaccctgaaggatggcggcaagcagctgctggagggcatgtctgacaacaagaccctgctggagtttgacctgcggctgagtgatgtggcccaggagagcgagtacctgattggccaggccctgtatgccaaccgggaggccgcccggcagagggccctgaaccccagccacttcatgagcaccatcacagccaatggacctgagaacagcgtgggctag

SEQ ID NO: 172845 - DNA, 597 bp, synthetic construct; identical to SEQ ID NO: 172844
  misc_feature 1..597: note = Description of Artificial Sequence: Synthetic coding sequence
  source 1..597: mol_type = other DNA

SEQ ID NO: 172846 - DNA, 1506 bp, synthetic construct
  misc_feature 1..1506: note = Description of Artificial Sequence: Synthetic coding sequence
  source 1..1506: mol_type = other DNA
atgcaggacacagtgaccaccagcgccctgctggaccccagccacagctctgtgtccacccaggacaacagcagcactggaggccacaccagcagcaccagcccccagctgagcaagcccagcatcacccctgtgcctgccaagagcaggaacccccacccccgggccaacatccggaggatgaggcgcatcatcgcagaagatcctgagtggagcctggccatcgtgcccctgctgacagagctgtgcatccagcacatcatccggaacttccagaagaaccccatcctgaagcagatgctgcctgagcaccagcagaaggtgctgaaccacctgagcccagacctgcccctggccgtgacagccaacctgattgattctgagaactactggctgcgctgctgcatgcaccgctggcctgtgtgccacgtggcccaccacggcggctcctggaagaggatgttctttgagcggcacctggagaacctgctgaagcacttcatccctggcaccacagatcctgctgtgatcctggacctgctgcccctgtgcagaaattatgtgagaagagtgcacgtggaccagttcctgccccctgtgcagctgcctgcccagctgcggcctggggaccagagcgacagcggcagcgagggggagatggaggagcccaccgtggaccactaccagctgggggacctggtggccggcctgagccacctggaggagctggacctggtgtatgatgtgaaggactgtggcatgaactttgagtggaacctcttcctgttcacctacagagactgcctgagcctggccgccgccatcaaggcctgccacaccctgaagatcttcaagctgaccaggagcaaggtggatgatgacaaggcccgcatcatcatccgcagcctgctggaccaccctgtgctggaggagctggacctgagccagaacctgattggagacagaggagcccggggagctgccaagctgctgagccacagccggctgcgggtgctgaacctggccaacaaccaggtgcgggcccctggggcccagagcctggcccacgccctggcccacaacaccaacctgatcagcctgaacctgcggctgaactgcattgaagatgagggcggccaggccctggcccacgccctgcagaccaacaagtgcctgaccaccctgcacctgggcggcaatgagctgtctgagcccacagccaccctgctgagccaggtgctggccatcaacaccaccctgaccagcatcaacctgagctgcaaccacatcggcctggatggcggcaagcagctgctggagggcatgtctgacaacaagaccctgctggagtttgacctgcggctgagtgatgtggcccaggagagcgagtacctgattggccaggccctgtatgccaaccgggaggccgcccggcagagggccctgaaccccagccacttcatgagcaccatcacagccaacggcccagaaaattctgtgggctag

SEQ ID NO: 172847 - DNA, 597 bp, synthetic construct
  misc_feature 1..597: note = Description of Artificial Sequence: Synthetic coding sequence
  source 1..597: mol_type = other DNA
atggagaagaggggccggggcgtgaagagcagccccatccagacccccaaccagaccccccagcaggcccctgtgacccccaggaaggagcggcggcccagcatgtttgagaaggaggcctacacccagatcctgcgggagcggctgcgggagagcatccacaacgtgcagtatgtggagcccccatttgatgacagcattgctgacatcggcaaggagtggaagagcgccctggccaagctgaagtttgccaacagctacaggatggagcccctgaagaagttccaggcccacagcgtggagaccaaggtgcagcagatcctgacagagagcctgaaggatgtgaagtatgatgacaaggtgttcagccacctgagcctggagctggccgaccgcatcctgctggccgtgaaggagtttggctaccaccgctacaagttcatcatcaaggtgctcttcatccagaagacaggccaggccatcaacatcgccagccgctggatctgggacatcgcctgggacagctgggtggccgccaagcatgaagctgagagctatgtggccctggtgctggtgtttgccctgtactatgaatag

SEQ ID NO: 172848 - DNA, 666 bp, synthetic construct
  misc_feature 1..666: note = Description of Artificial Sequence: Synthetic coding sequence
  source 1..666: mol_type = other DNA
atggccagccggcccctgcccccaggccggcaggaggaggagaatgccaaggacagcggcaggaagcccagccctgtgcggccccggggctgcctgcccagcattgatgaggcccggcctgctggccctggccctgccccagccagccggcggggctccatgctgggcctggccgccagcttcagcagaagaaacagcctggtgggccctggggccggccctgggggccagaggcccagcctgggccctgtgccccccctgggcagccgggtgtccttcagcggcctgcccctggccccagcccgctgggtggcccccagctacagaacagagcctgtgcctggagagcgctgggaggccgcccgggcccagagggccctggaggccgccctggccgccggcctgcatgatgcctgctacagcagtgatgaagctgcccggctggtgcgggagctgtgtgagcaggtgcacgtgcggctgcgggagctgagccccccacgctacaagctggtgtgcagcgtggtgctgggcccccgggccggccagggcgtgcacgtggtgtcccgggccctgtgggatgtggccagagatggcctggcctctgtgtcctacaccaacaccagcctgtttgctgtggccaccgtgcacggcctgtactgtgagtag

SEQ ID NO: 172849 - DNA, 666 bp, synthetic construct; identical to SEQ ID NO: 172848
  misc_feature 1..666: note = Description of Artificial Sequence: Synthetic coding sequence
  source 1..666: mol_type = other DNA

SEQ ID NO: 172850 - DNA, 1074 bp, synthetic construct
  misc_feature 1..1074: note = Description of Artificial Sequence: Synthetic coding sequence
  source 1..1074: mol_type = other DNA
atggagaggatgtctgattctgctgacaagcccatcgacaatgatgctgagggcgtgtggagcccagacatcgagcagagcttccaggaggccctggccatctacccaccctgtggccgcaggaagatcatcctgagtgatgagggcaagatgtatggaagaaatgaactcatcgcccgctacatcaagctgaggacaggcaagaccaggaccaggaagcaggtgagcagccacatccaggtgctggcccggaggaagagccgggacttccacagcaagctgaaggtgacctccatggaccagacagccaaggacaaggccctgcagcacatggccgccatgagcagcgcccagatcgtgtctgccacagccatccacaacaagctgggcctgcccggcatcccccggcccaccttccctggggcccctggcttctggccaggcatgatccagacaggccagcccggcagcagccaggatgtgaagccctttgtgcagcaggcctaccccatccagcctgctgtgacagcccccatccctggctttgagcccgccagcgccccagcccccagcgtgcctgcctggcagggccgcagcatcggcaccaccaagctgcggctggtggagttcagcgccttcctggagcagcagagggaccctgacagcgctgacctgaactgcaacatccaggatgatgctggggccttctatggagtgaccagccagtatgagagcagcgagaacatgacagtgacctgcagcaccaaggtgtgcagctttgggaagcaggtggtggagaaggtggagacagaatatgccaggtttgaaaatggccgctttgtgtaccgcatcaacagaagccccatgtgtgagtacatgatcaacttcatccacaagctgaagcacctgcctgagaagtacatgatgaacagcgtgctggagaacttcaccatcctgctggtggtgaccaacagagacacccaggagaccctgctgtgcatggcctgtgtgtttgaggtgagcaacagcgagcacggggcccagcaccacatctaccgcctggtgaaggactag

SEQ ID NO: 172851 - DNA, 1236 bp, synthetic construct
  misc_feature 1..1236: note = Description of Artificial Sequence: Synthetic coding sequence
  source 1..1236: mol_type = other DNA
atggagaggatgtctgattctgctgacaagcccatcgacaatgatgctgagggcgtgtggagcccagacatcgagcagagcttccaggaggccctggccatctacccaccctgtggccgcaggaagatcatcctgagtgatgagggcaagatgtatggaagaaatgaactcatcgcccgctacatcaagctgaggacaggcaagaccaggaccaggaagcaggtgagcagccacatccaggtgctggcccggaggaagagccgggacttccacagcaagctgaaggaccagacagccaaggacaaggccctgcagcacatggccgccatgagcagcgcccagatcgtgtctgccacagccatccacaacaagctgggcctgcccggcatcccccggcccaccttccctggggcccctggcttctggccaggcatgatccagacaggccagcccggcagcagccaggatgtgaagccctttgtgcagcaggcctaccccatccagcctgctgtgacagcccccatccctggctttgagcccgccagcgccccagcccccagcgtgcctgcctggcagggccgcagcatcggcaccaccaagctgcggctggtggagttcagcgccttcctggagcagcagagggaccctgacagctacaacaagcacctgtttgtgcacatcggccacgccaaccacagctacagcgaccccctgctggagagcgtggacatccggcagatctatgacaagtttcctgagaagaagggcggcctgaaggagctgtttgggaagggcccccagaatgccttcttcctggtgaagttctgggccgacctgaactgcaacatccaggatgatgctggggccttctatggagtgaccagccagtatgagagcagcgagaacatgacagtgacctgcagcaccaaggtgtgcagctttgggaagcaggtggtggagaaggtggagacagaatatgccaggtttgaaaatggccgctttgtgtaccgcatcaacagaagccccatgtgtgagtacatgatcaacttcatccacaagctgaagcacctgcctgagaagtacatgatgaacagcgtgctggagaacttcaccatcctgctggtggtgaccaacagagacacccaggagaccctgctgtgcatggcctgtgtgtttgaggtgagcaacagcgagcacggggcccagcaccacatctaccgcctggtgaaggactag

SEQ ID NO: 172852 - DNA, 1281 bp, synthetic construct
  misc_feature 1..1281: note = Description of Artificial Sequence: Synthetic coding sequence
  source 1..1281: mol_type = other DNA
attgagcccagctcctggagcggcagcgagagccctgctgagaacatggagaggatgtctgacagcgctgacaagcccatcgacaatgatgctgagggcgtgtggagcccagacatcgagcagagcttccaggaggccctggccatctacccaccctgtggccgcaggaagatcatcctgagtgatgagggcaagatgtatggaagaaatgagctgattgcccgctacatcaagctgaggacaggcaagaccaggaccaggaagcaggtgagcagccacatccaggtgctggcccggaggaagagccgggacttccacagcaagctgaaggaccagacagccaaggacaaggccctgcagcacatggccgccatgagcagcgcccagatcgtgtctgccacagccatccacaacaagctgggcctgcccggcatcccccggcccaccttccctggggcccctggcttctggccaggcatgatccagacaggccagcccggcagcagccaggatgtgaagccctttgtgcagcaggcctaccccatccagcctgctgtgacagcccccatccctggctttgagcccgccagcgccccagcccccagcgtgcctgcctggcagggccgcagcatcggcaccaccaagctgcggctggtggagttcagcgccttcctggagcagcagagggaccctgacagctacaacaagcacctgtttgtgcacatcggccacgccaaccacagctacagcgaccccctgctggagagcgtggacatccggcagatctatgacaagtttcctgagaagaagggcggcctgaaggagctgtttgggaagggcccccagaatgccttcttcctggtgaagttctgggccgacctgaactgcaacatccaggatgatgctggggccttctacggcgtgaccagccagtatgagagcagcgagaacatgacagtgacctgcagcaccaaggtgtgcagctttgggaagcaggtggtggagaaggtggagacagaatatgccaggtttgaaaatggccgctttgtgtaccgcatcaacagaagccccatgtgtgagtacatgatcaacttcatccacaagctgaagcacctgcctgagaagtacatgatgaacagcgtgctggagaacttcaccatcctgctggtggtgaccaacagagacacccaggagaccctgctgtgcatggcctgtgtgtttgaggtgagcaacagcgagcacggggcccagcaccacatctaccgcctggtgaaggactag

SEQ ID NO: 172853 - DNA, 993 bp, synthetic construct
  misc_feature 1..993: note = Description of Artificial Sequence: Synthetic coding sequence
  source 1..993: mol_type = other DNA
atgagatatgtgctgtcctggtgtgtgacagtgaccttcaaggaccagacagccaaggacaaggccctgcagcacatggccgccatgagcagcgcccagatcgtgtctgccacagccatccacaacaagctgggcctgcccggcatcccccggcccaccttccctggggcccctggcttctggccaggcatgatccagacaggccagcccggcagcagccaggatgtgaagccctttgtgcagcaggcctaccccatccagcctgctgtgacagcccccatccctggctttgagcccgccagcgccccagcccccagcgtgcctgcctggcagggccgcagcatcggcaccaccaagctgcggctggtggagttcagcgccttcctggagcagcagagggaccctgacagctacaacaagcacctgtttgtgcacatcggccacgccaaccacagctacagcgaccccctgctggagagcgtggacatccggcagatctatgacaagtttcctgagaagaagggcggcctgaaggagctgtttgggaagggcccccagaatgccttcttcctggtgaagttctgggccgacctgaactgcaacatccaggatgatgctggggccttctacggcgtgaccagccagtatgagagcagcgagaacatgacagtgacctgcagcaccaaggtgtgcagctttgggaagcaggtggtggagaaggtggagacagaatatgccaggtttgaaaatggccgctttgtgtaccgcatcaacagaagccccatgtgtgagtacatgatcaacttcatccacaagctgaagcacctgcctgagaagtacatgatgaacagcgtgctggagaacttcaccatcctgctggtggtgaccaacagagacacccaggagaccctgctgtgcatggcctgtgtgtttgaggtgagcaacagcgagcacggggcccagcaccacatctaccgcctggtgaaggactag

SEQ ID NO: 172854 - DNA, 207 bp, synthetic construct
  misc_feature 1..207: note = Description of Artificial Sequence: Synthetic coding sequence
  source 1..207: mol_type = other DNA
attgagcccagctcctggagcggcagcgagagccctgctgagaacatggagaggatgtctgacagcgctgacaagcccatcgacaatgatgctgagggcgtgtggagcccagacatcgagcagagcttccaggaggccctggccatctacccaccctgtggccgcaggaagatcatcctgagtgatgagggcaagatgtatggatag

SEQ ID NO: 172855 - DNA, 1281 bp, synthetic construct; identical to SEQ ID NO: 172852
  misc_feature 1..1281: note = Description of Artificial Sequence: Synthetic coding sequence
  source 1..1281: mol_type = other DNA

SEQ ID NO: 172856 - DNA, 1344 bp, synthetic construct
  misc_feature 1..1344: note = Description of Artificial Sequence: Synthetic coding sequence
  source 1..1344: mol_type = other DNA
atgggagagccccgggccggggccgccctggatgatggcagcggctggacaggcagcgaggagggcagcgaggagggcactggaggcagcgagggcgctggaggagatggcggcccagatgctgagggcgtgtggagcccagacatcgagcagagcttccaggaggccctggccatctacccaccctgtggccgcaggaagatcatcctgagtgatgagggcaagatgtatggaagaaatgagctgattgcccgctacatcaagctgaggacaggcaagaccaggaccaggaagcaggtgagcagccacatccaggtgctggcccggaggaagagccgggagatccagagcaagctgaaggaccaggtgtccaaggacaaggccttccagaccatggccaccatgagcagcgcccagctgatcagcgcccccagcctgcaggccaagctgggccccaccggcccccaggccagcgagctgttccagttctggagcggcggcagcggccccccctggaatgtgcctgatgtgaagcccttcagccagacccccttcaccctgagcctgaccccacccagcacagacctgcccggctatgagcccccccaggccctgagccccctgcccccacccacccccagccccccagcctggcaggcccggggcctgggcacagcccggctgcagctggtggagttcagcgcctttgtggagcccccagatgctgtggacagctaccagaggcacctgtttgtgcacatcagccagcactgccccagccctggggccccacccctggagagcgtggatgtgcggcagatctatgacaagtttcctgagaagaagggcggcctgcgggagctgtatgaccggggcccccctcatgccttcttcctggtgaagttctgggccgacctgaactggggccccagcggggaggaggccggggccggcggcagcatcagcagcggcggcttctatggagtgagcagccagtatgagagcctggagcacatgaccctgacctgcagcagcaaggtgtgcagctttgggaagcaggtggtggagaaggtggagacagagcgggcccagctggaggatggccgctttgtgtaccgcctgctgcggagccccatgtgtgagtacctggtgaacttcctgcacaagctgcggcagctgcctgagcgctacatgatgaacagcgtgctggagaacttcaccatcctgcaggtggtgaccaacagagacacccaggagctgctgctgtgcacagcctacgtgtttgaggtgtccaccagcgagcggggggcccagcaccacatctaccgcctggtgcgggactag

SEQ ID NO: 172857 - DNA, 1353 bp, synthetic construct
  misc_feature 1..1353: note = Description of Artificial Sequence: Synthetic coding sequence
  source 1..1353: mol_type = other DNA
atgggagagccccgggccggggccgccctggatgatggcagcggctggacaggcagcgaggagggcagcgaggagggcactggaggcagcgagggcgctggaggagatggcggcccagatgctgagggcgtgtggagcccagacatcgagcagagcttccaggaggccctggccatctacccaccctgtggccgcaggaagatcatcctgagtgatgagggcaagatgtatggaagaaatgagctgattgcccgctacatcaagctgaggacaggcaagaccaggaccaggaagcaggtgagcagccacatccaggtgctggcccggaggaagagccgggagatccagagcaagctgaaggaccaggtgtccaaggacaaggccttccagaccatggccaccatgagcagcgcccagctgatcagcgcccccagcctgcaggccaagctgggccccaccggcccccaggtggtgcaggccagcgagctgttccagttctggagcggcggcagcggccccccctggaatgtgcctgatgtgaagcccttcagccagacccccttcaccctgagcctgaccccacccagcacagacctgcccggctatgagcccccccaggccctgagccccctgcccccacccacccccagccccccagcctggcaggcccggggcctgggcacagcccggctgcagctggtggagttcagcgcctttgtggagcccccagatgctgtggacagctaccagaggcacctgtttgtgcacatcagccagcactgccccagccctggggccccacccctggagagcgtggatgtgcggcagatctatgacaagtttcctgagaagaagggcggcctgcgggagctgtatgaccggggccccccccacgccttcttcctggtgaagttctgggccgacctgaactggggccccagcggggaggaggccggggccggcggcagcatcagcagcggcggcttctacggcgtgagcagccagtatgagagcctggagcacatgaccctgacctgcagcagcaaggtgtgcagctttgggaagcaggtggtggagaaggtggagacagagcgggcccagctggaggatggccgctttgtgtaccgcctgctgcggagccccatgtgtgagtacctggtgaacttcctgcacaagctgcggcagctgcctgagcgctacatgatgaacagcgtgctggagaacttcaccatcctgcaggtggtgaccaacagagacacccaggagctgctgctgtgcacagcctacgtgtttgaggtgtccaccagcgagcggggggcccagcaccacatctaccgcctggtgcgggactag

SEQ ID NO: 172858 - DNA, 960 bp, synthetic construct
  misc_feature 1..960: note = Description of Artificial Sequence: Synthetic coding sequence
  source 1..960: mol_type = other DNA
atggccaccatgagcagcgcccagctgatcagcgcccccagcctgcaggccaagctgggccccaccggcccccaggtggtgcaggccagcgagctgttccagttctggagcggcggcagcggccccccctggaatgtgcctgatgtgaagcccttcagccagacccccttcaccctgagcctgaccccacccagcacagacctgcccggctatgagcccccccaggccctgagccccctgcccccacccacccccagccccccagcctggcaggcccggggcctgggcacagcccggctgcagctggtggagttcagcgcctttgtggagcccccagatgctgtggacagctaccagaggcacctgtttgtgcacatcagccagcactgccccagccctggggccccacccctggagagcgtggatgtgcggcagatctatgacaagtttcctgagaagaagggcggcctgcgggagctgtatgaccggggcccccctcatgccttcttcctggtgaagttctgggccgacctgaactggggccccagcggggaggaggccggggccggcggcagcatcagcagcggcggcttctatggagtgagcagccagtatgagagcctggagcacatgaccctgacctgcagcagcaaggtgtgcagctttgggaagcaggtggtggagaaggtggagacagagcgggcccagctggaggatggccgctttgtgtaccgcctgctgcggagccccatgtgtgagtacctggtgaacttcctgcacaagctgcggcagctgcctgagcgctacatgatgaacagcgtgctggagaacttcaccatcctgcaggtggtgaccaacagagacacccaggagctgctgctgtgcacagcctacgtgtttgaggtgtccaccagcgagcggggggcccagcaccacatctaccgcctggtgcgggactag

SEQ ID NO: 172859 - DNA, 1356 bp, synthetic construct
  misc_feature 1..1356: note = Description of Artificial Sequence: Synthetic coding sequence
  source 1..1356: mol_type = other DNA
atgggagagccccgggccggggccgccctggatgatggcagcggctggacaggcagcgaggagggcagcgaggagggcactggaggcagcgagggcgctggaggagatggcggcccagatgctgagggcgtgtggagcccagacatcgagcagagcttccaggaggccctggccatctacccaccctgtggccgcaggaagatcatcctgagtgatgagggcaagatgtatggaagaaatgagctgattgcccgctacatcaagctgaggacaggcaagaccaggaccaggaagcaggtgagcagccacatccaggtgctggcccggaggaagagccgggagatccagagcaagctgaaggccctgaatgtggaccaggtgtccaaggacaaggccttccagaccatggccaccatgagcagcgcccagctgatcagcgcccccagcctgcaggccaagctgggccccaccggcccccaggccagcgagctgttccagttctggagcggcggcagcggccccccctggaatgtgcctgatgtgaagcccttcagccagacccccttcaccctgagcctgaccccacccagcacagacctgcccggctatgagcccccccaggccctgagccccctgcccccacccacccccagccccccagcctggcaggcccggggcctgggcacagcccggctgcagctggtggagttcagcgcctttgtggagcccccagatgctgtggacagctaccagaggcacctgtttgtgcacatcagccagcactgccccagccctggggccccacccctggagagcgtggatgtgcggcagatctatgacaagtttcctgagaagaagggcggcctgcgggagctgtatgaccggggcccccctcatgccttcttcctggtgaagttctgggccgacctgaactggggccccagcggggaggaggccggggccggcggcagcatcagcagcggcggcttctatggagtgagcagccagtatgagagcctggagcacatgaccctgacctgcagcagcaaggtgtgcagctttgggaagcaggtggtggagaaggtggagacagagcgggcccagctggaggatggccgctttgtgtaccgcctgctgcggagccccatgtgtgagtacctggtgaacttcctgcacaagctgcggcagctgcctgagcgctacatgatgaacagcgtgctggagaacttcaccatcctgcaggtggtgaccaacagagacacccaggagctgctgctgtgcacagcctacgtgtttgaggtgtccaccagcgagcggggggcccagcaccacatctaccgcctggtgcgggactag

SEQ ID NO: 172860 - DNA, 1356 bp, synthetic construct; identical to SEQ ID NO: 172859
  misc_feature 1..1356: note = Description of Artificial Sequence: Synthetic coding sequence
  source 1..1356: mol_type = other DNA

SEQ ID NO: 172861 - DNA, 1353 bp, synthetic construct; identical to SEQ ID NO: 172857
  misc_feature 1..1353: note = Description of Artificial Sequence: Synthetic coding sequence
  source 1..1353: mol_type = other DNA

SEQ ID NO: 172862 - DNA, 1308 bp, synthetic construct
  misc_feature 1..1308: note = Description of Artificial Sequence: Synthetic coding sequence
  source 1..1308: mol_type = other DNA
attgccagcaacagctggaatgccagcagcagccctggagaggccagagaagatggccctgagggcctggacaagggcctggacaatgatgctgagggcgtgtggagcccagacatcgagcagagcttccaggaggccctggccatctacccaccctgtggccgcaggaagatcatcctgagtgatgagggcaagatgtatggaagaaatgagctgattgcccgctacatcaagctgaggacaggcaagaccaggaccaggaagcaggtgagcagccacatccaggtgctggccaggaagaaggtgcgggagtaccaggtgggcatcaaggccatgaacctggaccaggtgtccaaggacaaggccctgcagagcatggcctccatgagcagcgcccagatcgtgtctgcctctgtgctgcagaacaagttcagcccccccagccccctgccccaggccgtgttcagcaccagcagccgcttctggagcagcccccccctgctgggccagcagcccggccccagccaggacatcaagccctttgcccagcctgcctaccccatccagccccccctgccccccaccctgagcagctatgagcccctggcccccctgcccagcgctgctgcctctgtgcctgtgtggcaggacaggaccatcgccagcagccggctgcggctgctggagtacagcgccttcatggaggtgcagagggaccctgacacctacagcaagcacctgtttgtgcacatcggccagaccaacccagccttcagtgacccccccctggaggccgtggatgtgcggcagatctatgacaagtttcctgagaagaagggcggcctgaaggagctgtatgagaagggccccccaaatgccttcttcctggtgaagttctgggccgacctgaacagcaccatccaggagggccctggggccttctatggagtgagcagccagtacagcagcgctgacagcatgaccatctctgtgtccaccaaggtgtgcagctttgggaagcaggtggtggagaaggtggagacagaatatgcccggctggagaatggccgctttgtgtaccgcatccacaggagccccatgtgtgagtacatgatcaacttcatccacaagctgaagcacctgcctgagaagtacatgatgaacagcgtgctggagaacttcaccatcctgcaggtggtgaccagccgggacagccaggagaccctgctggtgattgcctttgtgtttgaggtgtccaccagcgagcacggggcccagcaccacgtgtacaagctggtgaaggactag

SEQ ID NO: 172863 - DNA, 1356 bp, synthetic construct
  misc_feature 1..1356: note = Description of Artificial Sequence: Synthetic coding sequence
  source 1..1356: mol_type = other DNA
ctgagcaggcctgtgggcagcggccctgagccccgggccaccagcaccatcgccagcaacagctggaatgccagcagcagccctggagaggccagagaagatggccctgagggcctggacaagggcctggacaatgatgctgagggcgtgtggagcccagacatcgagcagagcttccaggaggccctggccatctacccaccctgtggccgcaggaagatcatcctgagtgatgagggcaagatgtatggaagaaatgagctgattgcccgctacatcaagctgaggacaggcaagaccaggaccaggaagcaggtgagcagccacctgcaggtgctggcccggaggaagagccgggagatccagagcaagctgaagagcagcccccaggaccaggtgtccaaggacaaggccctgcagagcatggcctccatgagcagcgcccagatcgtgtctgcctctgtgctgcagaacaagttcagcccccccagccccctgccccaggccgtgttcagcaccagcagccgcttctggagcagcccccccctgctgggccagcagcccggccccagccaggacatcaagccctttgcccagcctgcctaccccatccagccccccctgccccccaccctgagcagctatgagcccctggcccccctgcccagcgctgctgcctctgtgcctgtgtggcaggacaggaccatcgccagcagccggctgcggctgctggagtacagcgccttcatggaggtgcagagggaccctgacacctacagcaagcacctgtttgtgcacatcggccagaccaacccagccttcagtgacccccccctggaggccgtggatgtgcggcagatctatgacaagtttcctgagaagaagggcggcctgaaggagctgtatgagaagggccccccaaatgccttcttcctggtgaagttctgggccgacctgaacagcaccatccaggagggccctggggccttctatggagtgagcagccagtacagcagcgctgacagcatgaccatctctgtgtccaccaaggtgtgcagctttgggaagcaggtggtggagaaggtggagacagaatatgcccggctggagaatggccgctttgtgtaccgcatccacaggagccccatgtgtgagtacatgatcaacttcatccacaagctgaagcacctgcctgagaagtacatgatgaacagcgtgctggagaacttcaccatcctgcaggtggtgaccagccgggacagccaggagaccctgctggtgattgcctttgtgtttgaggtgtccaccagcgagcacggggcccagcaccacgtgtacaagctggtgaaggactag

SEQ ID NO: 172864 - DNA, 1176 bp, synthetic construct
  misc_feature 1..1176: note = Description of Artificial Sequence: Synthetic coding sequence
  source 1..1176: mol_type = other DNA
ctggagggcacagctggcaccatcaccagcaatgagtggagcagccccaccagccctgagggcagcacagccagcggcggcagccaggccctggacaagcccatcgacaatgatgctgagggcgtgtggagcccagacatcgagcagagcttccaggaggccctggccatctacccaccctgtggccgcaggaagatcatcctgagtgatgagggcaagatgtatggaagaaatgagctgattgcccgctacatcaagctgaggacaggcaagaccaggaccaggaagcaggtgagcagccacatccaggtgctggcccggaggaaggcccgggagatccaggccaagctgaagttctggcagggcgccctgcccggccaggccggcaccagccatgatgtgaagcccttcagccagcagacctatgctgtgcagccccccctgcccctgcccggctttgagagccctgctggccctgcccccagccccagcgcccccccagccccaccctggcagggccgctctgtggccagcagcaagctgtggatgctggagttcagcgccttcctggagcagcagcaggaccctgacacctacaacaagcacctgtttgtgcacatcggccagagcagccccagctacagcgacccctacctggaggccgtggacatccggcagatctatgacaagtttcctgagaagaagggcggcctgaaggacctgtttgagcggggccccagcaatgccttcttcctggtgaagttctgggccgacctgaacaccaacattgaagatgagggcagcagcttctatggagtgagcagccagtatgagagccctgagaacatgatcatcacctgcagcaccaaggtgtgcagctttgggaagcaggtggtggagaaggtggagacagaatatgcccgctatgaaaatggccactacagctaccgcatccacaggagccccctgtgtgagtacatgatcaacttcatccacaagctgaagcacctgcctgagaagtacatgatgaacagcgtgctggagaacttcaccatcctgcaggtggtgaccaacagagacacccaggagaccctgctgtgcatcgcctacgtgtttgaggtgtctgccagcgagcacggggcccagcaccacatctaccgcctggtgaaggagtag

SEQ ID NO: 172865 - DNA, 1305 bp, synthetic construct
  misc_feature 1..1305: note = Description of Artificial Sequence: Synthetic coding sequence
  source 1..1305: mol_type = other DNA
ctggagggcacagctggcaccatcaccagcaatgagtggagcagccccaccagccctgagggcagcacagccagcggcggcagccaggccctggacaagcccatcgacaatgatgctgagggcgtgtggagcccagacatcgagcagagcttccaggaggccctggccatctacccaccctgtggccgcaggaagatcatcctgagtgatgagggcaagatgtatggaagaaatgagctgattgcccgctacatcaagctgaggacaggcaagaccaggaccaggaagcaggtgagcagccacatccaggtgctggcccggaggaaggcccgggagatccaggccaagctgaaggaccaggccgccaaggacaaggccctgcagagcatggccgccatgagcagcgcccagatcatcagcgccacagccttccacagctccatggccctggcccggggccctggccggcctgctgtgtctggcttctggcagggcgccctgcccggccaggccggcaccagccatgatgtgaagcccttcagccagcagacctatgctgtgcagccccccctgcccctgcccggctttgagagccctgctggccctgcccccagccccagcgcccccccagccccaccctggcagggccgctctgtggccagcagcaagctgtggatgctggagttcagcgccttcctggagcagcagcaggaccctgacacctacaacaagcacctgtttgtgcacatcggccagagcagccccagctacagcgacccctacctggaggccgtggacatccggcagatctatgacaagtttcctgagaagaagggcggcctgaaggacctgtttgagcggggccccagcaatgccttcttcctggtgaagttctgggccgacctgaacaccaacattgaagatgagggcagcagcttctacggcgtgagcagccagtatgagagccctgagaacatgatcatcacctgcagcaccaaggtgtgcagctttgggaagcaggtggtggagaaggtggagacagaatatgcccgctatgaaaatggccactacagctaccgcatccacaggagccccctgtgtgagtacatgatcaacttcatccacaagctgaagcacctgcctgagaagtacatgatgaacagcgtgctggagaacttcaccatcctgcaggtggtgaccaacagagacacccaggagaccctgctgtgcatcgcctacgtgtttgaggtgtctgccagcgagcacggggcccagcaccacatctaccgcctggtgaaggagtag

SEQ ID NO: 172866 - DNA, 918 bp, synthetic construct
  misc_feature 1..918: note = Description of Artificial Sequence: Synthetic coding sequence
  source 1..918: mol_type = other DNA
atggccgccatgagcagcgcccagatcatcagcgccacagccttccacagctccatggccctggcccggggccctggccggcctgctgtgtctggcttctggcagggcgccctgcccggccaggccggcaccagccatgatgtgaagcccttcagccagcagacctatgctgtgcagccccccctgcccctgcccggctttgagagccctgctggccctgcccccagccccagcgcccccccagccccaccctggcagggccgctctgtggccagcagcaagctgtggatgctggagttcagcgccttcctggagcagcagcaggaccctgacacctacaacaagcacctgtttgtgcacatcggccagagcagccccagctacagcgacccctacctggaggccgtggacatccggcagatctatgacaagtttcctgagaagaagggcggcctgaaggacctgtttgagcggggccccagcaatgccttcttcctggtgaagttctgggccgacctgaacaccaacattgaagatgagggcagcagcttctatggagtgagcagccagtatgagagccctgagaacatgatcatcacctgcagcaccaaggtgtgcagctttgggaagcaggtggtggagaaggtggagacagaatatgcccgctatgaaaatggccactacagctaccgcatccacaggagccccctgtgtgagtacatgatcaacttcatccacaagctgaagcacctgcctgagaagtacatgatgaacagcgtgctggagaacttcaccatcctgcaggtggtgaccaacagagacacccaggagaccctgctgtgcatcgcctacgtgtttgaggtgtctgccagcgagcacggggcccagcaccacatctaccgcctggtgaaggagtag

SEQ ID NO: 172867 - DNA, 219 bp, synthetic construct
  misc_feature 1..219: note = Description of Artificial Sequence: Synthetic coding sequence
  source 1..219: mol_type = other DNA
ctggagggcacagctggcaccatcaccagcaatgagtggagcagccccaccagccctgagggcagcacagccagcggcggcagccaggccctggacaagcccatcgacaatgatgctgagggcgtgtggagcccagacatcgagcagagcttccaggaggccctggccatctacccaccctgtggccgcaggaagatcatcctgagtgatgagggctag

SEQ ID NO: 172868 - DNA, 69 bp, synthetic construct
  misc_feature 1..69: note = Description of Artificial Sequence: Synthetic coding sequence
  source 1..69: mol_type = other DNA
ctggagggcacagctggcaccatcaccagcaatgagtggagcagccccaccagccctgagggcagctag

SEQ ID NO: 172869 - DNA, 528 bp, synthetic construct
  misc_feature 1..528: note = Description of Artificial Sequence: Synthetic coding sequence
  source 1..528: mol_type = other DNA
ctggagggcacagctggcaccatcaccagcaatgagtggagcagccccaccagccctgagggcagcacagccagcggcggcagccaggccctggacaagcccatcgacaatgatgctgagggcgtgtggagcccagacatcgagcagagcttccaggaggccctggccatctacccaccctgtggccgcaggaagatcatcctgagtgatgagggcaagatgtatggaagaaatgagctgattgcccgctacatcaagctgaggacaggcaagaccaggaccaggaagcaggtgagcagccacatccaggtgctggcccggaggaaggcccgggagatccaggccaagctgaaggaccaggccgccaaggacaaggccctgcagagcatggccgccatgagcagcgcccagatcatcagcgccacagccttccacagctccatggccctggcccggggccctggccggcctgctgtgtctggcttctggcagggcgccctgcccggccaggccggcaccagccactag

SEQ ID NO: 172870 - DNA, 3099 bp, synthetic construct
  misc_feature 1..3099: note = Description of Artificial Sequence: Synthetic coding sequence
  source 1..3099: mol_type = other DNA
atgtgcaatgaggagacagagatcaaggaggcccagagctaccagaacagccctgtgtcctctgccaccaaccaggatgctggctacggcagccccttcagcgagagcagtgaccagctggcccacttcaagggcagcagcagccgggaggagaaggaggacccccagtgcccagacagcgtgtcctacccccaggacagcctggcccagatcaaggctgtgtatgccaacctcttcagcgagagctgctggagcagcctggccctggacctgaagaagagcggcagcaccaccagcaccaatgatgccagccagaaggagagcagcgcccccacccccaccccacccacctgccctgtgtccaccaccggccccaccaccagcacccccagcaccagctgcagcagcagcaccagccacagcagcaccaccagcaccagcagcagcagcggctatgactggcaccaggccgccctggccaagaccctgcagcagaccagcagctatggcctgctgcctgagcccagcctcttcagcacagtgcagctgtaccggcagaacaacaagctgtatggctctgtgttcaccggggccagcaagttccgctgcaaggactgcagcgctgcctatgacaccctggtggagctgactgtgcacatgaatgaaacaggccactacagagatgacaacagagacaaggacagcgagaagaccaagcgctggagcaagcccaggaagaggagcctgatggagatggagggcaaggaggatgcccagaaggtgctgaagtgcatgtactgcggccacagctttgagagcctgcaggacctgtctgtgcacatgatcaagaccaagcactaccagaaggtgcccctgaaggagcctgtgcctgccatcaccaagctggtgcccagcaccaagaagagggccctgcaggacctggccccaccctgcagccctgagcctgctggcatggctgctgaggtggccctgtctgagagcgccaaggaccagaaggccgccaacccctacgtgacccccaacaacagatatggctaccagaatggagccagctacacctggcagtttgaggccaggaaggcccagatcctgaagtgcatggagtgtggcagcagccatgacaccctgcagcagctgacagcccacatgatggtgacaggccacttcctgaaggtgaccaccagcgccagcaagaagggcaagcagctggtgctggaccctgtggtggaggagaagatccagagcatccccctgccccccaccacccacacccggctgcctgccagcagcatcaagaagcagcctgacagccctgctggcagcaccaccagcgaggagaagaaggagcctgagaaggagaagccccctgtggccggagatgctgagaagatcaaggaggagagcgaggacagcctggagaagtttgagcccagcaccctgtacccctacctgcgggaggaggacctggatgacagccccaagggcggcctggacatcctgaagagcctggagaacacagtgtccacagccatcagcaaggcccagaatggagcccccagctggggcggctaccccagcatccacgccgcctaccagctgcccggcaccgtgaagcccctgcctgctgctgtgcagagcgtgcaggtgcagcccagctatgctgggggcgtgaagagcctgagcagcgctgagcacaatgccctgctgcacagccctggcagcctgaccccaccaccccacaagagcaatgtgtctgccatggaggagctggtggagaaggtgacaggcaaggtgaacatcaagaaggaggagaggcctcctgagaaggagaagagcagcctggccaaggccgccagccccatcgccaaggagaacaaggacttccccaagacagaggaggtgtctgggaagccccagaagaagggccctgaggccgagaccgggaaggccaagaaggagggccccctggatgtgcacaccccaaatggaacagagcccctgaaggccaaggtgaccaacggctgcaacaacctgggcatcatcatggaccacagccctgagcccagcttcatcaaccccctgagcgccctgcagagcatcatgaacacccacctgggcaaggtgtccaagcctgtgagccccagcctggaccccctggccatgctgtacaagatcagcaacagcatgctggacaagcctgtgtacccagccacccctgtgaagcaggctgatgccatcgaccgctactactatgaaaattctgaccagcccatcgacctgaccaagagcaagaacaagcccctggtgtcctctgtggccgacagcgtggccagccccctgcgggagagcgccctgatggacatcagtgacatggtgaagaacctgaccggccgcctgacccccaagagcagcacccccagcacagtgtctgagaagagtgatgctgatggcagcagctttgaggaggccctggatgagctgagccctgtgcacaagaggaagggccggcagagcaactggaacccccagcacctgctgatcctgcaggcccagtttgccagcagcctgcgggagaccacagagggcaagtacatcatgtctgacctgggcccccaggagcgggtgcacatcagcaagttcaccggcctgtccatgaccaccatcagccactggctggccaacgtgaagtaccagctgcggaggactggaggcaccaagttcctgaagaacctggacaccggccaccctgtgttcttctgcaatgactgtgccagccagttcagaacagccagcacctacatcagccacctggagacccacctgggcttcagcctgaaggacctgagcaagctgcccctgaaccagatccaggagcagcagaatgtgtccaaggtgctgaccaacaagaccctgggccccctgggcgccacagaggaggacctgggcagcaccttccagtgcaagctgtgcaacagaacatttgccagcaagcatgctgtgaagctgcacctgagcaagacccacggcaagagccctgaggaccacctgatctacgtgacagagctggagaagcagtag

SEQ ID NO: 172871 - DNA, 237 bp, synthetic construct
  misc_feature 1..237: note = Description of Artificial Sequence: Synthetic coding sequence
  source 1..237: mol_type = other DNA
atgtgcaatgaggagacagagatcaaggaggcccagagctaccagaacagccctgtgtcctctgccaccaaccaggatgctggctacggcagccccttcagcgagagcagtgaccagctggcccacttcaagggcagcagcagccgggaggagaaggaggacccccagtgcccagacagcgtgtcctacccccaggacagcctggcccagatcaaggctgtgtatgccaacctgtag

SEQ ID NO: 172872 - DNA, 321 bp, synthetic construct
  misc_feature 1..321: note = Description of Artificial Sequence: Synthetic coding sequence
  source 1..321: mol_type = other DNA
atgtgcaatgaggagacagagatcaaggaggcccagagctaccagaacagccctgtgtcctctgccaccaaccaggatgctggctacggcagccccttcagcgagagcagtgaccagctggcccacttcaagggcagcagcagccgggaggagaaggaggacccccagtgcccagacagcgtgtcctacccccaggacagcctggcccagatcaaggctgtgtatgccaacctcttcagcgagagctgctggagcagcctggccctggacctgaagaagagcggcagcaccaccagcaccaatgatgccagccagaagtag

SEQ ID NO: 172873 - DNA, 3096 bp, synthetic construct
  misc_feature 1..3096: note = Description of Artificial Sequence: Synthetic coding sequence
  source 1..3096: mol_type = other DNA
atgatggccgccgccctgctgcactacacaggctacgcccaggaggagcagctgaaggaggaggaggagatcaaggaggaggaggaggaggaggacagcggctctgtggcccagctgcagggcggcaatgacacaggaacagatgaggagctggagactggacctgagcagaagggctgcttctcctaccagaacagccctggcagccacctgagcaaccaggatgctgaaaatgaaagcctgctgagtgatgccagtgaccaggtgtctgacatcaagtctgtgtgtggcagagatgccagtgacaagaaggcccacacccacgtgcggctgcccaatgaggcccacaactgcatggacaagatgacagctgtgtatgccaacatcctgagtgacagctactggagcggcctgggcctgggcttcaagctgagcaacagcgagaggaggaactgtgacaccagaaatggcagcaacaagagtgactttgactggcaccaggatgccctgagcaagagcctgcagcagaacctgcccagccgctctgtgtccaagcccagcctcttcagctctgtgcagctgtaccggcagagcagcaagatgtgtggcaccgtcttcaccggggccagccgcttccgctgccggcagtgcagcgctgcctatgacaccctggtggagctgactgtgcacatgaatgagaccggccactaccaggatgacaacaggaagaaggacaagctgcggcccaccagctacagcaagcccaggaagagggccttccaggacatggacaaggaggatgcccagaaggtgctgaagtgcatgttctgtggggacagctttgacagcctgcaggacctgtctgtgcacatgatcaagaccaagcactaccagaaggtgcccctgaaggagcctgtgcccaccatcagcagcaagatggtgaccccagccaagaagagggtgtttgatgtgaaccggccctgcagcccagacagcaccaccggcagctttgctgacagcttcagcagccagaagaatgccaacctgcagctgagcagcaacaacagatatggctaccagaatggagccagctacacctggcagtttgaggcctgcaagagccagatcctgaagtgcatggagtgtggcagcagccatgacaccctgcagcagctgaccacccacatgatggtgacaggccacttcctgaaggtgaccagcagcgccagcaagaagggcaagcagctggtgctggaccccctggccgtggagaagatgcagagcctgtctgaggcccccaacagcgacagcctggcccccaagcccagcagcaacagcgccagtgactgcacagccagcaccacagagctgaagaaggagagcaagaaggagaggcctgaggagaccagcaaggatgagaaggtggtgaagtcagaagattatgaggaccccctgcagaagcccctggaccccaccatcaagtaccagtacctgcgggaggaggacctggaggatggcagcaagggcggcggggacatcctgaagagcctggagaacacagtgaccacagccatcaacaaggcccagaatggagcccccagctggagcgcctaccccagcatccatgctgcctaccagctgtctgagggcaccaagccacccctgcccatgggcagccaggtgctgcagatccggcccaacctgaccaacaagctgcggcccatcgcccccaagtggaaggtgatgcccctggtgtccatgcccacccacctggccccctacacccaggtgaagaaggagagcgaggacaaggatgaagctgtgaaggaatgtgggaaggagagcccccatgaggaggccagcagcttcagccacagcgagggggacagcttcaggaagtctgagaccccacctgaggccaagaagacagagctgggccccctgaaggaggaggagaagctgatgaaggagggcagcgagaaggagaagccccagcccctggagcccaccagcgccctgagcaatggctgtgccctggccaaccacgccccagccctgccctgcatcaaccccctgagcgccctgcagagcgtgctgaacaaccacctgggcaaggccacagagcccctgcggagccccagctgcagcagccccagcagcagcaccatctccatgttccacaagagcaacctgaatgtgatggacaagcctgtgctgagccctgccagcaccaggtctgcctctgtgtcccggcgctacctgtttgagaacagcgaccagcccatcgacctgaccaagagcaagagcaagaaggccgagagcagccaggcccagagctgcatgagccccccccagaagcacgccctgagtgacattgctgacatggtgaaggtgctgcccaaggccaccacccccaagccagccagcagcagccgggtgccccccatgaagctggagatggatgtgagaagatttgaagatgtgagcagcgaggtgtccaccctgcacaagaggaagggccggcagagcaactggaacccccagcacctgctgatcctgcaggcccagtttgccagcagcctcttccagaccagcgagggcaagtacctgctgagtgacctgggcccccaggagaggatgcagatcagcaagttcaccggcctgtccatgaccaccatcagccactggctggccaacgtgaagtaccagctgaggaagacaggaggcaccaagttcctgaagaacatggacaagggccaccccatcttctactgcagcgactgtgccagccagttccgcacccccagcacctacatcagccacctggagagccacctgggcttccagatgaaggacatgacccggctgtctgtggaccagcagagcaaggtggagcaggagatcagccgggtgtcctctgcccagaggagccctgagaccatcgctgctgaggaggacacagacagcaagttcaagtgcaagctgtgctgcaggacctttgtgtccaagcatgctgtgaagctgcacctgagcaagacccacagcaagagccctgagcaccacagccagtttgtgacagatgtggatgaggagtag

SEQ ID NO: 172874 - DNA, 3105 bp, synthetic construct
  misc_feature 1..3105: note = Description of Artificial Sequence: Synthetic coding sequence
  source 1..3105: mol_type = other DNA
atgcccaggaggaagcagcaggcccccaagagagctgctggctacgcccaggaggagcagctgaaggaggaggaggagatcaaggaggaggaggaggaggaggacagcggctctgtggcccagctgcagggcggcaatgacaccggcacagatgaggagctggagaccggccctgagcagaagggctgcttctcctaccagaacagccctggcagccacctgagcaaccaggatgctgaaaatgaaagcctgctgagtgatgccagtgaccaggtgtctgacatcaagtctgtgtgtggcagagatgccagtgacaagaaggcccacacccacgtgcggctgcccaatgaggcccacaactgcatggacaagatgacagctgtgtatgccaacatcctgagtgacagctactggagcggcctgggcctgggcttcaagctgagcaacagcgagaggaggaactgtgacaccagaaatggcagcaacaagagtgactttgactggcaccaggatgccctgagcaagagcctgcagcagaacctgcccagccgctctgtgtccaagcccagcctcttcagctctgtgcagctgtaccggcagagcagcaagatgtgtggcaccgtcttcaccggggccagccgcttccgctgccggcagtgcagcgctgcctatgacaccctggtggagctgactgtgcacatgaatgaaacaggccactaccaggatgacaacaggaagaaggacaagctgcggcccaccagctacagcaagcccaggaagagggccttccaggacatggacaaggaggatgcccagaaggtgctgaagtgcatgttctgtggggacagctttgacagcctgcaggacctgtctgtgcacatgatcaagaccaagcactaccagaaggtgcccctgaaggagcctgtgcccaccatcagcagcaagatggtgaccccagccaagaagagggtgtttgatgtgaaccggccctgcagcccagacagcaccaccggcagctttgctgacagcttcagcagccagaagaatgccaacctgcagctgagcagcaacaacagatatggctaccagaatggagccagctacacctggcagtttgaggcctgcaagagccagatcctgaagtgcatggagtgtggcagcagccatgacaccctgcagcagctgaccacccacatgatggtgacaggccacttcctgaaggtgaccagcagcgccagcaagaagggcaagcagctggtgctggaccccctggccgtggagaagatgcagagcctgtctgaggcccccaacagcgacagcctggcccccaagcccagcagcaacagcgccagtgactgcacagccagcaccacagagctgaagaaggagagcaagaaggagaggcctgaggagaccagcaaggatgagaaggtggtgaagtctgaggactatgaggaccccctgcagaagcccctggaccccaccatcaagtaccagtacctgcgggaggaggacctggaggatggcagcaaaggaggaggagacatcctgaagagcctggagaacacagtgaccacagccatcaacaaggcccagaatggagcccccagctggagcgcctaccccagcatccacgccgcctaccagctgtctgagggcaccaagccacccctgcccatgggcagccaggtgctgcagatccggcccaacctgaccaacaagctgcggcccatcgcccccaagtggaaggtgatgcccctggtgtccatgcccacccacctggccccctacacccaggtgaagaaggagagcgaggacaaggatgaggccgtgaaggaatgtgggaaggagagcccccatgaggaggccagcagcttcagccacagcgagggggacagcttcaggaagtctgagaccccacctgaggccaagaagacagagctgggccccctgaaggaggaggagaagctgatgaaggagggcagcgagaaggagaagccccagcccctggagcccaccagcgccctgagcaatggctgtgccctggccaaccacgccccagccctgccctgcatcaaccccctgagcgccctgcagagcgtgctgaacaaccacctgggcaaggccacagagcccctgcggagccccagctgcagcagccccagcagcagcaccatctccatgttccacaagagcaacctgaatgtgatggacaagcctgtgctgagccctgccagcaccaggtctgcctctgtgagccgccgctacctgtttgaaaattctgaccagcccatcgacctgaccaagagcaagagcaagaaggccgagagcagccaggcccagagctgcatgagccccccccagaagcacgccctgagtgacattgctgacatggtgaaggtgctgcccaaggccaccacccccaagccagccagcagcagccgggtgccccccatgaagctggagatggatgtgagaagatttgaagatgtgtcctctgaggtgtccaccctgcacaagaggaagggccggcagagcaactggaacccccagcacctgctgatcctgcaggcccagtttgccagcagcctcttccagaccagcgagggcaagtacctgctgagtgacctgggcccccaggagaggatgcagatcagcaagttcaccggcctgtccatgaccaccatcagccactggctggccaacgtgaagtaccagctgaggaagacaggaggcaccaagttcctgaagaacatggacaagggccaccccatcttctactgcagcgactgtgccagccagttccgcacccccagcacctacatcagccacctggagagccacctgggcttccagatgaaggacatgacccggctgtctgtggaccagcagagcaaggtggagcaggagatcagccgggtgagcagcgcccagaggagccctgagaccatcgctgctgaggaggacacagacagcaagttcaagtgcaagctgtgctgcaggacctttgtgtccaagcatgctgtgaagctgcacctgagcaagacccacagcaagagccctgagcaccacagccagtttgtgacagatgtggatgaggagtag

SEQ ID NO: 172875 - DNA, 3246 bp, synthetic construct
  misc_feature 1..3246: note = Description of Artificial Sequence: Synthetic coding sequence
  source 1..3246: mol_type = other DNA
atgcccaggaggaagcagcaggccccccggcgggctgctgcctacgtgtctgaggagctgaaggctgctgccctggtggatgagggcctggaccctgaggagcacacagcagatggagagcccagcgccaagtacatgtgcccagagaaggagctggcccgggcctgccccagctaccagaacagccctgctgctgagttcagctgccacgagatggacagcgagagccacatcagcgagaccagtgacaggatggctgactttgagagcggcagcatcaagaatgaggaggagaccaaggaggtgacagtgcccctggaggacaccaccgtgtctgacagcctggagcagatgaaggctgtgtacaacaacttcctgagcaacagctactggagcaacctgaacctgaacctgcaccagcccagcagcgagaagaacaacggcagcagcagcagcagcagcagcagcagcagcagctgtggcagcggcagctttgactggcaccagagcgccatggccaagaccctgcagcaggtgtcccagagcaggatgctgcctgagcccagcctcttcagcacagtgcagctgtaccggcagagcagcaagctgtatggcagcatcttcaccggggccagcaagttccgctgcaaggactgcagcgctgcctatgacaccctggtggagctgactgtgcacatgaatgagaccggccactacagagatgacaaccacgagacagacaacaacaaccccaagcgctggagcaagcccaggaagaggagcctgctggagatggagggcaaggaggatgcccagaaggtgctgaagtgcatgtactgcggccacagctttgagagcctgcaggacctgtctgtgcacatgatcaagaccaagcactaccagaaggtgcccctgaaggagcctgtgacccctgtggccgccaagatcatcccagccaccaggaagaaggccagcctggagctggagctgcccagcagcccagacagcactggaggcacccccaaggccaccatcagtgacaccaatgatgccctgcagaagaacagcaacccctacatcacccccaacaacagatatggccaccagaatggagccagctatgcctggcactttgaggccaggaagagccagatcctgaagtgcatggagtgtggcagcagccatgacaccctgcaggagctgacagcccacatgatggtgacaggccacttcatcaaggtgaccaacagcgccatgaagaagggcaagcccatcgtggagacccctgtgacccccaccatcaccaccctgctggatgagaaggtgcagagcgtgcccctggccgccaccaccttcaccagccccagcaacaccccagccagcatcagccccaagctgaatgtggaggtgaagaaggaggtggacaaggagaaggctgtgacagatgagaagcccaagcagaaggacaagccaggagaggaggaggagaagtgtgacatcagcagcaagtaccactacctgacagaaaatgacctggaggagagccccaagggcggcctggacatcctgaagagcctggagaacacagtgaccagcgccatcaacaaggcccagaatggcacccccagctggggcggctaccccagcatccacgccgcctaccagctgcccaacatgatgaagctgagcctgggcagcagcggcaagagcacccccctgaagcccatgtttggaaacagcgagatcgtgagccccaccaagaaccagaccctggtgagcccccccagcagccagaccagccccatgcccaagaccaacttccacgccatggaggagctggtgaagaaggtgacagagaaggtggccaaggtggaggagaagatgaaggagccagatggcaagctgagcccccccaagagggccacccccagcccctgcagcagcgaggtgggggagcccatcaagatggaggccagcagtgatggcggcttccgcagccaggagaacagccccagccccccaagagatggctgcaaggatggcagccccctggccgagcctgtggagaatggcaaggagctggtgaagcccctggccagcagcctgagcggcagcacagccatcatcacagaccaccccccagagcagccctttgtgaaccccctgagcgccctgcagagcgtgatgaacatccacctgggcaaggccgccaagcccagcctgcctgccctggaccccatgtccatgctgttcaagatgagcaacagcctggccgagaaggctgctgtggccaccccaccacccctgcagagcaagaaggctgaccacctggaccgctacttctaccacgtgaacaatgaccagcccatcgacctgaccaagggcaagagtgacaagggctgcagcctgggctctgtgctgctgagccccaccagcacagccccagccaccagcagcagcacagtgaccacagccaagaccagcgctgtggtgtccttcatgagcaacagccccctgagagaaaatgccctgagtgacatcagtgacatgctgaagaacctgacagagagccacaccagcaagagcagcacccccagcagcatcagcgagaagagtgacattgatggagccaccctggaggaggccgaggagagcaccccagcccagaagaggaagggccggcagagcaactggaacccccagcacctgctgatcctgcaggcccagtttgctgccagcctgcggcagaccagcgagggcaagtacatcatgtctgacctgagcccccaggagaggatgcacatcagccgcttcaccggcctgtccatgaccaccatcagccactggctggccaacgtgaagtaccagctgcggaggactggaggcaccaagttcctgaagaacctggacaccggccaccctgtgttcttctgcaatgactgtgccagccagatccgcacccccagcacctacatcagccacctggagagccacctgggcttccggctgcgggacctgagcaagctgagcacagagcagatcaacagccagatcgcccagaccaagagccccagcgagaagatggtgaccagcagccctgaggaggacctgggcaccagctaccagtgcaagctgtgcaacagaacatttgccagcaagcatgctgtgaagctgcacctgagcaagacccacggcaagagccctgaggaccacctgctgtatgtgtctgagctggagaagcagtag

SEQ ID NO: 172876 - DNA, 1896 bp, synthetic construct
  misc_feature 1..1896: note = Description of Artificial Sequence: Synthetic coding sequence
  source 1..1896: mol_type = other DNA
atgaacttcaacaccatcctggaggagatcctgatcaagaggagccagcagaagaagaagaccagccccctgaactacaaggagcggctgtttgtgctgaccaagtccatgctgacctactatgagggccgggcagagaagaagtacaggaagggcttcattgatgtgtccaagatcaagtgtgtggagatcgtgaagaatgatgatggagtcatcccctgccagaacaagtaccccttccaggtggtgcatgatgccaacaccctgtacatctttgcccccagcccccagagccgggacctgtgggtgaagaagctgaaggaggagatcaagaacaacaacaacatcatgatcaagtaccaccccaagttctggacagatggcagctaccagtgctgccggcagacagagaagctggcccctggctgtgagaagtacaacctgtttgagagcagcatcaggaaggccctgcccccagcccctgagaccaagaagaggcggcccccaccacccatccccctggaggaggaggacaacagcgaggagatcgtggtggccatgtatgacttccaggccgctgagggccatgacctgcggctggagcggggccaggagtacctgatcctggagaagaatgatgtgcactggtggagggcccgggacaagtatggaaatgaaggctacatccccagcaactacgtgacaggcaagaagagcaacaacctggaccagtatgagtggtactgcaggaacatgaacagaagcaaggccgagcagctgctgcggtctgaggacaaggagggcggcttcatggtgcgggacagcagccagcccggcctgtacacagtgtccctgtacaccaagtttggaggagagggcagcagcggcttccgccactaccacatcaaggagaccaccaccagccccaagaagtactacctggccgagaagcacgccttcggcagcatccctgagatcatcgagtaccacaagcacaatgctgctggcctggtgacccggctgcgctaccctgtgtctgtgaagggcaagaatgcccccaccacagctggcttctcctatgagaagtgggagatcaaccccagcgagctgaccttcatgagggagctgggcagcggcctgtttggagtggtgcggctgggcaagtggagggcccagtacaaggtggccatcaaggccatccgggagggcgccatgtgtgaggaggacttcatcgaggaggccaaggtgatgatgaagctgacccaccccaagctggtgcagctgtatggagtgtgcacccagcagaagcccatctacatcgtgacagagttcatggagcggggctgcctgctgaacttcctgcggcagaggcagggccacttcagcagagatgtgctgctgtccatgtgccaggatgtgtgtgagggcatggagtacctggagaggaacagcttcatccaccgggacctggccgccaggaactgcctggtgtctgaggccggcgtggtgaaggtgtctgactttggcatggcccgctacgtgctggatgaccagtacaccagcagcagcggggccaagtttcctgtgaagtggtgccccccagaggtgttcaactacagccgcttcagcagcaagagtgatgtgtggagctttggagtgctgatgtgggaggtgttcacagagggccgcatgccctttgagaagtacaccaactatgaggtggtgaccatggtgacccggggccaccggctgtaccagcccaagctggccagcaactacgtgtatgaggtgatgctgcgctgctggcaggagaagccagagggccggcccagctttgaggacctgctgcggaccattgatgagctggtggagtgtgaggagacctttggaagatag

SEQ ID NO: 172877 - DNA, 2094 bp, synthetic construct
  misc_feature 1..2094: note = Description of Artificial Sequence: Synthetic coding sequence
  source 1..2094: mol_type = other DNA
atgggcttccagcccccagctgccctgctgctgcggctcttcctgctgcagggcatcctgcggctgctgtggggagacctggccttcatcccccccttcatccgcatgagcggccctgctgtgtctgccagcctggtgggggacacagaaggagtgacagtgtccctggccgtgctgcaggatgaagctggcatcctgcccatccccacctgtggggtgctgaacaatgaaacagaggactggagcgtgaccgtcatccctggggccaaggtgctggaggtgacagtgcgctggaagaggggcctggactggtgcagcagcaatgaaacagacagcttcagcgagagcccctgcatcctgcagaccctgctggtgtctgccagccacaacagcagctgcagcgcccacctgctgatccaggtggagatctatgccaacagcagcctgacccacaatgcctctgaaaatgtgaccgtcatccccaaccaggtgtaccagcccctgggcccctgcccctgcaacctgacagctggggcctgtgatgtgcgctgctgctgtgaccaggagtgcagcagcaacctgaccaccctcttcagaagaagctgcttcaccggggtgtttggaggagatgtgaaccccccatttgaccagctgtgcagcgctggcaccaccacccggggcgtgcctgactggttccccttcctgtgtgtgcagagccccctggccaacacccccttcctgggctacttctaccacggggctgtgagccccaagcaggacagcagctttgaggtgtatgtggacacagatgccaaggactttgctgactttggctacaagcagggcgaccccatcatgacagtgaagaaggcctacttcaccatcccccaggtgtccctggccggccagtgcatgcagaatgcccctgtggccttcctgcacaactttgatgtgaagtgtgtgaccaacctggagctgtaccaggagagagatggcatcatcaatgccaagatcaagaatgtggccctgggcggcatcgtgacccccaaggtgatctatgaggaggccacagacctggacaagttcatcaccaacacagagacccccctgaacaacggcagcaccccccgcatcgtgaatgtggaggagcactacatcttcaagtggaacaacaacaccatcagcgagatcaacgtgaagatcttccgggcagagatcaatgcccaccagaagggcatcatgacccagagatttgtggtgaagttcctgagctacaacagcggaaatgaggaggagctgagcggcaaccctggctaccagctgggcaagcctgtgcgggccctgaacatcaacaggatgaacaacgtgaccaccctgcacctgtggcagagcgctggccggggcctgtgcaccagcgccaccttcaagcccatcctgtttggagaaaatgtgctgagcggctgcctgctggaggtgggcatcaatgaaaactgcacccagctgagagaaaatgctgtggagcggctggacagcctcatccaggccacccacgtggccatgaggggcaacagcgactatgctgacctgagtgatggctggctggagatcatccgggtggatgccccagaccccggggctgaccccctggccagctctgtgaatggcatgtgcctggacatcccagcccacctgagcatccgcatcctgatcagtgatgctggagctgtggagggcatcacccagcaggagatcctgggcgtggagacccgcttcagctctgtgaactggcagtaccagtgtggcctgacctgtgagcacaaggctgacctgctgcccatcagcgcctctgtgcagttcatcaagatcccagcccagctgccccaccccctgacccgcttccagatcaactacacagaatatgactgcaacagaaatgaggtgtgctggccccagctgctgtacccctggacccagtactaccagggcgagctgcacagccagtgtgtggccaagggcctgctgctgctgctcttcctgaccctggccctcttcctgagcaacccctggacccgcatctgcaaggcctacagctag

SEQ ID NO: 172878 - DNA, 2091 bp, synthetic construct
  misc_feature 1..2091: note = Description of Artificial Sequence: Synthetic coding sequence
  source 1..2091: mol_type = other DNA
atgggcttccagcccccagctgccctgctgctgcggctcttcctgctgcagggcatcctgcggctgctgtggggagacctggccttcatcccccccttcatccgcatgagcggccctgctgtgtctgccagcctggtgggggacacagaaggagtgacagtgtccctggccgtgctgcaggatgaagctggcatcctgcccatccccacctgtggggtgctgaacaatgaaacagaggactggagcgtgaccgtcatccctggagctgtgctggaggtgacagtgcgctggaagaggggcctggactggtgcagcagcaatgaaacagacagcttcagcgagagcccctgcatcctgcagaccctgctggtgtctgccagccacaacagcagctgcagcgcccacctgctgatccaggtggagatctatgccaacagcagcctgacccacaatgcctctgaaaatgtgaccgtcatccccaaccaggtgtaccagcccctgggcccctgcccctgcaacctgacagctggggcctgtgatgtgcgctgctgctgtgaccaggagtgcagcagcaacctgaccaccctcttccgccgcagctgcttcaccggggtgtttggaggagatgtgaaccccccatttgaccagctgtgcagcgctggcaccaccacccggggcgtgcctgactggttccccttcctgtgtgtgcagagccccctggccaacacccccttcctgggctacttctaccatggagctgtgagccccaagcaggacagcagctttgaggtgtatgtggacacagatgccaaggactttgctgactttggctacaagcagggcgaccccatcatgacagtgaagaaggcctacttcaccatcccccaggtgtccctggccggccagtgcatgcagaatgcccctgtggccttcctgcacaactttgatgtgaagtgtgtgaccaacctggagctgtaccaggagagagatggcatcatcaatgccaagatcaagaatgtggccctgggcggcatcgtgacccccaaggtgatctatgaggaggccacagacctggacaagttcatcaccaacacagagacccccctgaacaacggcagcaccccaagaattgtgaatgtggaggagcactacatcttcaagtggaacaacaacaccatcagcgagatcaacgtgaagatcttccgggcagagatcaatgcccaccagaagggcatcatgacccagagatttgtggtgaagttcctgagctacaacagcggaaatgaggaggagctgagcggcaaccctggctaccagctgggcaagcctgtgcgggccctgaacatcaacaggatgaacaacgtgaccaccctgcacctgtggcagagcgctggccggggcctgtgcaccagcgccaccttcaagcccatcctgtttggagaaaatgtgctgagcggctgcctgctggaggtgggcatcaatgaaaactgcacccagctgcgggagaatgctgtggagcggctggacagcctcatccaggccacccacgtggccatgaggggcaacagcgactatgctgacctgagtgatggctggctggagatcatccgggtggatgccccagaccctggagctgaccccctggccagctctgtgaatggcatgtgcctggacatcccagcccacctgagcatccgcatcctgatcagtgatgctggagctgtggagggcatcacccagcaggagatcctgggcgtggagacccgcttcagctctgtgaactggcagtaccagtgtggcctgacctgtgagcacaaggctgacctgctgcccatcagcgcctctgtgcagttcatcaagatcccagcccagctgccccaccccctgacccgcttccagatcaactacacagaatatgactgcaacagaaatgaggtgtgctggccccagctgctgtacccctggacccagtactaccagggcgagctgcacagccagtgtgtggccaagggcctgctgctgctgctcttcctgaccctggccctcttcctgagcaacccctggacccgcatctgcaaggcctacagctag

SEQ ID NO: 172879 - DNA, 1824 bp, synthetic construct
  misc_feature 1..1824: note = Description of Artificial Sequence: Synthetic coding sequence
  source 1..1824: mol_type = other DNA
atgaggaccccccagctggccctgctgcaggtgttcttcctggtgtttcctgatggagtgcggccccagcccagcagcagccccagcggggctgtgcccaccagcctggagctgcagaggggcacagatggcggcaccctgcagagccccagcgaggccacagccaccaggcctgctgtgcccggcctgcccaccgtggtgcccaccctggtgacccccagcgcccctggcaacagaacagtggacctcttccctgtgctgcccatctgtgtgtgtgacctgacccctggggcctgtgacatcaactgctgctgtgaccgggactgctacctgctgcaccccaggacagtgttctccttctgcctgcccggctctgtgcgcagcagctcctgggtgtgtgtggacaacagcgtcatcttccgcagcaacagccccttccccagcagggtcttcatggacagcaatggcatccggcagttctgtgtgcacgtgaacaacagcaacctgaactacttccagaagctgcagaaggtgaatgccaccaacttccaggccctggccgctgagtttggaggagagagcttcaccagcaccttccagacccagagcccccccagcttctaccgggccggggaccccatcctgacctacttccccaagtggagcgtcatcagcctgctgcggcagcctgctggggtgggcgccggcggcctgtgtgccgagagcaacccagctggcttcctggagagcaagagcaccacctgcacccgcttcttcaagaacctggccagcagctgcaccctggacagcgccctgaatgctgccagctactacaacttcaccgtgctgaaggtgcccaggtccatgacagacccccagaacatggagttccaggtgcctgtgatcctgaccagccaggccaatgcccccctgctggccggcaacacctgccagaatgtggtgtcccaggtgacctatgaaattgagaccaacggcaccttcggcatccagaaggtgtctgtgtccctgggccagaccaacctgactgtggagcccggggccagcctgcagcagcacttcatcctgcgcttccgggccttccagcagagcacagctgccagcctgaccagccccaggagcggcaaccctggctacatcgtgggcaagcccctgctggccctgacagatgacatctcctacagcatgaccctgctgcagagccagggcaatggcagctgcagcgtgaagagacatgaggtgcagtttggagtgaatgccatcagcggctgcaagctgcggctgaagaaggctgactgcagccacctgcagcaggagatctaccagaccctgcacggccggcccaggccagaatatgtggccatctttggaaatgctgaccctgcccagaagggcggctggacccgcatcctgaacagacactgcagcatcagcgccatcaactgcaccagctgctgcctgatccctgtgtccctggagatccaggtgctgtgggcctacgtgggcctgctgagcaacccccaggcccacgtgtctggagtgcgcttcctgtaccagtgccagagcatccaggacagccagcaggtgacagaggtgtccctgaccaccctggtgaactttgtggacatcacccagaagccccagcccccccggggccagcccaagatggactggaagtggccctttgacttcttccccttcaaggtggccttcagccggggcgtcttcagccagaagtgcagcgtgagccccatcctgatcctgtgcctgctgctgctgggcgtgctgaacctggagaccatgtag

SEQ ID NO: 172880 - DNA, 1290 bp, synthetic construct
  misc_feature 1..1290: note = Description of Artificial Sequence: Synthetic coding sequence
  source 1..1290: mol_type = other DNA
atggacagcaatggcatccggcagttctgtgtgcacgtgaacaacagcaacctgaactacttccagaagctgcagaaggtgaatgccaccaacttccaggccctggccgctgagtttggaggagagagcttcaccagcaccttccagacccagagccccccatccttctacagagctggggaccccatcctgacctacttccccaagtggagcgtcatcagcctgctgcggcagcctgctggggtgggcgctgggggcctgtgtgccgagagcaacccagctggcttcctggagagcaagagcaccacctgcacccgcttcttcaagaacctggccagcagctgcaccctggacagcgccctgaatgctgccagctactacaacttcaccgtgctgaaggtgcccaggtccatgacagacccccagaacatggaggtgacctatgaaattgagaccaacggcaccttcggcatccagaaggtgtctgtgtccctgggccagaccaacctgactgtggagcccggggccagcctgcagcagcacttcatcctgcgcttccgggccttccagcagagcacagctgccagcctgaccagccccaggagcggcaaccctggctacatcgtgggcaagcccctgctggccctgacagatgacatctcctacagcatgaccctgctgcagagccagggcaatggcagctgcagcgtgaagagacatgaggtgcagtttggagtgaatgccatcagcggctgcaagctgcggctgaagaaggctgactgcagccacctgcagcaggagatctaccagaccctgcacggccggcccaggccagaatatgtggccatctttggaaatgctgaccctgcccagaagggcggctggacccgcatcctgaacagacactgcagcatcagcgccatcaactgcaccagctgctgcctgatccctgtgtccctggagatccaggtgctgtgggcctacgtgggcctgctgagcaacccccaggcccacgtgtctggagtgcgcttcctgtaccagtgccagagcatccaggacagccagcaggtgacagaggtgtccctgaccaccctggtgaactttgtggacatcacccagaagccccagcccccccggggccagcccaagatggactggaagtggccctttgacttcttccccttcaaggtggccttcagccggggcgtcttcagccagaagtgcagcgtgagccccatcctgatcctgtgcctgctgctgctgggcgtgctgaacctggagaccatgtag

SEQ ID NO: 172881 - DNA, 1332 bp, synthetic construct
  misc_feature 1..1332: note = Description of Artificial Sequence: Synthetic coding sequence
  source 1..1332: mol_type = other DNA
atgaggaccccccagctggccctgctgcaggtgttcttcctggtgtttcctgatggagtgcggccccagcccagcagcagccccagcggggctgtgcccaccagcctggagctgcagaggggcacagatggcggcaccctgcagagccccagcgaggccacagccaccaggcctgctgtgcccggcctgcccaccgtggtgcccaccctggtgacccccagcgcccctggcaacagaacagtggacctcttccctgtgctgcccatctgtgtgtgtgacctgacccctggggcctgtgacatcaactgctgctgtgaccgggactgctacctgctgcaccccaggacagtgttctccttctgcctgcccggctctgtgcgcagcagctcctgggtgtgtgtggacaacagcgtcatcttccgcagcaacagccccttccccagcagggtcttcatggacagcaatggcatccggcagttctgtgtgcacgtgaacaacagcaacctgaactacttccagaagctgcagaaggtgaatgccaccaacttccaggccctggccgctgagtttggaggagagagcttcaccagcaccttccagacccagagcccccccagcttctaccgggccggggaccccatcctgacctacttccccaagtggagcgtcatcagcctgctgcggcagcctgctggggtgggcgccggcggcctgtgtgccgagagcaacccagctggcttcctggagagcaagagcaccacctgcacccgcttcttcaagaacctggccagcagctgcaccctggacagcgccctgaatgctgccagctactacaacttcaccgtgctgaaggtgcccaggtccatgacagacccccagaacatggagttccaggtgcctgtgatcctgaccagccaggccaatgcccccctgctggccggcaacacctgccagaatgtggtgtcccaggtgacctatgaaattgagaccaacggcaccttcggcatccagaaggtgtctgtgtccctgggccagaccaacctgactgtggagcccggggccagcctgcagcagcacttcatcctgcgcttccgggccttccagcagagcacagctgccagcctgaccagccccaggagcggcaaccctggctacatcgtgggcaagcccctgctggccctgacagatgacatctcctacagcgtgtccttcctggagctgggcggcctgctgcagcccaatgagaagagctgcaagggcttccagacctacgtgcggctggccaagggggaggagttctttgtgcactacaatgaggtgctgatctactag

SEQ ID NO: 172882 - DNA, 1878 bp, synthetic construct
  misc_feature 1..1878: note = Description of Artificial Sequence: Synthetic coding sequence
  source 1..1878: mol_type = other DNA
atgaggctggagacagctgaggcctacgtgggccctgggggccctgagtgccccatgaggaccccccagctggccctgctgcaggtgttcttcctggtgtttcctgatggagtgcggccccagcccagcagcagccccagcggggctgtgcccaccagcctggagctgcagaggggcacagatggcggcaccctgcagagccccagcgaggccacagccaccaggcctgctgtgcccggcctgcccaccgtggtgcccaccctggtgacccccagcgcccctggcaacagaacagtggacctcttccctgtgctgcccatctgtgtgtgtgacctgacccctggggcctgtgacatcaactgctgctgtgaccgggactgctacctgctgcaccccaggacagtgttctccttctgcctgcccggctctgtgcgcagcagctcctgggtgtgtgtggacaacagcgtcatcttccgcagcaacagccccttccccagcagggtcttcatggacagcaatggcatccggcagttctgtgtgcacgtgaacaacagcaacctgaactacttccagaagctgcagaaggtgaatgccaccaacttccaggccctggccgctgagtttggaggagagagcttcaccagcaccttccagacccagagcccccccagcttctaccgggccggggaccccatcctgacctacttccccaagtggagcgtcatcagcctgctgcggcagcctgctggggtgggcgccggcggcctgtgtgccgagagcaacccagctggcttcctggagagcaagagcaccacctgcacccgcttcttcaagaacctggccagcagctgcaccctggacagcgccctgaatgctgccagctactacaacttcaccgtgctgaaggtgcccaggtccatgacagacccccagaacatggagttccaggtgcctgtgatcctgaccagccaggccaatgcccccctgctggccggcaacacctgccagaatgtggtgtcccaggtgacctatgaaattgagaccaacggcaccttcggcatccagaaggtgtctgtgtccctgggccagaccaacctgactgtggagcccggggccagcctgcagcagcacttcatcctgcgcttccgggccttccagcagagcacagctgccagcctgaccagccccaggagcggcaaccctggctacatcgtgggcaagcccctgctggccctgacagatgacatctcctacagcatgaccctgctgcagagccagggcaatggcagctgcagcgtgaagagacatgaggtgcagtttggagtgaatgccatcagcggctgcaagctgcggctgaagaaggctgactgcagccacctgcagcaggagatctaccagaccctgcacggccggcccaggccagaatatgtggccatctttggaaatgctgaccctgcccagaagggcggctggacccgcatcctgaacagacactgcagcatcagcgccatcaactgcaccagctgctgcctgatccctgtgtccctggagatccaggtgctgtgggcctacgtgggcctgctgagcaacccccaggcccacgtgtctggagtgcgcttcctgtaccagtgccagagcatccaggacagccagcaggtgacagaggtgtccctgaccaccctggtgaactttgtggacatcacccagaagccccagcccccccggggccagcccaagatggactggaagtggccctttgacttcttccccttcaaggtggccttcagccggggcgtcttcagccagaagtgcagcgtgagccccatcctgatcctgtgcctgctgctgctgggcgtgctgaacctggagaccatgtag

SEQ ID NO: 172883 - DNA, 1380 bp, synthetic construct
  misc_feature 1..1380: note = Description of Artificial Sequence: Synthetic coding sequence
  source 1..1380: mol_type = other DNA
atgaggaccccccagctggccctgctgcaggtgttcttcctggtgtttcctgatggagtgcggccccagcccagcagcagccccagcggggctgtgcccaccagcctggagctgcagaggggcacagatggcggcaccctgcagagccccagcgaggccacagccaccaggcctgctgtgcccggcctgcccaccgtggtgcccaccctggtgacccccagcgcccctggcaacagaacagtggacctcttccctgtgctgcccatctgtgtgtgtgacctgacccctggggcctgtgacatcaactgctgctgtgaccgggactgctacctgctgcaccccaggacagtgttctccttctgcctgcccggctctgtgcgcagcagctcctgggtgtgtgtggacaacagcgtcatcttccgcagcaacagccccttccccagcagggtcttcatggacagcaatggcatccggcagttctgtgtgcacgtgaacaactgcttcctggagagcaagagcaccacctgcacccgcttcttcaagaacctggccagcagctgcaccctggacagcgccctgaatgctgccagctactacaacttcaccgtgctgaaggtgcccaggtccatgacagacccccagaacatggaggccttccagcagagcacagctgccagcctgaccagccccaggagcggcaaccctggctacatcgtgggcaagcccctgctggccctgacagatgacatctcctacagcatgaccctgctgcagagccagggcaatggcagctgcagcgtgaagagacatgaggtgcagtttggagtgaatgccatcagcggctgcaagctgcggctgaagaaggctgactgcagccacctgcagcaggagatctaccagaccctgcacggccggcccaggccagaatatgtggccatctttggaaatgctgaccctgcccagaagggcggctggacccgcatcctgaacagacactgcagcatcagcgccatcaactgcaccagctgctgcctgatccctgtgtccctggagatccaggtgctgtgggcctacgtgggcctgctgagcaacccccaggcccacgtgtctggagtgcgcttcctgtaccagtgccagagcatccaggacagccagcaggtgacagaggtgtccctgaccaccctggtgaactttgtggacatcacccagaagccccagcccccccggggccagcccaagatggactggaagtggccctttgacttcttccccttcaaggtggccttcagccggggcgtcttcagccagaagtgcagcgtgagccccatcctgatcctgtgcctgctgctgctgggcgtgctgaacctggagaccatgtag

SEQ ID NO: 172884 - DNA, 6468 bp, synthetic construct
  misc_feature 1..6468: note = Description of Artificial Sequence: Synthetic coding sequence
  source 1..6468: mol_type = other DNA
atgaactacagcagcttcctgcgcatctgggtgtccttcatctttgccctggtgcagcaccaggcccagccccgggagctgatgtaccccttctggcagaatgacaccaagacccccaaggtggatgatggcagcagcagcgagatcaagctggccatccctgtgttcttcttcggcgtgccctacagaacagtgtatgtgaacaacaacggggtggtgtccttcaacgtgctggtgtcccagttcaccccagagagcttccccctgacagatggccgggcctttgtggcccccttctgggcagatgtgcacaacggcatccggggggagatctactaccgggagaccatggagcccgccatcctgaagagggccaccaaggacatcaggaagtacttcaaggacatggccaccttcagcgccacctgggtgttcatcgtgacctgggaggaggtgaccttctatggaggcagcagcaccacccctgtgaacaccttccaggccgtgctggtgtctgatggcagctacaccttcaccctcttcaactactatgagatcaactggaccaccggcacagccagcggcggggaccccctgaccggcctgggcggcgtgatggcccaggccggcttcaacggcggcaacctgaccaacttcttcagcctgcccggcagcaggaccccagagatcgtgaacatccaggagaccaccaacgtgaatgtgcccggccgctgggccttcaaggtggatggcaaggagattgatcctgccaacggctgcaccagccggggccagttcctgcggcggggggaggtgttctgggatgacctgaactgcaccgtgaagtgccgctgcctggacttcaacaatgagatctactgccaggaggccagctgcagcccctatgaggtgtgtgagcccaagggcaagttcttctactgcagcgctgtggagaccagcacctgtgtggtgtttggagagccccactaccacacctttgatggcttcctgttccacttccagggcagctgtgcctacctgctggcccggcagtgcctgcagaccagcagcctgcccttcttctctgtggaggccaagaatgagcaccggcggggcagcgctgtgtcctgggtgaaggagctgtctgtggaggtgaatggctacaagatcctgatccccaagggcagctatggccgggtgaaggtgaatgacctggtgaccagcctgcctgtgaccctggacctgggcaccgtgaagatctaccagagcggcatcagcacagctgtggagacagactttggcctgctggtgacctttgatggccagcactacgccagcatctctgtgcccggcagctacatcaacagcacctgtggcctgtgtggcaactacaacaagaaccccctggatgacttcctgcggccagatggccgcccagccatgtctgtgctggacctgggggagagctggagggtgtaccacgccgactggaagtgtgacagcggctgtgtggacaactgcacccagtgtgatgctgccacagaggccctgtactttggaagtgactactgcggcttcctgaacaagacagatggccccctgtgggagtgtggcaccgtggtggaccccacagcctttgtgcacagctgtgtgtatgacctgtgcagcgtgcgggacaatggcaccctgctgtgccaggccatccaggcctatgccctggtgtgccaggccctgggcatccccatcggggactggaggacccagacaggctgtgtgtccacagtgcagtgccccagcttcagccactacagcgtgtgcaccagcagctgcccagacacctgcagcgacctgacagccagcaggaactgtgccaccccctgcacagagggctgtgagtgcaaccagggctttgtgctgagcaccagccagtgtgtgcccctgcacaagtgtggctgtgactttgatggccactactacaccatgggagagttcttctgggccacagccaactgcaccgtgcagtgcctgtgtgaggagggcggagatgtgtactgcttcaacaagacctgtggcagcggggaggtgtgtgctgtggaggatggctaccagggctgcttccccaagcgggagaccgtgtgcctgctgagccagaaccaggtgctgcacacctttgatggagccagctatgccttccccagcgagttctcctacaccctgctgaagacctgcccagagaggcctgagtacctggagattgacatcaacaagaagaagccagatgctggccctgcctggctgcggggcctgcgcatcctggtggccgaccaggaggtgaagattggaggcattggagccagcgaggtgaagctgaatggccaggaggtggagctgcccttcttccaccccagcggcaagctggagatctacagaaacaagaacagcaccaccgtggagagcaagggcgtggtgacagtgcagtacagcgacatcggcctgctgtacatccggctgagcaccacctacttcaactgcacaggaggcctgtgtggcttctacaatgccaatgccagtgatgagttctgcctgcccaacgggaagtgcacagacaacctggccgtgttcctggagagctggaccacctttgaggagatctgcaatggagaatgtggggacctgctgaaggcctgcaacaatgacagcgagctgctgaagttctaccgcagccgcagccgctgtggcatcatcaatgaccccagcaacagcagcttcctggagtgccacggcgtggtgaatgtgacagcctactaccgcacctgcctcttccggctgtgccagagcggcggcaatgaaagtgagctgtgtgacagcgtggcccgctatgccagcgcctgcaagaatgctgatgtggaggtgggcccctggaggacctatgacttctgccccctggagtgcccagagaacagccactttgaggagtgcatcacctgcacagagacctgtgagaccctgaccctgggccccatctgtgtggacagctgcagcgagggctgccagtgtgatgagggctacgccctgctgggcagccagtgtgtgaccaggagtgaatgtggctgcaactttgagggccaccagctggccaccaatgagaccttctgggtggacctggactgccagatcttctgctactgcagcggcacagacaacagagtgcactgtgagaccatcccctgcaaggatgatgagtactgcatggaggagggcggcctgtactactgccaggccaggacagatgccagctgcatcgtgtctggctacggccactacctgacctttgatggcttcccctttgacttccagaccagctgccccctcatcctgtgcaccaccggcagccggcccagcagtgacagcttccccaagtttgtggtgacagccaagaatgaagatcgggaccccagcctggccctgtgggtgaagcaggtggatgtgacagtgtttggctacagcatcgtcatccaccgggcctacaagcacacagtgctggtgaacagcgagcggctgtacctgcccctgaagctgggccagggcaagatcaacatcttctcctttggcttccacgtggtggtggagacagactttggcctgaaggtggtgtatgactggaagaccttcctgagcatcaccgtgcccaggtccatgcagaacagcacctacggcctgtgtggccgctacaatggaaatccagatgatgacctggagatgcccatgggcctgctggccagctctgtgaatgaatttggccagagctgggtgaagagggacaccttctgccaggtgggctgtggggaccgctgccccagctgtgccaaggtggagggcttcagcaaggtgcagcagctgtgcagcctcatccccaaccagaatgctgccttcagcaagtgccacagcaaggtgaaccccaccttcttctacaagaactgcctgtttgacagctgcattgatggcggcgctgtgcagacagcctgctcctggctgcagaactatgccagcacctgccagacccagggcatcaccgtgacaggctggaggaactacaccagctgcaccgtgacctgcccccccaacagccactatgagagctgtgtgtctgtgtgccagccccgctgtgccgccatccggctgaagagtgactgcagccactactgtgtggagggctgccactgtgatgctggctacgtgctgaatggcaagagctgcatcctgccccacagctgtggctgctacagtgatggcaagtactatgagcccaagcagctgttctggaacagcgactgcacccggcgctgccgctgcttcagaagaaatgtcatccagtgtgacccccggcagtgcaagagtgatgaagaatgtgccctgagaaatggagtgcggggctgcttcagcaccaagaccagctactgcctggccgccggcggcggcgtcttccgcacctttgatggagccttcctgcgcttccctgccaactgtgcctttgtgctgagcaccatctgccagaagctgcctgacatctccttccagctgatcatcaactttgacaagtggagcgcccccaacctgaccatcatcagccctgtgtacttctacatcaatgaggagcagatcctgatcaatgacaggaacacagtgaaggtgaatggcacccaggtgaatgtgcccttcatcaccggcctggccaccaagatctacagcagcgagggcttcctggtgattgacaccagcccagacatccagatctactacaacggcttcaacgtcatcaagatcagcatcagcgagcggctgcagaacaaggtgtgtggcctgtgtggcaacttcaacggggacctgacagatgattatgtgaccctgcggggcaagcctgtggtgtcctctgtggtgctggcccagagctggaagaccaacggcatgcagaagaggcccctggcccccagctgcaatgagctgcagttcagccagtatgctgccatgtgtgacaacgtgcacatccagaagatgcagggagatggctactgcctgaagctgacagacatgaagggcttcttccagccctgctacggcctgctggaccccctgcccttctatgagagctgctacctggatggctgctacagccacaagaagttccagctgtgtggcagcctggccgcctatggagaggcctgccgcagctttggcatcctgagcacagagtggattgagaaggagaactgcagcggcgtggtggaggacccctgtgtgggcgctgactgccccaacagaacctgtgagctgggcaatggccgggagctgtgtggctgcatcgagcccccaccctacggcaacaacagccatgacatcattgatgctgaggtgacctgcaaggccgcccagatggaggtgtccatcagcaagtgcaagctgttccagctgggctttgagcgggagggcgtgcgcatcaatgaccggcagtgcaccggcatcgagggggaggacttcatctccttccagatcaacaacaccaagggcaactgtggcaacatcgtgcagagcaatggcacccacatcatgtacaagaacaccctgtggattgagagcgccaacaacacaggcaacatcatcacccgggacaggaccatcaacgtggagttcagctgtgcctatgagctggacatcaagatcagcctggacagcgtggtgaagcccatgctgagcgtcatcaacctgactgtgcccacccaggagggcagcttcatcaccaagatggccctgtacaagaatgccagctacaagcacccctaccggcagggcgaggtggtgctgaccaccagagatgtgctgtatgtgggcgtgtttgtggtgggcgcagatgccacccacctgatcctgaccctgaacaagtgctacgccacccccacccgggacagcaatgacaagctgcgctacttcatcattgaaggaggctgccagaacctgaaggacaacaccatcggcattgaagaaaatgctgtgtccctgacctgccgcttccacgtgacagtgttcaagttcatcggggactatgatgaggtgcacctgcactgtgctgtgtccctgtgtgacagcgagaagtacagctgcaagatcacctgcccccacaacagccgcatcgccacagactacaccaaggagcccaaggagcagatcatctctgtgggccccatccggaggaagaggctggactggtgtgaagataatggaggctgtgagcagatctgcaccagccgggtggatggccccctgtgcagctgtgtgacaggcaccctgcaggaggatggcaagagctgccgggccagcaacagctccatggagctgcaggtgtggaccctgctgctgatcatgatccagatcagcctgtggcactttgtgtacaagagcggcaccaccagctag

SEQ ID NO: 172885 - DNA, 6468 bp, synthetic construct; identical to SEQ ID NO: 172884
  misc_feature 1..6468: note = Description of Artificial Sequence: Synthetic coding sequence
  source 1..6468: mol_type = other DNA

SEQ ID NO: 172886 - DNA, 1257 bp, synthetic construct
  misc_feature 1..1257: note = Description of Artificial Sequence: Synthetic coding sequence
  source 1..1257: mol_type = other DNA
atggccaagctgctgcagcccccacccaagttcctgcccagcgagtggcacatcgccaacaagaaccagtaccacagagcagatgcccagaggagccgctctgagcggctggtggccgagagccagaggctggtggatgaaattgagaagaccaccaggaagagccagagtgatgtgaacaagaagctggagcagaggctggaggaggtgcagttctggaagaaggagctggatgacaagctggagcagctggtgaatgtgacagatgacctgctgatctacaagatccggctggagaaggccctggagaccctgaaggagcccctgcacatcacagagacctgcctggcctaccgggagaagagaattggaattgacctggtgcatgacacagtggagcacgagctgatcaaggaggccgagatcatccagggcatcatggccctgctgaccaggaccctggaggaggccagcgagcagatccgcatgaacagaagtgccaagtacaacctggagaaggacctgaaggacaagtttgtggccctgaccattgatgacatctgcttcagcctgaacaacaacagccccaacatccgctacagtgaaaatgctgtgagaattgagcccaacagcgtgtccctggaggactggctggacttcagcagcaccaacgtggagaaggctgacaagcagaggaacaacagcctgatgctgaaggccctggtggaccgcatcctgagccagacagccaatgacctgaggaagcagtgtgatgtggtggacacagccttcaagaatggcctgaaggacaccaaggatgcccgggacaagctggccgaccacctggccaaggtgatggaggagatcgccagccaggagaagaacatcacagccctggagaaggccatcctggaccaggagggccctgccaaggtggcccacacccggctggagaccaggacccaccggcccaacgtggagctgtgcagagatgtggcccagtaccgcctgatgaaggaggtgcaggagatcacccacaacgtggcccggctgaaggagaccctggcccaggcccaggccgagctgaagggcctgcaccggcggcagctggccctgcaggaggagatccaggtgaaggagaacaccatctacattgatgaggtgctgtgcatgcagatgaggaagagcatccccctgagagatggagaagatcatggagtgtgggccggcggcctgcggccagatgctgtgtgctag

SEQ ID NO: 172887 - DNA, 819 bp, synthetic construct
  misc_feature 1..819: note = Description of Artificial Sequence: Synthetic coding sequence
  source 1..819: mol_type = other DNA
atggccctgctgaccaggaccctggaggaggccagcgagcagatccgcatgaacagaagtgccaagtacaacctggagaaggacctgaaggacaagtttgtggccctgaccattgatgacatctgcttcagcctgaacaacaacagccccaacatccgctacagtgaaaatgctgtgagaattgagcccaacagcgtgtccctggaggactggctggacttcagcagcaccaacgtggagaaggctgacaagcagaggaacaacagcctgatgctgaaggccctggtggaccgcatcctgagccagacagccaatgacctgaggaagcagtgtgatgtggtggacacagccttcaagaatggcctgaaggacaccaaggatgcccgggacaagctggccgaccacctggccaaggtgatggaggagatcgccagccaggagaagaacatcacagccctggagaaggccatcctggaccaggagggccctgccaaggtggcccacacccggctggagaccaggacccaccggcccaacgtggagctgtgcagagatgtggcccagtaccgcctgatgaaggaggtgcaggagatcacccacaacgtggcccggctgaaggagaccctggcccaggcccaggccgagctgaagggcctgcaccggcggcagctggccctgcaggaggagatccaggtgaaggagaacaccatctacattgatgaggtgctgtgcatgcagatgaggaagagcatccccctgagagatggagaagatcatggagtgtgggccggcggcctgcggccagatgctgtgtgctag

SEQ ID NO: 172888 - DNA, 1473 bp, synthetic construct
  misc_feature 1..1473: note = Description of Artificial Sequence: Synthetic coding sequence
  source 1..1473: mol_type = other DNA
atggagcgggtgggctgcaccctgaccaccacctacgcccacccccggcccacccccaccaacttcctgcctgccatcagcaccatggccagcagctacagagaccgcttcccccacagcaacctgacccacagcctgagcctgccctggaggcccagcacctactacaaggtggccagcaacagccccagcgtggccccctactgcaccaggagccagagggtgtctgagaacaccatgctgccctttgtgagcaacagaaccaccttcttcacccgctacaccccagatgactggtaccgcagcaacctgaccaactaccaggagagcaacaccagccgccacaacagcgagaagctgcgggtggacaccagccgcctcatccaggacaagtaccagcagaccaggaagacccaggccgacaccacccagaacctgggggagcgggtgaatgacatcggcttctggaagtctgagatcatccacgagctggatgagatgattggagagaccaatgccctgacagatgtgaagaagaggctggagcgggccctgatggagacagaggcccccctgcaggtggccagagaatgtctcttccaccgggagaagaggatgggcatcgacctggtgcatgatgaggtggaggcccagctgctgacagaggtggacaccatcctgtgctgccaggagaggatgaagctgcacctggacaaggccatcgcccagctggccgccaacagagccagccagcacgagctggagaaggacctgagtgacaagcagacagcctacagaattgatgacaagtgccaccacctgaggaacaccagtgatggagtgggctacttccggggcgtggagcgggtggatgccaccgtgtctgtgcctgagagctgggccaagttcacagatgacaacatcctgcggagccagagcgagcgggccgccagcgccaagctgagagatgacatcgagaacctgctggtggtgacagccaatgagatgtggaaccagttcaacaaggtgaacctgtccttcaccaacagaattgctgagacagcagatgccaagaacaagatccagacccacctggccaagaccctgcaggagatcttccagacagagatgaccatcgagagcatcaagaaggccatcaaggacaagacagccttcctgaaggtggcccagacccggctggatgagaggacccggcggcccaacatcgagctgtgccgggacatggcccagctgcggctggtgaatgaggtgcatgaggtggatgacaccatccagaccctgcagcagaggctgagagatgctgaggacaccctgcagagcctggtgcacatcaaggccaccctggagtatgacctggccgtgaaggccaacagcctgtacatcgaccaggagaagtgcatgtccatgaggaagagctaccccaacaccctgcggctggtgggcttctgctag

SEQ ID NO: 172889 - DNA, 1473 bp, synthetic construct; identical to SEQ ID NO: 172888
  misc_feature 1..1473: note = Description of Artificial Sequence: Synthetic coding sequence
  source 1..1473: mol_type = other DNA

SEQ ID NO: 172890 - DNA, 444 bp, synthetic construct
  misc_feature 1..444: note = Description of Artificial Sequence: Synthetic coding sequence
  source 1..444: mol_type = other DNA
atggagcgggtgggctgcaccctgaccaccacctacgcccacccccggcccacccccaccaacttcctgcctgccatcagcaccatggccagcagctacagagaccgcttcccccacagcaacctgacccacagcctgagcctgccctggaggcccagcacctactacaaggtggccagcaacagccccagcgtggccccctactgcaccaggagccagagggtgtctgagaacaccatgctgccctttgtgagcaacagaaccaccttcttcacccgctacaccccagatgactggtaccgcagcaacctgaccaactaccaggagagcaacaccagccgccacaacagcgagaagctgcgggtggacaccagccgcctcatccaggacaagtaccagcagaccaggaagacccaggccgacaccacccagaacctgggctag

SEQ ID NO: 172891 - DNA, 423 bp, synthetic construct
  misc_feature 1..423: note = Description of Artificial Sequence: Synthetic coding sequence
  source 1..423: mol_type = other DNA
atggagcgggtgggctgcaccctgaccaccacctacgcccacccccggcccacccccaccaacttcctgcctgccatcagcaccatggccagcagctacagagaccgcttcccccacagcaacctgacccacagcctgagcctgccctggaggcccagcacctactacaaggtggccagcaacagccccagcgtggccccctactgcaccaggagccagagggtgtctgagaacaccatgctgccctttgtgagcaacagaaccaccttcttcacccgctacaccccagatgactggtaccgcagcaacctgaccaactaccaggagagcaacaccagccgccacaacagcgagaagctgcgggtggacaccagccgcctcatccaggacaagtaccagcagaccaggaagacccaggcctag

SEQ ID NO: 172892 - DNA, 249 bp, synthetic construct
  misc_feature 1..249: note = Description of Artificial Sequence: Synthetic coding sequence
  source 1..249: mol_type = other DNA
atggagcgggtgggctgcaccctgaccaccacctacgcccacccccggcccacccccaccaacttcctgcctgccatcagcaccatggccagcagctacagagaccgcttcccccacagcaacctgacccacagcctgagcctgccctggaggcccagcacctactacaaggtggccagcaacagccccagcgtggccccctactgcaccaggagccagagggtgtctgagaacaccatgctgccctag

SEQ ID NO: 172893 - DNA, 2514 bp, synthetic construct
  misc_feature 1..2514: note = Description of Artificial Sequence: Synthetic coding sequence
  source 1..2514: mol_type = other DNA
atggagcccgcccccagcgaggtgcggctggccgtgcgggaggccatccacgccctgagcagcagtgaagatggcggccacatcttctgcaccctggagagcctgaagcgctacctgggggagatggagcccccagccctgccccgggagaaggaggagtttgccagcgcccacttcagccctgtgctgcgctgcctggccagccggctgagccctgcctggctggagctgctgccccacggccgcctggaggagctgtgggccagcttcttcctggagggccctgctgaccaggccttcctggtgctgatggagaccattgaaggagctgctggccccagcttccggctgatgaagatggcccggctgctggcccgcttcctgcgggagggccgcctggccgtgctgatggaggcccagtgccggcagcagacccagcccggcttcatcctgctgcgggagaccctgctgggcaaggtggtggccctgcctgaccacctgggcaaccggctgcagcaggagaacctggccgagttcttcccccagaactacttccggctgctgggggaggaggtggtgcgggtgctgcaggccgtggtggacagcctgcagggcggcctggacagctctgtgtcctttgtgtcccaggtgctgggcaaggcctgtgtgcacggccggcagcaggagatcctgggcgtgctggtgccccggctggccgccctgacccagggcagctacctgcaccagagggtgtgctggaggctggtggagcaggtgcctgaccgggccatggaggccgtgctgaccggcctggtggaggccgccctgggccctgaggtgctgagccggctgctgggcaacctggtggtgaagaacaagaaggcccagtttgtgatgacccagaagctgctcttcctgcagagccggctgaccacccccatgctgcagagcctgctgggccacctggccatggacagccagaggcggcccctgctgctgcaggtgctgaaggagctgctggagacctggggcagcagcagcgccatccgccacacccccctgccccagcagagacatgtgtccaaggctgtgctgatctgcctggcccagctgggggagcctgagctgcgggacagcagagatgagctgctggcctccatgatggccggcgtgaagtgccgcctggacagcagcctgccccctgtgcggcggctgggcatgattgtggccgaggtggtgtctgcccgcatccaccctgagggcccccccctgaagttccagtatgaggaggatgagctgagcctggagctgctggccctggccagcccccagcctgctggagatggagccagcgaggccggcaccagcctggtgcctgccacagctgagcccccagctgagaccccagctgagatcgtggatggcggcgtgccccaggcccagctggccggcagtgacagcgacctggacagtgatgatgaatttgtgccctatgacatgtctggggaccgggagctgaagagcagcaaggccccagcctacgtgcgggactgtgtggaggccctgaccaccagcgaggacatcgagcgctgggaggccgccctgcgggccctggagggcctggtgtaccgcagccccacagccacccgggaggtgtctgtggagctggccaaggtgctgctgcacctggaggagaagacctgtgtggtgggctttgctggcctgcggcagagggccctggtggccgtgacagtgacagatcctgcccctgtggccgactacctgaccagccagttctacgccctgaactacagcctgcggcagaggatggacatcctggatgtgctgaccctggccgcccaggagctgagccggcccggctgcctgggccgcaccccccagcccggcagccccagccccaacaccccctgcctgcctgaggccgctgtgtcccagcccggcagcgctgtggccagtgactggagggtggtggtggaggagcgcatccgcagcaagacccagaggctgagcaagggcggcccccggcagggccctgctggcagccccagccgcttcaacagcgtggccggccacttcttcttccccctgctgcagagatttgaccggcccctggtgacctttgacctgctgggggaggaccagctggtgctgggccgcctggcccacaccctgggcgccctgatgtgcctggccgtgaacaccaccgtggccgtggccatgggcaaggccctgctggagtttgtgtgggccctgcgcttccacattgatgcctacgtgcggcagggcctgctgtctgctgtgtcctctgtgctgctgagcctgcctgctgcccggctgctggaggacctgatggatgagctgctggaggcccgctcctggctggctgatgtggccgagaaggaccctgatgaggactgcaggaccctggccctgcgggccctgctgctgctgcagaggctgaagaaccggctgctgcccccagccagcccctag

SEQ ID NO: 172894 - DNA, 1083 bp, synthetic construct
  misc_feature 1..1083: note = Description of Artificial Sequence: Synthetic coding sequence
  source 1..1083: mol_type = other DNA
atgatggccggcgtgaagtgccgcctggacagcagcctgccccctgtgcggcggctgggcatgattgtggccgaggtggtgtctgcccgcatccaccctgagggcccccccctgaagttccagtatgaggaggatgagctgagcctggagctgctggccctggccagcccccagcctgctggagatggagccagcgaggccggcaccagcctggtgcctgccacagctgagcccccagctgagaccccagctgagatcgtggatggcggcgtgccccaggcccagctggccggcagtgacagcgacctggacagtgatgatgaatttgtgccctatgacatgtctggggaccgggagctgaagagcagcaaggccccagcctacgtgcgggactgtgtggaggtgctggatgtgctgaccctggccgcccaggagctgagcaggcctggctgcctgggccgcaccccccagcccggcagccccagccccaacaccccctgcctgcctgaggccgctgtgtcccagcccggcagcgctgtggccagtgactggagggtggtggtggaggagcgcatccgcagcaagacccagaggctgagcaaaggaggcccccggcagggccctgctggcagccccagccgcttcaacagcgtggccggccacttcttcttccccctgctgcagagatttgaccggcccctggtgacctttgacctgctgggggaggaccagctggtgctgggccgcctggcccacaccctgggcgccctgatgtgcctggccgtgaacaccaccgtggccgtggccatgggcaaggccctgctggagtttgtgtgggccctgcgcttccacattgatgcctacgtgcggcagggcctgctgtctgctgtgtcctctgtgctgctgagcctgcctgctgcccggctgctggaggacctgatggatgagctgctggaggcccgctcctggctggctgatgtggccgagaaggaccctgatgaggactgcaggaccctggccctgcgggccctgctgctgctgcagaggctgaagaaccggctgctgcccccagccagcccctag

SEQ ID NO: 172895 - DNA, 3270 bp, synthetic construct
  misc_feature 1..3270: note = Description of Artificial Sequence: Synthetic coding sequence
  source 1..3270: mol_type = other DNA
atggctgtgtttgacaccccagaggaggcctttggagtgctgcggcctgtgtgtgtgcagctgaccaagacccagacagtggagaatgtggagcacctgcagacccggctgcaggccgtgtctgattctgccctgcaggagctgcagcagtacatcctcttccccctgcgcttcaccctgaagaccccaggccccaagcgggagcggctcatccagagcgtggtggagtgcctgacctttgtgctgagcagcacctgtgtgaaggagcaggagctgctgcaggagctgttcagcgagctgagcgcctgcctgtacagccccagcagccagaagccagctgctgtgtctgaggagctgaagctggccgtcatccagggcctgagcaccctgatgcacagcgcctatggagacatcatcctgaccttctatgagcccagcatcctgccccggctgggctttgctgtgtccctgctgctgggcctggccgagcaggagaagagcaagcagatcaagattgctgccctgaagtgcctgcaggtgctgctgctgcagtgtgactgccaggaccaccccaggagcctggatgagctggagcagaagcagctgggggacctgtttgccagcttcctgcccggcatcagcacagccctgaccaggctcatcaccggggacttcaagcagggccacagcatcgtggtgagcagcctgaagatcttctacaagacagtgtccttcatcatggctgatgagcagctgaagaggatcagcaaggtgcaggccaagccagctgtggagcaccgggtggccgagctgatggtgtaccgggaggccgactgggtgaagaagacaggagacaagctgaccatcctgatcaagaagatcattgaatgtgtgtctgtgcacccccactggaaggtgcggctggagctggtggagctggtggaggacctgctgctgaagtgcagccagagcctggtggagtgtgccggccccctgctgaaggccctggtgggcctggtgaatgatgagagccctgagatccaggcccagtgcaacaaggtgctgcggcactttgctgaccagaaggtggtggtgggcaacaaggccctggccgacatcctgtctgagagcctgcacagcctggccaccagcctgccccggctgatgaacagccaggatgaccagggcaagttcagcaccctgagcctgctgctgggctacctgaagctgctgggccccaagatcaactttgtgctgaacagcgtggcccacctgcagaggctgagcaaggccctgatccaggtgctggagctggatgtggccgacatcaagatcgtggaggagcggcgctggaacagtgatgacctgaatgccagccccaagaccagcgccacccagccctggaaccgcatccagaggcgctacttccgcttcttcacagatgagcgcatcttcatgctgctgcggcaggtgtgccagctgctgggctactacggcaacctgtacctgctggtggaccacttcatggagctgtaccaccagagcgtggtgtacaggaagcaggccgccatgatcctgaatgagctggtgactggagctgctggcctggaggtggaggacctgcacgagaagcacatcaagaccaaccctgaggagctgcgggagatcgtgaccagcatcctggaggagtacaccagccaggagaactggtacctggtgacctgcctggagacagaggagatgggagaggagctgatgatggagcaccctggcctgcaggccatcaccagcggggagcacacctgccaggtgaccagcttcctggccttcagcaagcccagccccaccatctgcagcatgaacagcaacatctggcagatctgcatccagctggagggcatcggccagtttgcctatgccctgggcaaggacttctgcctgctgctgatgtctgccctgtaccctgtgctggagaaggccggggaccagaccctgctgatcagccaggtggccaccagcaccatgatggatgtgtgccgggcctgtggctatgacagcctgcagcacctgatcaaccagaacagcgactacctggtgaatggcatcagcctgaacctgcggcacctggccctgcacccccacacccccaaggtgctggaggtgatgctgaggaacagtgatgccaacctgctgcccctggtggctgatgtggtgcaggatgtgctggccaccctggaccagttctatgacaagagagctgccagctttgtgtctgtgctgcacgccctgatggccgccctggcccagtggttcccagacaccggcaacctgggccacctgcaggagcagagcctgggggaggagggcagccacctgaaccagaggcctgctgccctggagaagagcaccaccacagcagaagatattgagcagttcctgctgaactacctgaaggagaaggatgtggctgatggaaatgtgtctgactttgacaatgaggaggaggagcagagcgtgccccccaaggtggatgaaaatgacaccaggccagatgtggagccccccctgcccctgcagatccagatcgccatggatgtgatggagcgctgcatccacctgctgagtgacaagaacctgcagatccggctgaaggtgctggatgtgctggacctgtgtgtggtggtgctgcagagccacaagaaccagctgctgcccctggcccaccaggcctggcccagcctggtgcaccggctgaccagagatgcccccctggccgtgctgcgggccttcaaggtgctgcggaccctgggcagcaaatgtggggacttcctgcggagccgcttctgcaaggatgtgctgcccaagctggccggcagcctggtgacccaggcccccatcagcgcccgggccggccctgtgtacagccacaccctggccttcaagctgcagctggccgtgctgcagggcctgggccccctgtgtgagcggctggacctgggggagggggacctgaacaaggtggctgatgcctgcctgatctacctgtctgtgaagcagcctgtgaagctgcaggaggccgcccggtctgtgttcctgcacctgatgaaggtggaccctgacagcacctggttcctgctgaatgagctgtactgccctgtgcagttcaccccaccccaccccagcctgcaccctgtgcagctgcacggggccagcggccagcagaacccctacaccaccaacgtgctgcagctgctgaaggagctgcagtag

SEQ ID NO: 172896 - DNA, 3270 bp, synthetic construct; identical to SEQ ID NO: 172895
  misc_feature 1..3270: note = Description of Artificial Sequence: Synthetic coding sequence
  source 1..3270: mol_type = other DNA

SEQ ID NO: 172897 - DNA, 3270 bp, synthetic construct; identical to SEQ ID NO: 172895
  misc_feature 1..3270: note = Description of Artificial Sequence: Synthetic coding sequence
  source 1..3270: mol_type = other DNA

SEQ ID NO: 172898 - DNA, 1527 bp, synthetic construct
  misc_feature 1..1527: note = Description of Artificial Sequence: Synthetic coding sequence
  source 1..1527: mol_type = other DNA
atggagctggacagcgccctggaggcccccagccaggaggacagcaacctgtctgaggagctgagccacagcgccttcggccaggccttcagcaagatcctgcactgcctggcccggcctgaggccaggagaggaaatgtgaaggatgctgtgctgaaggacctgggggacctgattgaggccacagaatttgaccggctgtttgagggcactggagcccggctgcggggcatgcctgagaccctgggccaggtggccaaggccctggagaagtatgctgcccccagcaaggaggaggagggcggcggagatggccacagcgaggccgctgagaaggccgcccaggtgggcctgctcttcctgaagctgctgggcaaggtggagacagccaagaacagcctggtgggccctgcctggcagacaggcctgcaccacctggccggccctgtgtacatctttgccatcacccacagcctggagcagccctggaccacccccaggagccgggaggtggcccgggaggtgctgaccagcctgctgcaggtgacagaatgtggctctgtggccggcttcctgcatggagaaaatgaagatgagaagggccgcctgagcgtcatcctgggcctgctgaagccagacctgtacaaggagagctggaagaacaacccagccatcaagcacgtgttctcctggaccctgcagcaggtgacccggccctggctgagccagcacctggagcgggtgctgcctgccagcctggtgatcagtgatgactaccagacagagaacaagatcctgggcgtgcactgcctgcaccacatcgtgctgaatgtgcctgctgctgacctgctgcagtacaacagagcccaggtgctgtaccacgccatcagcaaccacctgtacaccccagagcaccacctgatccaggccgtgctgctgtgcctgctggacctcttccccatcctggagaagaccctgcactggaagggagatggagcccggcccaccacccactgtgatgaggtgctgcggctcatcctgacccacatggagcctgagcaccggctgctgctgcggaggacctacgccaggaacctgcctgcctttgtgaaccggctgggcatcctgactgtgcgccacctgaagaggctggagagggtcatcatcggctacctggaggtgtatgatggccctgaggaggaggcccggctgaagatcctggagaccctgaagctgctgatgcagcacacctggccccgggtgtcctgccgcctggtggtgctgctgaaggccctgctgaagctgatctgtgatgtggcccgggaccccaacctgaccccagagagcgtgaagagcgccctgctgcaggaggccacagactgcctgatcctgctggaccgctgcagccagggccgggtgaagggcctgctggccaagatcccccagagctgtgaggacaggaaggtggtgaactacatcaggaaggtgcagcaggtgtctgagggcgccccctacaacggcacctag

SEQ ID NO: 172899 - DNA, 1527 bp, synthetic construct; identical to SEQ ID NO: 172898
  misc_feature 1..1527: note = Description of Artificial Sequence: Synthetic coding sequence
  source 1..1527: mol_type = other DNA

SEQ ID NO: 172900 - DNA, 1494 bp, synthetic construct
  misc_feature 1..1494: note = Description of Artificial Sequence: Synthetic coding sequence
  source 1..1494: mol_type = other DNA
atggagctggacagcgccctggaggcccccagccaggaggacagcaacctgtctgaggagctgagccacagcgccttcggccaggccttcagcaagatcctgcactgcctggcccggcctgaggccaggagaggaaatgtgaaggatgctgtgctgaaggacctgggggacctgattgaggccacagaatttgaccggctgtttgagggcactggagcccggctgcggggcatgcctgagaccctgggccaggtggccaaggccctggagaagtatgctgcccccagcaaggaggaggagggcggcggagatggccacagcgaggccgctgagaaggccgcccaggtgggcctgctcttcctgaagctgctgggcaaggtggagacagccaagaacagcctggtgggccctgcctggcagacaggcctgcaccacctggccggccctgtgtacatctttgccatcacccacagcctggagcagccctggaccacccccaggagccgggaggtggcccgggaggtgctgaccagcctgctgcaggtgacagaatgtggctctgtggccggcttcctgcatggagaaaatgaagatgagaagggccgcctgagcgtcatcctgggcctgctgaagccagacctgtacaaggagagctggaagaacaacccagccatcaagcacgtgttctcctggaccctgcagcaggtgacccggccctggctgagccagcacctggagcgggtgctgcctgccagcctggtgatcagtgatgactaccagacagagaacaagatcctgggcgtgcactgcctgcaccacatcgtgctgaatgtgcctgctgctgacctgctgcagtacaacagagcccaggtgctgtaccacgccatcagcaaccacctgtacaccccagagcaccacctgatccaggccgtgctgctgtgcctgctggacctcttccccatcctggagaagaccctgcactggaagggagatggagcccggcccaccacccactgtgatgaggtgctgcggctcatcctgacccacatggagcctgagcaccggctgctgctgcggaggacctacgccaggaacctgcctgcctttgtgaaccggctggagagggtcatcatcggctacctggaggtgtatgatggccctgaggaggaggcccggctgaagatcctggagaccctgaagctgctgatgcagcacacctggccccgggtgtcctgccgcctggtggtgctgctgaaggccctgctgaagctgatctgtgatgtggcccgggaccccaacctgaccccagagagcgtgaagagcgccctgctgcaggaggccacagactgcctgatcctgctggaccgctgcagccagggccgggtgaagggcctgctggccaagatcccccagagctgtgaggacaggaaggtggtgaactacatcaggaaggtgcagcaggtgtctgagggcgccccctacaacggcacctag

SEQ ID NO: 172901 - DNA, 306 bp, synthetic construct
  misc_feature 1..306: note = Description of Artificial Sequence: Synthetic coding sequence
  source 1..306: mol_type = other DNA
atggagctggacagcgccctggaggcccccagccaggaggacagcaacctgtctgaggagctgagccacagcgccttcggccaggccttcagcaagatcctgcactgcctggcccggcctgaggccaggagaggaaatgtgaaggatgctgtgctgaaggacctgggggacctgattgaggccacagaatttgaccggctgtttgagggcactggagcccggctgcggggcatgcctgagaccctgggccaggtggccaaggccctggagaagtatgctgcccccagcaaggaggaggagggctag

SEQ ID NO: 172902 - DNA, 2424 bp, synthetic construct
  misc_feature 1..2424: note = Description of Artificial Sequence: Synthetic coding sequence
  source 1..2424: mol_type = other DNA
atgccccgggccccccgctgcagagctgtgcgcagcctgctgcggagccactaccgggaggtgctgcccctggccacctttgtgcggcggctgggcccccagggctggaggctggtgcagagaggagaccctgctgccttccgggccctggtggcccagtgcctggtgtgtgtgccctgggatgcccggcccccacctgctgcccccagcttccggcaggtgtcctgcctgaaggagctggtggcccgggtgctgcagaggctgtgtgagcggggggccaagaatgtgctggcctttggatttgccctgctggatggagcccggggcggccccccagaggccttcaccacctctgtgcgcagctacctgcccaacacagtgacagatgccctgcggggcagcggggcctggggcctgctgctgcggcgggtgggagatgatgtgctggtgcacctgctggcccgctgtgccctgtttgtgctggtggcccccagctgtgcctaccaggtgtgtggcccccccctgtaccagctgggcgccgccacccaggcccggcccccacctcatgccagcggcccccggcggcggctgggctgtgagcgggcctggaaccacagcgtgcgggaggccggcgtgcccctgggcctgcctgcccctggggccaggagaagaggaggcagcgccagccgcagcctgcccctgcccaagaggcccaggagaggagctgcccctgagcctgagaggacccctgtgggccagggctcctgggcccaccctggccgcacccggggccccagcgaccggggcttctgtgtggtgtccccagcccggcctgctgaggaggccaccagcctggagggcgccctgagcggcaccaggcacagccaccccagcgtgggccggcagcaccacgccggcccccccagcaccagcaggcctccccggccctgggacaccccctgcccccctgtgtatgcagagaccaagcacttcctgtacagcagcggggacaaggagcagctgcggcccagcttcctgctgagcagcctgcggcccagcctgactggagcccggcggctggtggagaccatcttcctgggcagccggccctggatgcctggcaccccccggcggctgccccggctgccccagcgctactggcagatgaggcccctcttcctggagctgctgggcaaccacgcccagtgcccctatggagtgctgctgaagacccactgccccctgcgggctgctgtgaccccagctgctggggtgtgtgcccgggagaagccccagggctctgtggccgcccctgaggaggaggacacagacccccggcggctggtgcagctgctgcggcagcacagcagcccctggcaggtgtatggctttgtgcgggcctgcctgcggcggctggtgcccccaggcctgtggggcagccgccacaatgaaagacgcttcctgaggaacaccaagaagttcatcagcctgggcaagcacgccaagctgagcctgcaggagctgacctggaagatgtctgtgcgggactgtgcctggctgcggcgcagccctggggtgggctgtgtgcctgctgctgagcaccggctgcgggaggagatcctggccaagttcctgcactggctgatgtctgtgtatgtggtggagctgctgcgctccttcttctacgtgacagagaccaccttccagaagaacagactcttcttctacaggaagtctgtgtggagcaagctgcagagcatcggcatccggcagcacctgaagagggtgcagctgcgggagctgtctgaggccgaggtgcggcagcaccgggaggcccggcctgccctgctgaccagccggctgcgcttcatccccaagccagatggcctgcggcccatcgtgaacatggactatgtggtgggcgcccggaccttccggcgggagaagagagctgagcggctgaccagccgggtgaaggccctcttctctgtgctgaactatgagcgggcccggcggcccggcctgctgggcgcctctgtgctgggcctggatgacatccaccgggcctggaggacctttgtgctgcgggtgcgggcccaggaccccccacctgagctgtactttgtgaaggtggatgtgactggagcctatgacaccatcccccaggaccggctgacagaggtgattgccagcatcatcaagccccagaacacctactgtgtgcggcgctatgctgtggtgcagaaggccgcccacggccacgtgaggaaggccttcaagagccacgtgctgcggcctgtgcctggggaccctgctggcctgcaccccctgcatgctgccctgcagcctgtgctgcggcggcacggggagcaggccgtgtgtggggacagcgctggccgggccgccccagcctttggaggatag

SEQ ID NO: 172903 - DNA, 3399 bp, synthetic construct
  misc_feature 1..3399: note = Description of Artificial Sequence: Synthetic coding sequence
  source 1..3399: mol_type = other DNA
atgccccgggccccccgctgcagagctgtgcgcagcctgctgcggagccactaccgggaggtgctgcccctggccacctttgtgcggcggctgggcccccagggctggaggctggtgcagagaggagaccctgctgccttccgggccctggtggcccagtgcctggtgtgtgtgccctgggatgcccggcccccacctgctgcccccagcttccggcaggtgtcctgcctgaaggagctggtggcccgggtgctgcagaggctgtgtgagcggggggccaagaatgtgctggcctttggatttgccctgctggatggagcccggggcggccccccagaggccttcaccacctctgtgcgcagctacctgcccaacacagtgacagatgccctgcggggcagcggggcctggggcctgctgctgcggcgggtgggagatgatgtgctggtgcacctgctggcccgctgtgccctgtttgtgctggtggcccccagctgtgcctaccaggtgtgtggcccccccctgtaccagctgggcgccgccacccaggcccggcccccacctcatgccagcggcccccggcggcggctgggctgtgagcgggcctggaaccacagcgtgcgggaggccggcgtgcccctgggcctgcctgcccctggggccaggagaagaggaggcagcgccagccgcagcctgcccctgcccaagaggcccaggagaggagctgcccctgagcctgagaggacccctgtgggccagggctcctgggcccaccctggccgcacccggggccccagcgaccggggcttctgtgtggtgtccccagcccggcctgctgaggaggccaccagcctggagggcgccctgagcggcaccaggcacagccaccccagcgtgggccggcagcaccacgccggcccccccagcaccagcaggcctccccggccctgggacaccccctgcccccctgtgtatgcagagaccaagcacttcctgtacagcagcggggacaaggagcagctgcggcccagcttcctgctgagcagcctgcggcccagcctgactggagcccggcggctggtggagaccatcttcctgggcagccggccctggatgcctggcaccccccggcggctgccccggctgccccagcgctactggcagatgaggcccctcttcctggagctgctgggcaaccacgcccagtgcccctatggagtgctgctgaagacccactgccccctgcgggctgctgtgaccccagctgctggggtgtgtgcccgggagaagccccagggctctgtggccgcccctgaggaggaggacacagacccccggcggctggtgcagctgctgcggcagcacagcagcccctggcaggtgtatggctttgtgcgggcctgcctgcggcggctggtgcccccaggcctgtggggcagccgccacaatgaaagacgcttcctgaggaacaccaagaagttcatcagcctgggcaagcacgccaagctgagcctgcaggagctgacctggaagatgtctgtgcgggactgtgcctggctgcggcgcagccctggggtgggctgtgtgcctgctgctgagcaccggctgcgggaggagatcctggccaagttcctgcactggctgatgtctgtgtatgtggtggagctgctgcgctccttcttctacgtgacagagaccaccttccagaagaacagactcttcttctacaggaagtctgtgtggagcaagctgcagagcatcggcatccggcagcacctgaagagggtgcagctgcgggagctgtctgaggccgaggtgcggcagcaccgggaggcccggcctgccctgctgaccagccggctgcgcttcatccccaagccagatggcctgcggcccatcgtgaacatggactatgtggtgggcgcccggaccttccggcgggagaagagagctgagcggctgaccagccgggtgaaggccctcttctctgtgctgaactatgagcgggcccggcggcccggcctgctgggcgcctctgtgctgggcctggatgacatccaccgggcctggaggacctttgtgctgcgggtgcgggcccaggaccccccacctgagctgtactttgtgaaggtggatgtgactggagcctatgacaccatcccccaggaccggctgacagaggtgattgccagcatcatcaagccccagaacacctactgtgtgcggcgctatgctgtggtgcagaaggccgcccacggccacgtgaggaaggccttcaagagccacgtgtccaccctgacagacctgcagccctacatgaggcagtttgtggcccacctgcaggagaccagccccctgagagatgctgtggtgattgagcagagcagcagcctgaatgaggccagcagcggcctgtttgatgtgttcctgcgcttcatgtgccaccacgctgtgcgcatccggggcaagagctatgtgcagtgccagggcatcccccagggcagcatcctgagcaccctgctgtgcagcctgtgctacggggacatggagaacaagctgtttgctggcatcagaagagatggcctgctgctgcggctggtggatgacttcctgctggtgaccccccacctgacccacgccaagaccttcctgcggaccctggtgcggggcgtgcctgaatatggctgtgtggtgaacctgaggaagacagtggtgaacttccctgtggaggatgaggccctgggcggcacagcctttgtgcagatgcctgcccacggcctcttcccctggtgtggcctgctgctggacaccaggaccctggaggtgcagagcgactacagcagctatgcccggaccagcatccgggccagcctgaccttcaacagaggcttcaaggccggcaggaacatgaggaggaagctgtttggagtgctgcggctgaagtgccacagcctcttcctggacctgcaggtgaacagcctgcagacagtgtgcaccaacatctacaagatcctgctgctgcaggcctaccgcttccacgcctgtgtgctgcagctgcccttccaccagcaggtgtggaagaaccccaccttcttcctgcgggtcatcagtgacacagccagcctgtgctacagcatcctgaaggccaagaatgccggcatgagcctgggcgccaagggagctgctggccccctgcccagcgaggccgtgcagtggctgtgccaccaggccttcctgctgaagctgaccaggcaccgggtgacctacgtgcccctgctgggcagcctgaggacagcccagacccagctgagcaggaagctgcccggcaccaccctgacagccctggaggccgccgccaacccagccctgcccagcgacttcaagaccatcctggactag

SEQ ID NO: 172904 - DNA, 3210 bp, synthetic construct
  misc_feature 1..3210: note = Description of Artificial Sequence: Synthetic coding sequence
  source 1..3210: mol_type = other DNA
atgccccgggccccccgctgcagagctgtgcgcagcctgctgcggagccactaccgggaggtgctgcccctggccacctttgtgcggcggctgggcccccagggctggaggctggtgcagagaggagaccctgctgccttccgggccctggtggcccagtgcctggtgtgtgtgccctgggatgcccggcccccacctgctgcccccagcttccggcaggtgtcctgcctgaaggagctggtggcccgggtgctgcagaggctgtgtgagcggggggccaagaatgtgctggcctttggatttgccctgctggatggagcccggggcggccccccagaggccttcaccacctctgtgcgcagctacctgcccaacacagtgacagatgccctgcggggcagcggggcctggggcctgctgctgcggcgggtgggagatgatgtgctggtgcacctgctggcccgctgtgccctgtttgtgctggtggcccccagctgtgcctaccaggtgtgtggcccccccctgtaccagctgggcgccgccacccaggcccggcccccacctcatgccagcggcccccggcggcggctgggctgtgagcgggcctggaaccacagcgtgcgggaggccggcgtgcccctgggcctgcctgcccctggggccaggagaagaggaggcagcgccagccgcagcctgcccctgcccaagaggcccaggagaggagctgcccctgagcctgagaggacccctgtgggccagggctcctgggcccaccctggccgcacccggggccccagcgaccggggcttctgtgtggtgtccccagcccggcctgctgaggaggccaccagcctggagggcgccctgagcggcaccaggcacagccaccccagcgtgggccggcagcaccacgccggcccccccagcaccagcaggcctccccggccctgggacaccccctgcccccctgtgtatgcagagaccaagcacttcctgtacagcagcggggacaaggagcagctgcggcccagcttcctgctgagcagcctgcggcccagcctgactggagcccggcggctggtggagaccatcttcctgggcagccggccctggatgcctggcaccccccggcggctgccccggctgccccagcgctactggcagatgaggcccctcttcctggagctgctgggcaaccacgcccagtgcccctatggagtgctgctgaagacccactgccccctgcgggctgctgtgaccccagctgctggggtgtgtgcccgggagaagccccagggctctgtggccgcccctgaggaggaggacacagacccccggcggctggtgcagctgctgcggcagcacagcagcccctggcaggtgtatggctttgtgcgggcctgcctgcggcggctggtgcccccaggcctgtggggcagccgccacaatgaaagacgcttcctgaggaacaccaagaagttcatcagcctgggcaagcacgccaagctgagcctgcaggagctgacctggaagatgtctgtgcgggactgtgcctggctgcggcgcagccctggggtgggctgtgtgcctgctgctgagcaccggctgcgggaggagatcctggccaagttcctgcactggctgatgtctgtgtatgtggtggagctgctgcgctccttcttctacgtgacagagaccaccttccagaagaacagactcttcttctacaggaagtctgtgtggagcaagctgcagagcatcggcatccggcagcacctgaagagggtgcagctgcgggagctgtctgaggccgaggtgcggcagcaccgggaggcccggcctgccctgctgaccagccggctgcgcttcatccccaagccagatggcctgcggcccatcgtgaacatggactatgtggtgggcgcccggaccttccggcgggagaagagagctgagcggctgaccagccgggtgaaggccctcttctctgtgctgaactatgagcgggcccggcggcccggcctgctgggcgcctctgtgctgggcctggatgacatccaccgggcctggaggacctttgtgctgcgggtgcgggcccaggaccccccacctgagctgtactttgtgaaggtggatgtgactggagcctatgacaccatcccccaggaccggctgacagaggtgattgccagcatcatcaagccccagaacacctactgtgtgcggcgctatgctgtggtgcagaaggccgcccacggccacgtgaggaaggccttcaagagccacgtgtccaccctgacagacctgcagccctacatgaggcagtttgtggcccacctgcaggagaccagccccctgagagatgctgtggtgattgagcagagcagcagcctgaatgaggccagcagcggcctgtttgatgtgttcctgcgcttcatgtgccaccacgctgtgcgcatccggggcaagagctatgtgcagtgccagggcatcccccagggcagcatcctgagcaccctgctgtgcagcctgtgctacggggacatggagaacaagctgtttgctggcatcagaagagatggcctgctgctgcggctggtggatgacttcctgctggtgaccccccacctgacccacgccaagaccttcctgtcctatgcccggaccagcatccgggccagcctgaccttcaacagaggcttcaaggccggcaggaacatgaggaggaagctgtttggagtgctgcggctgaagtgccacagcctcttcctggacctgcaggtgaacagcctgcagacagtgtgcaccaacatctacaagatcctgctgctgcaggcctaccgcttccacgcctgtgtgctgcagctgcccttccaccagcaggtgtggaagaaccccaccttcttcctgcgggtcatcagtgacacagccagcctgtgctacagcatcctgaaggccaagaatgccggcatgagcctgggcgccaagggagctgctggccccctgcccagcgaggccgtgcagtggctgtgccaccaggccttcctgctgaagctgaccaggcaccgggtgacctacgtgcccctgctgggcagcctgaggacagcccagacccagctgagcaggaagctgcccggcaccaccctgacagccctggaggccgccgccaacccagccctgcccagcgacttcaagaccatcctggactag

SEQ ID NO: 172905 - DNA, 2424 bp, synthetic construct; identical to SEQ ID NO: 172902
  misc_feature 1..2424: note = Description of Artificial Sequence: Synthetic coding sequence
  source 1..2424: mol_type = other DNA

SEQ ID NO: 172906 - DNA, 372 bp, synthetic construct
  misc_feature 1..372: note = Description of Artificial Sequence: Synthetic coding sequence
  source 1..372: mol_type = other DNA
atgatgctgcccaagccaggcacctactacctgccctgggaggtgtctgctggccaggtgcctgatggcagcaccctgcggaccttcggccgcctgtgcctgtatgacatgatccagagccgggtgaccctgatggcccagcacggcagtgaccagcaccaggtgctggtgtgcaccaagctggtggagcccttccacgcccaggtgggcagcctgtacatcgtgctgggggagctgcagcaccagcaggaccggggctctgtggtgaaggcccgggtgctgacctgtgtggagggcatgaacctgcccctgctggagcaggccatccgggagcagaggctgtacaagcaggagcggggcggcagccagtag

SEQ ID NO: 172907 - DNA, 369 bp, synthetic construct
  misc_feature 1..369: note = Description of Artificial Sequence: Synthetic coding sequence
  source 1..369: mol_type = other DNA
atgctgcccaagccaggcacctactacctgccctgggaggtgtctgctggccaggtgcctgatggcagcaccctgcggaccttcggccgcctgtgcctgtatgacatgatccagagccgggtgaccctgatggcccagcacggcagtgaccagcaccaggtgctggtgtgcaccaagctggtggagcccttccacgcccaggtgggcagcctgtacatcgtgctgggggagctgcagcaccagcaggaccggggctctgtggtgaaggcccgggtgctgacctgtgtggagggcatgaacctgcccctgctggagcaggccatccgggagcagaggctgtacaagcaggagcggggcggcagccagtag

SEQ ID NO: 172908 - DNA, 5514 bp, synthetic construct
  misc_feature 1..5514: note = Description of Artificial Sequence: Synthetic coding sequence
  source 1..5514: mol_type = other DNA
atgggcgccatgacccagctgctggccggggtcttcctggccttcctggccctggccacagagggcggcgtgctgaagaaggtgatccgccacaagaggcagagcggcgtgaatgccaccctgcctgaggagaaccagcctgtggtgttcaaccacgtgtacaacatcaagctgcctgtgggcagccagtgcagcgtggacctggagagcgccagcggggagaaggacctggcccctccttctgagcccagcgagagcttccaggagcacacagtggatggagagaaccagatcgtgttcacccaccgcatcaacatcccccggcgggcctgtggctgtgccgccgccccagatgtgaaggagctgctgagccggctggaggagctggagaacctggtgagcagcctgcgggagcagtgcacagctggggccggctgctgcctgcagcctgccaccggccgcctggacacccggcccttctgcagcggccggggcaacttcagcacagagggctgcggctgtgtgtgtgagcccggctggaagggccccaactgcagcgagccagaatgtcctggcaactgccacctgcggggccgctgcattgatggccagtgcatctgtgatgatggcttcaccggggaggactgcagccagctggcctgccccagcgactgcaatgaccagggcaaatgtgtgaatggagtgtgcatctgctttgagggctacgccggggctgactgcagccgggagatctgccctgtgccctgcagcgaggagcacggcacctgtgtggatggcctgtgtgtgtgccatgatggctttgctggagatgactgcaacaagcccctgtgcctgaacaactgctacaacagaggccgctgtgtggagaatgaatgtgtgtgtgatgagggcttcaccggggaggactgcagcgagctgatctgccccaatgactgctttgaccggggccgctgcatcaatggcacctgctactgtgaggagggcttcaccggggaggactgtgggaagcccacctgcccccacgcctgccacacccagggccgctgtgaggagggccagtgtgtgtgtgatgagggctttgctggggtggactgcagcgagaagcgctgcccagctgactgccacaacagaggccgctgtgtggatggccgctgtgaatgtgatgatggcttcaccggggctgactgtggggagctgaagtgccccaacggctgcagcggccacggccgctgtgtgaatggccagtgtgtgtgtgatgagggctacaccggggaggactgcagccagctgcgctgccccaatgactgccacagccggggccgctgtgtggagggcaaatgtgtgtgtgagcagggcttcaagggctatgactgcagcgacatgagctgccccaatgactgccaccagcacggccgctgtgtgaatggcatgtgtgtgtgtgatgatggctacaccggggaggactgccgggaccggcagtgcccccgggactgcagcaacagaggcctgtgtgtggatggccagtgtgtgtgtgaagatggcttcaccggccctgactgtgccgagctgagctgccccaatgactgccacggccagggccgctgtgtgaatggccagtgtgtgtgccacgagggcttcatgggcaaggactgcaaggagcagcgctgccccagcgactgccacggccagggccgctgtgtggatggccagtgcatctgccacgagggcttcaccggcctggactgtggccagcacagctgccccagcgactgcaacaacctgggccagtgtgtgtctggccgctgcatctgcaatgaaggctacagcggggaggactgcagcgaggtgtccccacccaaggacctggtggtgacagaggtgacagaggagaccgtgaacctggcctgggacaatgagatgagggtgacagagtacctggtggtgtacacccccacccatgagggcggcctggagatgcagttccgggtgcctggggaccagaccagcaccatcatccaggagctggagcccggggtggagtacttcatccgggtgtttgccatcctggagaacaagaagagcatccctgtgtctgcccgggtggccacctacctgcctgcccctgagggcctgaagttcaagagcatcaaggagacctctgtggaggtggagtgggaccccctggacatcgcctttgagacctgggagatcatcttcaggaacatgaacaaggaggatgaaggagagatcaccaagagcctgcggcggcctgagaccagctaccggcagacaggcctggcccctggccaggagtatgagatcagcctgcacatcgtgaagaacaacacccggggccctggcctgaagagggtgaccaccacccggctggatgcccccagccagatcgaggtgaaggatgtgacagacaccacagccctgatcacctggttcaagcccctggccgagattgatggcatcgagctgacctacggcatcaaggatgtgcctggggacaggaccaccatcgacctgacagaagatgagaaccagtacagcatcggcaacctgaagccagacacagaatatgaggtgtccctcatcagccggcggggggacatgagcagcaacccagccaaggagaccttcaccaccggcctggatgcccccaggaacctgcggcgggtgtcccagacagacaacagcatcaccctggagtggagaaatggcaaggccgccatcgacagctaccgcatcaagtatgcccccatctctggaggagaccacgccgaggtggatgtgcccaagagccagcaggccaccaccaagaccaccctgaccggcctgcggcctggaacagaatatggaattggagtgtctgctgtgaaggaggacaaggagagcaacccagccaccatcaatgctgccacagagctggacacccccaaggacctgcaggtgtctgaaacagctgagaccagcctgaccctgctgtggaagacccccctggccaagtttgaccgctaccgcctgaactacagcctgcccaccggccagtgggtgggcgtgcagctgcccaggaacaccaccagctatgtgctgcggggcctggagcccggccaggagtacaacgtgctgctgacagctgagaagggccgccacaagagcaagccagcccgggtgaaggccagcacagccaaggagcctgagatcggcaacctgaatgtgtctgacatcaccccagagagcttcaacctgtcctggatggccacagatggcatctttgagaccttcaccatcgagatcatcgacagcaaccggctgctggagaccgtggagtacaacatctctggagctgagaggacagcccacatcagcggcctgccccccagcacagacttcatcgtgtacctgagcggcctggcccccagcatccgcaccaagaccatcagcgccacagccaccacagaggccctgcccctgctggagaacctgaccatcagtgacatcaacccctacggcttcaccgtgtcctggatggcctctgaaaatgcctttgacagcttcctggtgacagtggtggacagcggcaagctgctggacccccaggagttcaccctgagcggcacccagaggaagctggagctgcggggcctcatcactggaattggctatgaggtgatggtgtctggcttcacccagggccaccagaccaagcccctgcgggcagaaattgtgacagaagctgagcctgaggtggacaacctgctggtgtctgatgccaccccagatggcttccggctgtcctggacagcagatgaaggagtgtttgacaactttgtgctgaagatccgggacaccaagaagcagagcgagcccctggagatcaccctgctggcccctgagaggacccgggacatcaccggcctgcgggaggccacagaatatgaaattgagctgtatggcatcagcaaaggaagaagaagccagacagtgtctgccatcgccaccacagccatgggcagccccaaggaggtgatcttcagtgacatcacagaaaattctgccaccgtgtcctggagggcccccacagcccaggtggagagcttccgcatcacctacgtgcccatcaccggcggcacccccagcatggtgacagtggatggcaccaagacccagacccggctggtgaagctgatccctggggtggagtacctggtgtccatcatcgccatgaagggctttgaggagagcgagcctgtgtctggcagcttcaccacagccctggatggccccagcggcctggtgacagccaacatcacagattctgaggccctggcccgctggcagcctgccatcgccaccgtggacagctatgtgatctcctacaccggggagaaggtgcctgagatcaccaggacagtgtctggcaacacagtggagtatgccctgacagacctggagcccgccacagagtacaccctgcgcatctttgctgagaagggcccccagaagagcagcaccatcacagccaagttcaccacagacctggacagcccccgggacctgacagccacagaggtgcagagcgagacagccctgctgacctggaggcctccccgggcctctgtgacaggctacctgctggtgtatgaatctgtggatggcaccgtgaaggaggtgattgtgggccctgacaccaccagctacagcctggccgacctgagccccagcacccactacacagccaagatccaggccctgaatggccccctgcggagcaacatgatccagaccatcttcaccaccatcggcctgctgtaccccttccccaaggactgcagccaggccatgctgaatggagacaccaccagcggcctgtacaccatctacctgaatggagacaaggccgaggccctggaggtgttctgtgacatgaccagtgatggcggcggctggatcgtgttcctgcggaggaagaatggccgggagaacttctaccagaactggaaggcctatgctgctggctttggagaccggcgggaggagttctggctgggcctggacaacctgaacaagatcacagcccagggccagtatgagctgcgggtggacctgcgggaccatggagaaacagcctttgctgtgtatgacaagttctctgtgggagatgccaagacccgctacaagctgaaggtggagggctacagcggcacagctggggacagcatggcctaccacaacggccgctccttcagcacctttgacaaggacacagattctgccatcaccaactgtgccctgagctacaagggggccttctggtacagaaactgccaccgggtgaacctgatgggccgctacggggacaacaaccacagccagggcgtgaactggttccactggaagggccacgagcacagcatccagtttgctgagatgaagctgcggcccagcaacttcaggaacctggagggccgcaggaagagggcctag

SEQ ID NO: 172909 - DNA, 4695 bp, synthetic construct
  misc_feature 1..4695: note = Description of Artificial Sequence: Synthetic coding sequence
  source 1..4695: mol_type = other DNA
atgggcgccatgacccagctgctggccggggtcttcctggccttcctggccctggccacagagggcggcgtgctgaagaaggtgatccgccacaagaggcagagcggcgtgaatgccaccctgcctgaggagaaccagcctgtggtgttcaaccacgtgtacaacatcaagctgcctgtgggcagccagtgcagcgtggacctggagagcgccagcggggagaaggacctggcccctccttctgagcccagcgagagcttccaggagcacacagtggatggagagaaccagatcgtgttcacccaccgcatcaacatcccccggcgggcctgtggctgtgccgccgccccagatgtgaaggagctgctgagccggctggaggagctggagaacctggtgagcagcctgcgggagcagtgcacagctggggccggctgctgcctgcagcctgccaccggccgcctggacacccggcccttctgcagcggccggggcaacttcagcacagagggctgcggctgtgtgtgtgagcccggctggaagggccccaactgcagcgagccagaatgtcctggcaactgccacctgcggggccgctgcattgatggccagtgcatctgtgatgatggcttcaccggggaggactgcagccagctggcctgccccagcgactgcaatgaccagggcaaatgtgtgaatggagtgtgcatctgctttgagggctacgccggggctgactgcagccgggagatctgccctgtgccctgcagcgaggagcacggcacctgtgtggatggcctgtgtgtgtgccatgatggctttgctggagatgactgcaacaagcccctgtgcctgaacaactgctacaacagaggccgctgtgtggagaatgaatgtgtgtgtgatgagggcttcaccggggaggactgcagcgagctgatctgccccaatgactgctttgaccggggccgctgcatcaatggcacctgctactgtgaggagggcttcaccggggaggactgtgggaagcccacctgcccccacgcctgccacacccagggccgctgtgaggagggccagtgtgtgtgtgatgagggctttgctggggtggactgcagcgagaagcgctgcccagctgactgccacaacagaggccgctgtgtggatggccgctgtgaatgtgatgatggcttcaccggggctgactgtggggagctgaagtgccccaacggctgcagcggccacggccgctgtgtgaatggccagtgtgtgtgtgatgagggctacaccggggaggactgcagccagctgcgctgccccaatgactgccacagccggggccgctgtgtggagggcaaatgtgtgtgtgagcagggcttcaagggctatgactgcagcgacatgagctgccccaatgactgccaccagcacggccgctgtgtgaatggcatgtgtgtgtgtgatgatggctacaccggggaggactgccgggaccggcagtgcccccgggactgcagcaacagaggcctgtgtgtggatggccagtgtgtgtgtgaagatggcttcaccggccctgactgtgccgagctgagctgccccaatgactgccacggccagggccgctgtgtgaatggccagtgtgtgtgccacgagggcttcatgggcaaggactgcaaggagcagcgctgccccagcgactgccacggccagggccgctgtgtggatggccagtgcatctgccacgagggcttcaccggcctggactgtggccagcacagctgccccagcgactgcaacaacctgggccagtgtgtgtctggccgctgcatctgcaatgaaggctacagcggggaggactgcagcgaggtgtccccacccaaggacctggtggtgacagaggtgacagaggagaccgtgaacctggcctgggacaatgagatgagggtgacagagtacctggtggtgtacacccccacccatgagggcggcctggagatgcagttccgggtgcctggggaccagaccagcaccatcatccaggagctggagcccggggtggagtacttcatccgggtgtttgccatcctggagaacaagaagagcatccctgtgtctgcccgggtggccacctacctgcctgcccctgagggcctgaagttcaagagcatcaaggagacctctgtggaggtggagtgggaccccctggacatcgcctttgagacctgggagatcatcttcaggaacatgaacaaggaggatgaaggagagatcaccaagagcctgcggcggcctgagaccagctaccggcagacaggcctggcccctggccaggagtatgagatcagcctgcacatcgtgaagaacaacacccggggccctggcctgaagagggtgaccaccacccggctggatgcccccagccagatcgaggtgaaggatgtgacagacaccacagccctgatcacctggttcaagcccctggccgagattgatggcatcgagctgacctacggcatcaaggatgtgcctggggacaggaccaccatcgacctgacagaagatgagaaccagtacagcatcggcaacctgaagccagacacagaatatgaggtgtccctcatcagccggcggggggacatgagcagcaacccagccaaggagaccttcaccaccggcctggatgcccccaggaacctgcggcgggtgtcccagacagacaacagcatcaccctggagtggagaaatggcaaggccgccatcgacagctaccgcatcaagtatgcccccatctctggaggagaccacgccgaggtggatgtgcccaagagccagcaggccaccaccaagaccaccctgaccggcctgcggcctggaacagaatatggaattggagtgtctgctgtgaaggaggacaaggagagcaacccagccaccatcaatgctgccacagagctggacacccccaaggacctgcaggtgtctgaaacagctgagaccagcctgaccctgctgtggaagacccccctggccaagtttgaccgctaccgcctgaactacagcctgcccaccggccagtgggtgggcgtgcagctgcccaggaacaccaccagctatgtgctgcggggcctggagcccggccaggagtacaacgtgctgctgacagctgagaagggccgccacaagagcaagccagcccgggtgaaggccagcacagccatgggcagccccaaggaggtgatcttcagtgacatcacagagaacagcgccaccgtgtcctggagggcccccacagcccaggtggagagcttccgcatcacctacgtgcccatcactggaggcacccccagcatggtgacagtggatggcaccaagacccagacccggctggtgaagctgatccctggggtggagtacctggtgtccatcatcgccatgaagggctttgaggagagcgagcctgtgtctggcagcttcaccacagccctggatggccccagcggcctggtgacagccaacatcacagacagcgaggccctggcccgctggcagcctgccatcgccaccgtggacagctatgtgatctcctacacaggagagaaggtgcctgagatcaccaggacagtgtctggcaacacagtggagtatgccctgacagacctggagcccgccacagagtacaccctgcgcatctttgctgagaagggcccccagaagagcagcaccatcacagccaagttcaccacagacctggacagcccccgggacctgacagccacagaggtgcagagcgagacagccctgctgacctggaggcctccccgggcctctgtgacaggctacctgctggtgtatgagagcgtggatggcaccgtgaaggaggtgattgtgggccctgacaccaccagctacagcctggccgacctgagccccagcacccactacacagccaagatccaggccctgaatggccccctgcggagcaacatgatccagaccatcttcaccaccatcggcctgctgtaccccttccccaaggactgcagccaggccatgctgaatggagacaccaccagcggcctgtacaccatctacctgaatggagacaaggccgaggccctggaggtgttctgtgacatgaccagtgatggcggcggctggatcgtgttcctgcggaggaagaatggaagagagaacttctaccagaactggaaggcctatgctgctggctttggagacagaagagaggagttctggctgggcctggacaacctgaacaagatcacagcccagggccagtatgagctgcgggtggacctgcgggaccacggggagacagcctttgctgtgtatgacaagttctctgtgggagatgccaagacccgctacaagctgaaggtggagggctacagcggcacagctggggacagcatggcctaccacaacggccgctccttcagcacctttgacaaggacacagacagcgccatcaccaactgtgccctgagctacaagggggccttctggtacagaaactgccaccgggtgaacctgatgggccgctatggagacaacaaccacagccagggcgtgaactggttccactggaagggccacgagcacagcatccagtttgctgagatgaagctgcggcccagcaacttcaggaacctggagggccgcaggaagagggcctag

SEQ ID NO: 172910 - DNA, 4968 bp, synthetic construct
  misc_feature 1..4968: note = Description of Artificial Sequence: Synthetic coding sequence
  source 1..4968: mol_type = other DNA
atgggcgccatgacccagctgctggccggggtcttcctggccttcctggccctggccacagagggcggcgtgctgaagaaggtgatccgccacaagaggcagagcggcgtgaatgccaccctgcctgaggagaaccagcctgtggtgttcaaccacgtgtacaacatcaagctgcctgtgggcagccagtgcagcgtggacctggagagcgccagcggggagaaggacctggcccctccttctgagcccagcgagagcttccaggagcacacagtggatggagagaaccagatcgtgttcacccaccgcatcaacatcccccggcgggcctgtggctgtgccgccgccccagatgtgaaggagctgctgagccggctggaggagctggagaacctggtgagcagcctgcgggagcagtgcacagctggggccggctgctgcctgcagcctgccaccggccgcctggacacccggcccttctgcagcggccggggcaacttcagcacagagggctgcggctgtgtgtgtgagcccggctggaagggccccaactgcagcgagccagaatgtcctggcaactgccacctgcggggccgctgcattgatggccagtgcatctgtgatgatggcttcaccggggaggactgcagccagctggcctgccccagcgactgcaatgaccagggcaaatgtgtgaatggagtgtgcatctgctttgagggctacgccggggctgactgcagccgggagatctgccctgtgccctgcagcgaggagcacggcacctgtgtggatggcctgtgtgtgtgccatgatggctttgctggagatgactgcaacaagcccctgtgcctgaacaactgctacaacagaggccgctgtgtggagaatgaatgtgtgtgtgatgagggcttcaccggggaggactgcagcgagctgatctgccccaatgactgctttgaccggggccgctgcatcaatggcacctgctactgtgaggagggcttcaccggggaggactgtgggaagcccacctgcccccacgcctgccacacccagggccgctgtgaggagggccagtgtgtgtgtgatgagggctttgctggggtggactgcagcgagaagcgctgcccagctgactgccacaacagaggccgctgtgtggatggccgctgtgaatgtgatgatggcttcaccggggctgactgtggggagctgaagtgccccaacggctgcagcggccacggccgctgtgtgaatggccagtgtgtgtgtgatgagggctacaccggggaggactgcagccagctgcgctgccccaatgactgccacagccggggccgctgtgtggagggcaaatgtgtgtgtgagcagggcttcaagggctatgactgcagcgacatgagctgccccaatgactgccaccagcacggccgctgtgtgaatggcatgtgtgtgtgtgatgatggctacaccggggaggactgccgggaccggcagtgcccccgggactgcagcaacagaggcctgtgtgtggatggccagtgtgtgtgtgaagatggcttcaccggccctgactgtgccgagctgagctgccccaatgactgccacggccagggccgctgtgtgaatggccagtgtgtgtgccacgagggcttcatgggcaaggactgcaaggagcagcgctgccccagcgactgccacggccagggccgctgtgtggatggccagtgcatctgccacgagggcttcaccggcctggactgtggccagcacagctgccccagcgactgcaacaacctgggccagtgtgtgtctggccgctgcatctgcaatgaaggctacagcggggaggactgcagcgaggtgtccccacccaaggacctggtggtgacagaggtgacagaggagaccgtgaacctggcctgggacaatgagatgagggtgacagagtacctggtggtgtacacccccacccatgagggcggcctggagatgcagttccgggtgcctggggaccagaccagcaccatcatccaggagctggagcccggggtggagtacttcatccgggtgtttgccatcctggagaacaagaagagcatccctgtgtctgcccgggtggccacctacctgcctgcccctgagggcctgaagttcaagagcatcaaggagacctctgtggaggtggagtgggaccccctggacatcgcctttgagacctgggagatcatcttcaggaacatgaacaaggaggatgaaggagagatcaccaagagcctgcggcggcctgagaccagctaccggcagacaggcctggcccctggccaggagtatgagatcagcctgcacatcgtgaagaacaacacccggggccctggcctgaagagggtgaccaccacccggctggatgcccccagccagatcgaggtgaaggatgtgacagacaccacagccctgatcacctggttcaagcccctggccgagattgatggcatcgagctgacctacggcatcaaggatgtgcctggggacaggaccaccatcgacctgacagaagatgagaaccagtacagcatcggcaacctgaagccagacacagaatatgaggtgtccctcatcagccggcggggggacatgagcagcaacccagccaaggagaccttcaccaccggcctggatgcccccaggaacctgcggcgggtgtcccagacagacaacagcatcaccctggagtggagaaatggcaaggccgccatcgacagctaccgcatcaagtatgcccccatctctggaggagaccacgccgaggtggatgtgcccaagagccagcaggccaccaccaagaccaccctgaccggcctgcggcctggaacagaatatggaattggagtgtctgctgtgaaggaggacaaggagagcaacccagccaccatcaatgctgccacagagctggacacccccaaggacctgcaggtgtctgaaacagctgagaccagcctgaccctgctgtggaagacccccctggccaagtttgaccgctaccgcctgaactacagcctgcccaccggccagtgggtgggcgtgcagctgcccaggaacaccaccagctatgtgctgcggggcctggagcccggccaggagtacaacgtgctgctgacagctgagaagggccgccacaagagcaagccagcccgggtgaaggccagcacagaagctgagcctgaggtggacaacctgctggtgtctgatgccaccccagatggcttccggctgtcctggacagcagatgaaggagtgtttgacaactttgtgctgaagatccgggacaccaagaagcagagcgagcccctggagatcaccctgctggcccctgagaggacccgggacatcaccggcctgcgggaggccacagaatatgaaattgagctgtatggcatcagcaaaggaagaagaagccagacagtgtctgccatcgccaccacagccatgggcagccccaaggaggtgatcttcagtgacatcacagaaaattctgccaccgtgtcctggagggcccccacagcccaggtggagagcttccgcatcacctacgtgcccatcaccggcggcacccccagcatggtgacagtggatggcaccaagacccagacccggctggtgaagctgatccctggggtggagtacctggtgtccatcatcgccatgaagggctttgaggagagcgagcctgtgtctggcagcttcaccacagccctggatggccccagcggcctggtgacagccaacatcacagattctgaggccctggcccgctggcagcctgccatcgccaccgtggacagctatgtgatctcctacaccggggagaaggtgcctgagatcaccaggacagtgtctggcaacacagtggagtatgccctgacagacctggagcccgccacagagtacaccctgcgcatctttgctgagaagggcccccagaagagcagcaccatcacagccaagttcaccacagacctggacagcccccgggacctgacagccacagaggtgcagagcgagacagccctgctgacctggaggcctccccgggcctctgtgacaggctacctgctggtgtatgaatctgtggatggcaccgtgaaggaggtgattgtgggccctgacaccaccagctacagcctggccgacctgagccccagcacccactacacagccaagatccaggccctgaatggccccctgcggagcaacatgatccagaccatcttcaccaccatcggcctgctgtaccccttccccaaggactgcagccaggccatgctgaatggagacaccaccagcggcctgtacaccatctacctgaatggagacaaggccgaggccctggaggtgttctgtgacatgaccagtgatggcggcggctggatcgtgttcctgcggaggaagaatggccgggagaacttctaccagaactggaaggcctatgctgctggctttggagaccggcgggaggagttctggctgggcctggacaacctgaacaagatcacagcccagggccagtatgagctgcgggtggacctgcgggaccatggagaaacagcctttgctgtgtatgacaagttctctgtgggagatgccaagacccgctacaagctgaaggtggagggctacagcggcacagctggggacagcatggcctaccacaacggccgctccttcagcacctttgacaaggacacagattctgccatcaccaactgtgccctgagctacaagggggccttctggtacagaaactgccaccgggtgaacctgatgggccgctacggggacaacaaccacagccagggcgtgaactggttccactggaagggccacgagcacagcatccagtttgctgagatgaagctgcggcccagcaacttcaggaacctggagggccgcaggaagagggcctag

SEQ ID NO: 172911 - DNA, 6606 bp, synthetic construct
  misc_feature 1..6606: note = Description of Artificial Sequence: Synthetic coding sequence
  source 1..6606: mol_type = other DNA
atgggcgccatgacccagctgctggccggggtcttcctggccttcctggccctggccacagagggcggcgtgctgaagaaggtgatccgccacaagaggcagagcggcgtgaatgccaccctgcctgaggagaaccagcctgtggtgttcaaccacgtgtacaacatcaagctgcctgtgggcagccagtgcagcgtggacctggagagcgccagcggggagaaggacctggcccctccttctgagcccagcgagagcttccaggagcacacagtggatggagagaaccagatcgtgttcacccaccgcatcaacatcccccggcgggcctgtggctgtgccgccgccccagatgtgaaggagctgctgagccggctggaggagctggagaacctggtgagcagcctgcgggagcagtgcacagctggggccggctgctgcctgcagcctgccaccggccgcctggacacccggcccttctgcagcggccggggcaacttcagcacagagggctgcggctgtgtgtgtgagcccggctggaagggccccaactgcagcgagccagaatgtcctggcaactgccacctgcggggccgctgcattgatggccagtgcatctgtgatgatggcttcaccggggaggactgcagccagctggcctgccccagcgactgcaatgaccagggcaaatgtgtgaatggagtgtgcatctgctttgagggctacgccggggctgactgcagccgggagatctgccctgtgccctgcagcgaggagcacggcacctgtgtggatggcctgtgtgtgtgccatgatggctttgctggagatgactgcaacaagcccctgtgcctgaacaactgctacaacagaggccgctgtgtggagaatgaatgtgtgtgtgatgagggcttcaccggggaggactgcagcgagctgatctgccccaatgactgctttgaccggggccgctgcatcaatggcacctgctactgtgaggagggcttcaccggggaggactgtgggaagcccacctgcccccacgcctgccacacccagggccgctgtgaggagggccagtgtgtgtgtgatgagggctttgctggggtggactgcagcgagaagcgctgcccagctgactgccacaacagaggccgctgtgtggatggccgctgtgaatgtgatgatggcttcaccggggctgactgtggggagctgaagtgccccaacggctgcagcggccacggccgctgtgtgaatggccagtgtgtgtgtgatgagggctacaccggggaggactgcagccagctgcgctgccccaatgactgccacagccggggccgctgtgtggagggcaaatgtgtgtgtgagcagggcttcaagggctatgactgcagcgacatgagctgccccaatgactgccaccagcacggccgctgtgtgaatggcatgtgtgtgtgtgatgatggctacaccggggaggactgccgggaccggcagtgcccccgggactgcagcaacagaggcctgtgtgtggatggccagtgtgtgtgtgaagatggcttcaccggccctgactgtgccgagctgagctgccccaatgactgccacggccagggccgctgtgtgaatggccagtgtgtgtgccacgagggcttcatgggcaaggactgcaaggagcagcgctgccccagcgactgccacggccagggccgctgtgtggatggccagtgcatctgccacgagggcttcaccggcctggactgtggccagcacagctgccccagcgactgcaacaacctgggccagtgtgtgtctggccgctgcatctgcaatgaaggctacagcggggaggactgcagcgaggtgtccccacccaaggacctggtggtgacagaggtgacagaggagaccgtgaacctggcctgggacaatgagatgagggtgacagagtacctggtggtgtacacccccacccatgagggcggcctggagatgcagttccgggtgcctggggaccagaccagcaccatcatccaggagctggagcccggggtggagtacttcatccgggtgtttgccatcctggagaacaagaagagcatccctgtgtctgcccgggtggccacctacctgcctgcccctgagggcctgaagttcaagagcatcaaggagacctctgtggaggtggagtgggaccccctggacatcgcctttgagacctgggagatcatcttcaggaacatgaacaaggaggatgaaggagagatcaccaagagcctgcggcggcctgagaccagctaccggcagacaggcctggcccctggccaggagtatgagatcagcctgcacatcgtgaagaacaacacccggggccctggcctgaagagggtgaccaccacccggctggatgcccccagccagatcgaggtgaaggatgtgacagacaccacagccctgatcacctggttcaagcccctggccgagattgatggcatcgagctgacctacggcatcaaggatgtgcctggggacaggaccaccatcgacctgacagaagatgagaaccagtacagcatcggcaacctgaagccagacacagaatatgaggtgtccctcatcagccggcggggggacatgagcagcaacccagccaaggagaccttcaccaccggcctggatgcccccaggaacctgcggcgggtgtcccagacagacaacagcatcaccctggagtggagaaatggcaaggccgccatcgacagctaccgcatcaagtatgcccccatctctggaggagaccacgccgaggtggatgtgcccaagagccagcaggccaccaccaagaccaccctgaccggcctgcggcctggaacagaatatggaattggagtgtctgctgtgaaggaggacaaggagagcaacccagccaccatcaatgctgccacagagctggacacccccaaggacctgcaggtgtctgaaacagctgagaccagcctgaccctgctgtggaagacccccctggccaagtttgaccgctaccgcctgaactacagcctgcccaccggccagtgggtgggcgtgcagctgcccaggaacaccaccagctatgtgctgcggggcctggagcccggccaggagtacaacgtgctgctgacagctgagaagggccgccacaagagcaagccagcccgggtgaaggccagcacagagcaggcccctgagctggagaacctgactgtgacagaggtgggctgggatggcctgcggctgaactggacagctgctgaccaggcctatgagcacttcatcatccaggtgcaggaggccaacaaggtggaggccgccaggaacctgactgtgcccggcagcctgcgggctgtggacatccctggcctgaaggccgccaccccctacacagtgtccatctatggagtcatccagggctaccgcacccctgtgctgtctgctgaggccagcactggagagacccccaacctgggggaggtggtggtggccgaggtgggctgggatgccctgaagctgaactggacagcccctgagggcgcctatgagtacttcttcatccaggtgcaggaggccgacacagtggaggccgcccagaacctgactgtgcctgggggcctgcggagcacagacctgcccggcctgaaggccgccacccactacaccatcaccatccggggcgtgacccaggacttcagcaccacccccctgtctgtggaggtgctgacagaggaggtgcctgacatgggcaacctgactgtgacagaggtgtcctgggatgccctgcggctgaactggaccaccccagatggcacctatgaccagttcaccatccaggtgcaggaggccgaccaggtggaggaggcccacaacctgactgtgcccggcagcctgcgctccatggagatccctggcctgcgggccggcaccccctacacagtgaccctgcatggagaggtgcggggccacagcacccggcccctggccgtggaggtggtgacagaggacctgccccagctgggggacctggccgtgtctgaggtgggctgggatggcctgcggctgaactggacagctgctgacaatgcctatgagcactttgtgatccaggtgcaggaggtgaacaaggtggaggccgcccagaacctgaccctgcccggcagcctgcgggctgtggacatccctggcctggaggccgccaccccctacagagtgtccatctacggcgtcatccggggctaccgcacccctgtgctgtctgctgaggccagcacagccaaggagcctgagatcggcaacctgaatgtgtctgacatcaccccagagagcttcaacctgtcctggatggccacagatggcatctttgagaccttcaccatcgagatcatcgacagcaaccggctgctggagaccgtggagtacaacatctctggagctgagaggacagcccacatcagcggcctgccccccagcacagacttcatcgtgtacctgagcggcctggcccccagcatccgcaccaagaccatcagcgccacagccaccacagaggccctgcccctgctggagaacctgaccatcagtgacatcaacccctacggcttcaccgtgtcctggatggcctctgaaaatgcctttgacagcttcctggtgacagtggtggacagcggcaagctgctggacccccaggagttcaccctgagcggcacccagaggaagctggagctgcggggcctcatcactggaattggctatgaggtgatggtgtctggcttcacccagggccaccagaccaagcccctgcgggcagaaattgtgacagaagctgagcctgaggtggacaacctgctggtgtctgatgccaccccagatggcttccggctgtcctggacagcagatgaaggagtgtttgacaactttgtgctgaagatccgggacaccaagaagcagagcgagcccctggagatcaccctgctggcccctgagaggacccgggacatcaccggcctgcgggaggccacagaatatgaaattgagctgtatggcatcagcaaaggaagaagaagccagacagtgtctgccatcgccaccacagccatgggcagccccaaggaggtgatcttcagtgacatcacagaaaattctgccaccgtgtcctggagggcccccacagcccaggtggagagcttccgcatcacctacgtgcccatcaccggcggcacccccagcatggtgacagtggatggcaccaagacccagacccggctggtgaagctgatccctggggtggagtacctggtgtccatcatcgccatgaagggctttgaggagagcgagcctgtgtctggcagcttcaccacagccctggatggccccagcggcctggtgacagccaacatcacagattctgaggccctggcccgctggcagcctgccatcgccaccgtggacagctatgtgatctcctacaccggggagaaggtgcctgagatcaccaggacagtgtctggcaacacagtggagtatgccctgacagacctggagcccgccacagagtacaccctgcgcatctttgctgagaagggcccccagaagagcagcaccatcacagccaagttcaccacagacctggacagcccccgggacctgacagccacagaggtgcagagcgagacagccctgctgacctggaggcctccccgggcctctgtgacaggctacctgctggtgtatgaatctgtggatggcaccgtgaaggaggtgattgtgggccctgacaccaccagctacagcctggccgacctgagccccagcacccactacacagccaagatccaggccctgaatggccccctgcggagcaacatgatccagaccatcttcaccaccatcggcctgctgtaccccttccccaaggactgcagccaggccatgctgaatggagacaccaccagcggcctgtacaccatctacctgaatggagacaaggccgaggccctggaggtgttctgtgacatgaccagtgatggcggcggctggatcgtgttcctgcggaggaagaatggccgggagaacttctaccagaactggaaggcctatgctgctggctttggagaccggcgggaggagttctggctgggcctggacaacctgaacaagatcacagcccagggccagtatgagctgcgggtggacctgcgggaccatggagaaacagcctttgctgtgtatgacaagttctctgtgggagatgccaagacccgctacaagctgaaggtggagggctacagcggcacagctggggacagcatggcctaccacaacggccgctccttcagcacctttgacaaggacacagattctgccatcaccaactgtgccctgagctacaagggggccttctggtacagaaactgccaccgggtgaacctgatgggccgctacggggacaacaaccacagccagggcgtgaactggttccactggaagggccacgagcacagcatccagtttgctgagatgaagctgcggcccagcaacttcaggaacctggagggccgcaggaagagggcctag

SEQ ID NO: 172912 - DNA, 3240 bp, synthetic construct
  misc_feature 1..3240: note = Description of Artificial Sequence: Synthetic coding sequence
  source 1..3240: mol_type = other DNA
atgggcgccatgacccagctgctggccggggtcttcctggccttcctggccctggccacagagggcggcgtgctgaagaaggtgatccgccacaagaggcagagcggcgtgaatgccaccctgcctgaggagaaccagcctgtggtgttcaaccacgtgtacaacatcaagctgcctgtgggcagccagtgcagcgtggacctggagagcgccagcggggagaaggacctggcccctccttctgagcccagcgagagcttccaggagcacacagtggatggagagaaccagatcgtgttcacccaccgcatcaacatcccccggcgggcctgtggctgtgccgccgccccagatgtgaaggagctgctgagccggctggaggagctggagaacctggtgagcagcctgcgggagcagtgcacagctggggccggctgctgcctgcagcctgccaccggccgcctggacacccggcccttctgcagcggccggggcaacttcagcacagagggctgcggctgtgtgtgtgagcccggctggaagggccccaactgcagcgagccagaatgtcctggcaactgccacctgcggggccgctgcattgatggccagtgcatctgtgatgatggcttcaccggggaggactgcagccagctggcctgccccagcgactgcaatgaccagggcaaatgtgtgaatggagtgtgcatctgctttgagggctacgccggggctgactgcagccgggagatctgccctgtgccctgcagcgaggagcacggcacctgtgtggatggcctgtgtgtgtgccatgatggctttgctggagatgactgcaacaagcccctgtgcctgaacaactgctacaacagaggccgctgtgtggagaatgaatgtgtgtgtgatgagggcttcaccggggaggactgcagcgagctgatctgccccaatgactgctttgaccggggccgctgcatcaatggcacctgctactgtgaggagggcttcaccggggaggactgtgggaagcccacctgcccccacgcctgccacacccagggccgctgtgaggagggccagtgtgtgtgtgatgagggctttgctggggtggactgcagcgagaagcgctgcccagctgactgccacaacagaggccgctgtgtggatggccgctgtgaatgtgatgatggcttcaccggggctgactgtggggagctgaagtgccccaacggctgcagcggccacggccgctgtgtgaatggccagtgtgtgtgtgatgagggctacaccggggaggactgcagccagctgcgctgccccaatgactgccacagccggggccgctgtgtggagggcaaatgtgtgtgtgagcagggcttcaagggctatgactgcagcgacatgagctgccccaatgactgccaccagcacggccgctgtgtgaatggcatgtgtgtgtgtgatgatggctacaccggggaggactgccgggaccggcagtgcccccgggactgcagcaacagaggcctgtgtgtggatggccagtgtgtgtgtgaagatggcttcaccggccctgactgtgccgagctgagctgccccaatgactgccacggccagggccgctgtgtgaatggccagtgtgtgtgccacgagggcttcatgggcaaggactgcaaggagcagcgctgccccagcgactgccacggccagggccgctgtgtggatggccagtgcatctgccacgagggcttcaccggcctggactgtggccagcacagctgccccagcgactgcaacaacctgggccagtgtgtgtctggccgctgcatctgcaatgaaggctacagcggggaggactgcagcgaggtgtccccacccaaggacctggtggtgacagaggtgacagaggagaccgtgaacctggcctgggacaatgagatgagggtgacagagtacctggtggtgtacacccccacccatgagggcggcctggagatgcagttccgggtgcctggggaccagaccagcaccatcatccaggagctggagcccggggtggagtacttcatccgggtgtttgccatcctggagaacaagaagagcatccctgtgtctgcccgggtggccacctacctgcctgcccctgagggcctgaagttcaagagcatcaaggagacctctgtggaggtggagtgggaccccctggacatcgcctttgagacctgggagatcatcttcaggaacatgaacaaggaggatgaaggagagatcaccaagagcctgcggcggcctgagaccagctaccggcagacaggcctggcccctggccaggagtatgagatcagcctgcacatcgtgaagaacaacacccggggccctggcctgaagagggtgaccaccacccggctggatgcccccagccagatcgaggtgaaggatgtgacagacaccacagccctgatcacctggttcaagcccctggccgagattgatggcatcgagctgacctacggcatcaaggatgtgcctggggacaggaccaccatcgacctgacagaagatgagaaccagtacagcatcggcaacctgaagccagacacagaatatgaggtgtccctcatcagccggcggggggacatgagcagcaacccagccaaggagaccttcaccaccggcctggatgcccccaggaacctgcggcgggtgtcccagacagacaacagcatcaccctggagtggagaaatggcaaggccgccatcgacagctaccgcatcaagtatgcccccatctctggaggagaccacgccgaggtggatgtgcccaagagccagcaggccaccaccaagaccatcacagccaagttcaccacagacctggacagcccccgggacctgacagccacagaggtgcagagcgagacagccctgctgacctggaggcctccccgggcctctgtgacaggctacctgctggtgtatgaatctgtggatggcaccgtgaaggaggtgattgtgggccctgacaccaccagctacagcctggccgacctgagcccccccagcctcttcctgcacttcatccagcagaagccagagaagcagtactgcttccacttcaaggacatgatcaacatcatcaacatcatcatgatgatgatgatgatgaagaccaaggacttcagccgggacctgtccttccagaacatcagcggccagtacctgattgtgttcttcttctag

SEQ ID NO: 172913 - DNA, 279 bp, synthetic construct
  misc_feature 1..279: note = Description of Artificial Sequence: Synthetic coding sequence
  source 1..279: mol_type = other DNA
atgggcgccatgacccagctgctggccggggtcttcctggccttcctggccctggccacagagggcggcgtgctgaagaaggtgatccgccacaagaggcagagcggcgtgaatgccaccctgcctgaggagaaccagcctgtggtgttcaaccacgtgtacaacatcaagctgcctgtgggcagccagtgcagcgtggacctggagagcgccagcggggagaaggacctggcccctccttctgagcccagcgagagcttccaggagcacacagtgtag

SEQ ID NO: 172914 - DNA, 5241 bp, synthetic construct
  misc_feature 1..5241: note = Description of Artificial Sequence: Synthetic coding sequence
  source 1..5241: mol_type = other DNA
atgggcgccatgacccagctgctggccggggtcttcctggccttcctggccctggccacagagggcggcgtgctgaagaaggtgatccgccacaagaggcagagcggcgtgaatgccaccctgcctgaggagaaccagcctgtggtgttcaaccacgtgtacaacatcaagctgcctgtgggcagccagtgcagcgtggacctggagagcgccagcggggagaaggacctggcccctccttctgagcccagcgagagcttccaggagcacacagtggatggagagaaccagatcgtgttcacccaccgcatcaacatcccccggcgggcctgtggctgtgccgccgccccagatgtgaaggagctgctgagccggctggaggagctggagaacctggtgagcagcctgcgggagcagtgcacagctggggccggctgctgcctgcagcctgccaccggccgcctggacacccggcccttctgcagcggccggggcaacttcagcacagagggctgcggctgtgtgtgtgagcccggctggaagggccccaactgcagcgagccagaatgtcctggcaactgccacctgcggggccgctgcattgatggccagtgcatctgtgatgatggcttcaccggggaggactgcagccagctggcctgccccagcgactgcaatgaccagggcaaatgtgtgaatggagtgtgcatctgctttgagggctacgccggggctgactgcagccgggagatctgccctgtgccctgcagcgaggagcacggcacctgtgtggatggcctgtgtgtgtgccatgatggctttgctggagatgactgcaacaagcccctgtgcctgaacaactgctacaacagaggccgctgtgtggagaatgaatgtgtgtgtgatgagggcttcaccggggaggactgcagcgagctgatctgccccaatgactgctttgaccggggccgctgcatcaatggcacctgctactgtgaggagggcttcaccggggaggactgtgggaagcccacctgcccccacgcctgccacacccagggccgctgtgaggagggccagtgtgtgtgtgatgagggctttgctggggtggactgcagcgagaagcgctgcccagctgactgccacaacagaggccgctgtgtggatggccgctgtgaatgtgatgatggcttcaccggggctgactgtggggagctgaagtgccccaacggctgcagcggccacggccgctgtgtgaatggccagtgtgtgtgtgatgagggctacaccggggaggactgcagccagctgcgctgccccaatgactgccacagccggggccgctgtgtggagggcaaatgtgtgtgtgagcagggcttcaagggctatgactgcagcgacatgagctgccccaatgactgccaccagcacggccgctgtgtgaatggcatgtgtgtgtgtgatgatggctacaccggggaggactgccgggaccggcagtgcccccgggactgcagcaacagaggcctgtgtgtggatggccagtgtgtgtgtgaagatggcttcaccggccctgactgtgccgagctgagctgccccaatgactgccacggccagggccgctgtgtgaatggccagtgtgtgtgccacgagggcttcatgggcaaggactgcaaggagcagcgctgccccagcgactgccacggccagggccgctgtgtggatggccagtgcatctgccacgagggcttcaccggcctggactgtggccagcacagctgccccagcgactgcaacaacctgggccagtgtgtgtctggccgctgcatctgcaatgaaggctacagcggggaggactgcagcgaggtgtccccacccaaggacctggtggtgacagaggtgacagaggagaccgtgaacctggcctgggacaatgagatgagggtgacagagtacctggtggtgtacacccccacccatgagggcggcctggagatgcagttccgggtgcctggggaccagaccagcaccatcatccaggagctggagcccggggtggagtacttcatccgggtgtttgccatcctggagaacaagaagagcatccctgtgtctgcccgggtggccacctacctgcctgcccctgagggcctgaagttcaagagcatcaaggagacctctgtggaggtggagtgggaccccctggacatcgcctttgagacctgggagatcatcttcaggaacatgaacaaggaggatgaaggagagatcaccaagagcctgcggcggcctgagaccagctaccggcagacaggcctggcccctggccaggagtatgagatcagcctgcacatcgtgaagaacaacacccggggccctggcctgaagagggtgaccaccacccggctggatgcccccagccagatcgaggtgaaggatgtgacagacaccacagccctgatcacctggttcaagcccctggccgagattgatggcatcgagctgacctacggcatcaaggatgtgcctggggacaggaccaccatcgacctgacagaagatgagaaccagtacagcatcggcaacctgaagccagacacagaatatgaggtgtccctcatcagccggcggggggacatgagcagcaacccagccaaggagaccttcaccaccggcctggatgcccccaggaacctgcggcgggtgtcccagacagacaacagcatcaccctggagtggagaaatggcaaggccgccatcgacagctaccgcatcaagtatgcccccatctctggaggagaccacgccgaggtggatgtgcccaagagccagcaggccaccaccaagaccaccctgaccggcctgcggcctggaacagaatatggaattggagtgtctgctgtgaaggaggacaaggagagcaacccagccaccatcaatgctgccacagagctggacacccccaaggacctgcaggtgtctgaaacagctgagaccagcctgaccctgctgtggaagacccccctggccaagtttgaccgctaccgcctgaactacagcctgcccaccggccagtgggtgggcgtgcagctgcccaggaacaccaccagctatgtgctgcggggcctggagcccggccaggagtacaacgtgctgctgacagctgagaagggccgccacaagagcaagccagcccgggtgaaggccagcacagccaaggagcctgagatcggcaacctgaatgtgtctgacatcaccccagagagcttcaacctgtcctggatggccacagatggcatctttgagaccttcaccatcgagatcatcgacagcaaccggctgctggagaccgtggagtacaacatctctggagctgagaggacagcccacatcagcggcctgccccccagcacagacttcatcgtgtacctgagcggcctggcccccagcatccgcaccaagaccatcagcgccacagccaccacagaggccgagcctgaggtggacaacctgctggtgtctgatgccaccccagatggcttccggctgtcctggacagcagatgagggcgtgtttgacaactttgtgctgaagatccgggacaccaagaagcagagcgagcccctggagatcaccctgctggcccctgagaggacccgggacatcaccggcctgcgggaggccacagaatatgaaattgagctgtatggcatcagcaagggccgccgcagccagacagtgtctgccatcgccaccacagccatgggcagccccaaggaggtgatcttcagtgacatcacagagaacagcgccaccgtgtcctggagggcccccacagcccaggtggagagcttccgcatcacctacgtgcccatcactggaggcacccccagcatggtgacagtggatggcaccaagacccagacccggctggtgaagctgatccctggggtggagtacctggtgtccatcatcgccatgaagggctttgaggagagcgagcctgtgtctggcagcttcaccacagccctggatggccccagcggcctggtgacagccaacatcacagacagcgaggccctggcccgctggcagcctgccatcgccaccgtggacagctatgtgatctcctacacaggagagaaggtgcctgagatcaccaggacagtgtctggcaacacagtggagtatgccctgacagacctggagcccgccacagagtacaccctgcgcatctttgctgagaagggcccccagaagagcagcaccatcacagccaagttcaccacagacctggacagcccccgggacctgacagccacagaggtgcagagcgagacagccctgctgacctggaggcctccccgggcctctgtgacaggctacctgctggtgtatgagagcgtggatggcaccgtgaaggaggtgattgtgggccctgacaccaccagctacagcctggccgacctgagccccagcacccactacacagccaagatccaggccctgaatggccccctgcggagcaacatgatccagaccatcttcaccaccatcggcctgctgtaccccttccccaaggactgcagccaggccatgctgaatggagacaccaccagcggcctgtacaccatctacctgaatggagacaaggccgaggccctggaggtgttctgtgacatgaccagtgatggcggcggctggatcgtgttcctgcggaggaagaatggaagagagaacttctaccagaactggaaggcctatgctgctggctttggagacagaagagaggagttctggctgggcctggacaacctgaacaagatcacagcccagggccagtatgagctgcgggtggacctgcgggaccacggggagacagcctttgctgtgtatgacaagttctctgtgggagatgccaagacccgctacaagctgaaggtggagggctacagcggcacagctggggacagcatggcctaccacaacggccgctccttcagcacctttgacaaggacacagacagcgccatcaccaactgtgccctgagctacaagggggccttctggtacagaaactgccaccgggtgaacctgatgggccgctatggagacaacaaccacagccagggcgtgaactggttccactggaagggccacgagcacagcatccagtttgctgagatgaagctgcggcccagcaacttcaggaacctggagggccgcaggaagagggcctag

SEQ ID NO: 172915 - DNA, 5517 bp, synthetic construct
  misc_feature 1..5517: note = Description of Artificial Sequence: Synthetic coding sequence
  source 1..5517: mol_type = other DNA
atgggcgccatgacccagctgctggccggggtcttcctggccttcctggccctggccacagagggcggcgtgctgaagaaggtgatccgccacaagaggcagagcggcgtgaatgccaccctgcctgaggagaaccagcctgtggtgttcaaccacgtgtacaacatcaagctgcctgtgggcagccagtgcagcgtggacctggagagcgccagcggggagaaggacctggcccctccttctgagcccagcgagagcttccaggagcacacagtggatggagagaaccagatcgtgttcacccaccgcatcaacatcccccggcgggcctgtggctgtgccgccgccccagatgtgaaggagctgctgagccggctggaggagctggagaacctggtgagcagcctgcgggagcagtgcacagctggggccggctgctgcctgcagcctgccaccggccgcctggacacccggcccttctgcagcggccggggcaacttcagcacagagggctgcggctgtgtgtgtgagcccggctggaagggccccaactgcagcgagccagaatgtcctggcaactgccacctgcggggccgctgcattgatggccagtgcatctgtgatgatggcttcaccggggaggactgcagccagctggcctgccccagcgactgcaatgaccagggcaaatgtgtgaatggagtgtgcatctgctttgagggctacgccggggctgactgcagccgggagatctgccctgtgccctgcagcgaggagcacggcacctgtgtggatggcctgtgtgtgtgccatgatggctttgctggagatgactgcaacaagcccctgtgcctgaacaactgctacaacagaggccgctgtgtggagaatgaatgtgtgtgtgatgagggcttcaccggggaggactgcagcgagctgatctgccccaatgactgctttgaccggggccgctgcatcaatggcacctgctactgtgaggagggcttcaccggggaggactgtgggaagcccacctgcccccacgcctgccacacccagggccgctgtgaggagggccagtgtgtgtgtgatgagggctttgctggggtggactgcagcgagaagcgctgcccagctgactgccacaacagaggccgctgtgtggatggccgctgtgaatgtgatgatggcttcaccggggctgactgtggggagctgaagtgccccaacggctgcagcggccacggccgctgtgtgaatggccagtgtgtgtgtgatgagggctacaccggggaggactgcagccagctgcgctgccccaatgactgccacagccggggccgctgtgtggagggcaaatgtgtgtgtgagcagggcttcaagggctatgactgcagcgacatgagctgccccaatgactgccaccagcacggccgctgtgtgaatggcatgtgtgtgtgtgatgatggctacaccggggaggactgccgggaccggcagtgcccccgggactgcagcaacagaggcctgtgtgtggatggccagtgtgtgtgtgaagatggcttcaccggccctgactgtgccgagctgagctgccccaatgactgccacggccagggccgctgtgtgaatggccagtgtgtgtgccacgagggcttcatgggcaaggactgcaaggagcagcgctgccccagcgactgccacggccagggccgctgtgtggatggccagtgcatctgccacgagggcttcaccggcctggactgtggccagcacagctgccccagcgactgcaacaacctgggccagtgtgtgtctggccgctgcatctgcaatgaaggctacagcggggaggactgcagcgaggtgtccccacccaaggacctggtggtgacagaggtgacagaggagaccgtgaacctggcctgggacaatgagatgagggtgacagagtacctggtggtgtacacccccacccatgagggcggcctggagatgcagttccgggtgcctggggaccagaccagcaccatcatccaggagctggagcccggggtggagtacttcatccgggtgtttgccatcctggagaacaagaagagcatccctgtgtctgcccgggtggccacctacctgcctgcccctgagggcctgaagttcaagagcatcaaggagacctctgtggaggtggagtgggaccccctggacatcgcctttgagacctgggagatcatcttcaggaacatgaacaaggaggatgaaggagagatcaccaagagcctgcggcggcctgagaccagctaccggcagacaggcctggcccctggccaggagtatgagatcagcctgcacatcgtgaagaacaacacccggggccctggcctgaagagggtgaccaccacccggctggatgcccccagccagatcgaggtgaaggatgtgacagacaccacagccctgatcacctggttcaagcccctggccgagattgatggcatcgagctgacctacggcatcaaggatgtgcctggggacaggaccaccatcgacctgacagaagatgagaaccagtacagcatcggcaacctgaagccagacacagaatatgaggtgtccctcatcagccggcggggggacatgagcagcaacccagccaaggagaccttcaccaccggcctggatgcccccaggaacctgcggcgggtgtcccagacagacaacagcatcaccctggagtggagaaatggcaaggccgccatcgacagctaccgcatcaagtatgcccccatctctggaggagaccacgccgaggtggatgtgcccaagagccagcaggccaccaccaagaccaccctgaccggcctgcggcctggaacagaatatggaattggagtgtctgctgtgaaggaggacaaggagagcaacccagccaccatcaatgctgccacagagctggacacccccaaggacctgcaggtgtctgaaacagctgagaccagcctgaccctgctgtggaagacccccctggccaagtttgaccgctaccgcctgaactacagcctgcccaccggccagtgggtgggcgtgcagctgcccaggaacaccaccagctatgtgctgcggggcctggagcccggccaggagtacaacgtgctgctgacagctgagaagggccgccacaagagcaagccagcccgggtgaaggccagcacagccaaggagcctgagatcggcaacctgaatgtgtctgacatcaccccagagagcttcaacctgtcctggatggccacagatggcatctttgagaccttcaccatcgagatcatcgacagcaaccggctgctggagaccgtggagtacaacatctctggagctgagaggacagcccacatcagcggcctgccccccagcacagacttcatcgtgtacctgagcggcctggcccccagcatccgcaccaagaccatcagcgccacagccaccacagagcccaagccccagctgggcaccctcatcttcagcaacatcacccccaagagcttcaacatgtcctggaccacccaggccggcctgtttgccaagatcgtcatcaacgtgtctgatgcccacagcctgcacgagagccagcagttcaccgtgtctggagatgccaagcaggcccacatcaccggcctggtggagaacacaggctatgatgtgtctgtggccggcaccaccctggccggggaccccacccggcccctgacagcctttgtgatcacagaggccgagcctgaggtggacaacctgctggtgtctgatgccaccccagatggcttccggctgtcctggacagcagatgagggcgtgtttgacaactttgtgctgaagatccgggacaccaagaagcagagcgagcccctggagatcaccctgctggcccctgagaggacccgggacatcaccggcctgcgggaggccacagaatatgaaattgagctgtatggcatcagcaagggccgccgcagccagacagtgtctgccatcgccaccacagccatgggcagccccaaggaggtgatcttcagtgacatcacagagaacagcgccaccgtgtcctggagggcccccacagcccaggtggagagcttccgcatcacctacgtgcccatcactggaggcacccccagcatggtgacagtggatggcaccaagacccagacccggctggtgaagctgatccctggggtggagtacctggtgtccatcatcgccatgaagggctttgaggagagcgagcctgtgtctggcagcttcaccacagccctggatggccccagcggcctggtgacagccaacatcacagacagcgaggccctggcccgctggcagcctgccatcgccaccgtggacagctatgtgatctcctacacaggagagaaggtgcctgagatcaccaggacagtgtctggcaacacagtggagtatgccctgacagacctggagcccgccacagagtacaccctgcgcatctttgctgagaagggcccccagaagagcagcaccatcacagccaagttcaccacagacctggacagcccccgggacctgacagccacagaggtgcagagcgagacagccctgctgacctggaggcctccccgggcctctgtgacaggctacctgctggtgtatgagagcgtggatggcaccgtgaaggaggtgattgtgggccctgacaccaccagctacagcctggccgacctgagccccagcacccactacacagccaagatccaggccctgaatggccccctgcggagcaacatgatccagaccatcttcaccaccatcggcctgctgtaccccttccccaaggactgcagccaggccatgctgaatggagacaccaccagcggcctgtacaccatctacctgaatggagacaaggccgaggccctggaggtgttctgtgacatgaccagtgatggcggcggctggatcgtgttcctgcggaggaagaatggaagagagaacttctaccagaactggaaggcctatgctgctggctttggagacagaagagaggagttctggctgggcctggacaacctgaacaagatcacagcccagggccagtatgagctgcgggtggacctgcgggaccacggggagacagcctttgctgtgtatgacaagttctctgtgggagatgccaagacccgctacaagctgaaggtggagggctacagcggcacagctggggacagcatggcctaccacaacggccgctccttcagcacctttgacaaggacacagacagcgccatcaccaactgtgccctgagctacaagggggccttctggtacagaaactgccaccgggtgaacctgatgggccgctatggagacaacaaccacagccagggcgtgaactggttccactggaagggccacgagcacagcatccagtttgctgagatgaagctgcggcccagcaacttcaggaacctggagggccgcaggaagagggcctag

SEQ ID NO: 172916 - DNA, 4077 bp, synthetic construct
  misc_feature 1..4077: note = Description of Artificial Sequence: Synthetic coding sequence
  source 1..4077: mol_type = other DNA
atgggcgcagatggagaaacagtggtgctgaagaacatgctgattggcatcaacctgatcctgctgggctccatgatcaagcccagcgagtgccagctggaggtgaccacagagcgggtgcagaggcagagcgtggaggaggagggcggcatcgccaactacaacaccagcagcaaggagcagcctgtggtgttcaaccacgtgtacaacatcaacgtgcccctggacaacctgtgcagcagcggcctggaggccagcgctgagcaggaggtgtctgcagaagatgagaccctggccgagtacatgggccagaccagtgaccacgagagccaggtgaccttcacccaccgcatcaacttccccaagaaggcctgcccctgtgccagcagcgcccaggtgctgcaggagctgctgagcagaattgagatgctggagcgggaggtgtctgtgctgcgggaccagtgcaatgccaactgctgccaggagagcgctgccaccggccagctggactacatcccccactgcagcggccacggcaacttctcctttgagagctgtggctgcatctgcaatgaaggctggtttgggaagaactgcagcgagccctactgccccctgggctgcagcagccggggcgtgtgtgtggatggccagtgcatctgtgacagcgagtacagcggagatgactgcagcgagctgcgctgccccacagactgcagcagccggggcctgtgtgtggatggagaatgtgtgtgtgaggagccctacacaggagaggactgccgggagctgcgctgccctggggactgcagcggcaagggccgctgtgccaacggcacctgcctgtgtgaggagggctacgtgggggaggactgtggccagaggcagtgcctgaatgcctgcagcggccggggccagtgtgaggagggcctgtgtgtgtgtgaggagggctaccagggccctgactgcagcgctgtggcccctcctgaggacctgcgggtggccggcatcagtgacaggagcattgagctggagtgggatggccccatggctgtgacagaatatgtgatctcctaccagcccacagccctgggcggcctgcagctgcagcagagggtgcctggggactggagcggcgtgaccatcacagagctggagcccggcctgacctacaacatctctgtgtatgctgtgatcagcaacatcctgagcctgcccatcacagccaaggtggccacccacctgagcaccccccagggcctgcagttcaagaccatcacagagaccaccgtggaggtgcagtgggagcccttctccttctcctttgatggctgggagatctccttcatccccaagaacaatgaaggaggagtgattgcccaggtgcccagtgatgtgaccagcttcaaccagacaggcctgaagccaggagaggagtacatcgtgaatgtggtggccctgaaggagcaggcccggagcccccccaccagcgcctctgtgtccacagtgattgatggccccacccagatcctggtgagagatgtgtctgacacagtggcctttgtggagtggatccccccccgggccaaggtggacttcatcctgctgaagtatggcctggtgggcggggagggcggccgcaccaccttccggctgcagccccccctgagccagtacagcgtgcaggccctgcggcccggcagccgctatgaggtgtctgtgtctgctgtgcggggcaccaatgaaagtgacagcgccaccacccagttcaccacagaaattgatgcccccaagaacctgcgggtgggcagcaggacagccaccagcctggacctggagtgggacaacagcgaggccgaggtgcaggagtacaaggtggtgtacagcaccctggccggggagcagtaccacgaggtgctggtgccccggggcatcggccccaccacccgggccaccctgacagacctggtgcccggcacagaatatggagtgggcatctctgctgtgatgaacagccagcagagcgtgcctgccaccatgaatgccaggacagagctggacagcccccgggacctgatggtgacagccagcagcgagaccagcatcagcctcatctggaccaaggccagcggccccatcgaccactaccgcatcaccttcacccccagcagcggcatcgccagcgaggtgacagtgcccaaggacaggaccagctacaccctgacagacctggagcccggggctgagtacatcatctctgtgacagctgagcggggccggcagcagagcctggagagcacagtggatgccttcaccggcttccggcccatcagccacctgcacttcagccacgtgaccagcagctctgtgaacatcacctggagcgaccccagccccccagctgacaggctcatcctgaactacagccccagagatgaggaggaggagatgatggaggtgtccctggatgccaccaagagacatgctgtgctgatgggcctgcagcctgccacagagtacatcgtgaacctggtggccgtgcacggcaccgtgaccagcgagcccatcgtgggcagcatcaccaccggcatcgacccccccaaggacatcaccatcagcaatgtgaccaaggacagcgtgatggtgtcctggagcccccctgtggccagctttgactactacagagtgtcctaccggcccacccaggtgggccgcctggacagctctgtggtgcccaacacagtgacagagttcaccatcacccggctgaacccagccacagaatatgagatcagcctgaacagcgtgcggggccgggaggagagcgagcgcatctgcaccctggtgcacacagccatggacaaccctgtggacctgattgccaccaacatcacccccacagaggccctgctgcagtggaaggcccctgtgggggaggtggagaactacgtgattgtgctgacccactttgctgtggccggggagaccatcctggtggatggagtgtctgaggagttccggctggtggacctgctgcccagcacccactacacagccaccatgtatgccaccaacggccccctgaccagcggcaccatcagcaccaacttcagcaccctgctggaccccccagccaacctgacagccagcgaggtgacccggcagagcgccctgatctcctggcagccccccagggctgagattgaaaattatgtgctgacctacaagagcacagatggcagcaggaaggagctgattgtggatgctgaggacacctggatccggctggagggcctgctggagaacacagactacacagtgctgctgcaggccgcccaggacaccacctggagcagcatcaccagcacagccttcaccactggaggccgggtcttcccccacccccaggactgtgcccagcacctgatgaatggagacaccctgtctggagtgtaccccatcttcctgaatggagagctgagccagaagctgcaggtgtactgtgacatgaccacagatggcggcggctggatcgtgttccagaggcggcagaatggccagacagacttcttcaggaagtgggccgactacagagtgggctttggaaatgtggaggatgagttctggctgggcctggacaacatccaccgcatcaccagccagggccgctatgagctgcgggtggacatgagagatggccaggaggccgcctttgccagctatgaccgcttctctgtggaggacagcaggaacctgtacaagctgagaattggcagctacaatggaacagctggggacagcctgagctaccaccagggccggcccttcagcacagaagatcgggacaatgatgtggccgtgaccaactgtgccatgagctacaagggggcctggtggtacaagaactgccacaggaccaacctgaatggcaagtacggggagagccgccacagccagggcatcaactggtaccactggaagggccacgagttcagcatcccctttgtggagatgaagatgaggccctacaaccaccggctgatggccggcaggaagaggcagagcctgcagttctag

SEQ ID NO: 172917 - DNA, 3807 bp, synthetic construct
  misc_feature 1..3807: note = Description of Artificial Sequence: Synthetic coding sequence
  source 1..3807: mol_type = other DNA
atgggcgcagatggagaaacagtggtgctgaagaacatgctgattggcatcaacctgatcctgctgggctccatgatcaagcccagcgagtgccagctggaggtgaccacagagcgggtgcagaggcagagcgtggaggaggagggcggcatcgccaactacaacaccagcagcaaggagcagcctgtggtgttcaaccacgtgtacaacatcaacgtgcccctggacaacctgtgcagcagcggcctggaggccagcgctgagcaggaggtgtctgcagaagatgagaccctggccgagtacatgggccagaccagtgaccacgagagccaggtgaccttcacccaccgcatcaacttccccaagaaggcctgcccctgtgccagcagcgcccaggtgctgcaggagctgctgagcagaattgagatgctggagcgggaggtgtctgtgctgcgggaccagtgcaatgccaactgctgccaggagagcgctgccaccggccagctggactacatcccccactgcagcggccacggcaacttctcctttgagagctgtggctgcatctgcaatgaaggctggtttgggaagaactgcagcgagccctactgccccctgggctgcagcagccggggcgtgtgtgtggatggccagtgcatctgtgacagcgagtacagcggagatgactgcagcgagctgcgctgccccacagactgcagcagccggggcctgtgtgtggatggagaatgtgtgtgtgaggagccctacacaggagaggactgccgggagctgcgctgccctggggactgcagcggcaagggccgctgtgccaacggcacctgcctgtgtgaggagggctacgtgggggaggactgtggccagaggcagtgcctgaatgcctgcagcggccggggccagtgtgaggagggcctgtgtgtgtgtgaggagggctaccagggccctgactgcagcgctgtggcccctcctgaggacctgcgggtggccggcatcagtgacaggagcattgagctggagtgggatggccccatggctgtgacagaatatgtgatctcctaccagcccacagccctgggcggcctgcagctgcagcagagggtgcctggggactggagcggcgtgaccatcacagagctggagcccggcctgacctacaacatctctgtgtatgctgtgatcagcaacatcctgagcctgcccatcacagccaaggtggccacccacctgagcaccccccagggcctgcagttcaagaccatcacagagaccaccgtggaggtgcagtgggagcccttctccttctcctttgatggctgggagatctccttcatccccaagaacaatgaaggaggagtgattgcccaggtgcccagtgatgtgaccagcttcaaccagacaggcctgaagccaggagaggagtacatcgtgaatgtggtggccctgaaggagcaggcccggagcccccccaccagcgcctctgtgtccacagtgattgatggccccacccagatcctggtgagagatgtgtctgacacagtggcctttgtggagtggatccccccccgggccaaggtggacttcatcctgctgaagtatggcctggtgggcggggagggcggccgcaccaccttccggctgcagccccccctgagccagtacagcgtgcaggccctgcggcccggcagccgctatgaggtgtctgtgtctgctgtgcggggcaccaatgaaagtgacagcgccaccacccagttcaccacagaaattgatgcccccaagaacctgcgggtgggcagcaggacagccaccagcctggacctggagtgggacaacagcgaggccgaggtgcaggagtacaaggtggtgtacagcaccctggccggggagcagtaccacgaggtgctggtgccccggggcatcggccccaccacccgggccaccctgacagacctggtgcccggcacagaatatggagtgggcatctctgctgtgatgaacagccagcagagcgtgcctgccaccatgaatgccaggacagagctggacagcccccgggacctgatggtgacagccagcagcgagaccagcatcagcctcatctggaccaaggccagcggccccatcgaccactaccgcatcaccttcacccccagcagcggcatcgccagcgaggtgacagtgcccaaggacaggaccagctacaccctgacagacctggagcccggggctgagtacatcatctctgtgacagctgagcggggccggcagcagagcctggagagcacagtggatgccttcaccggcatcgacccccccaaggacatcaccatcagcaatgtgaccaaggacagcgtgatggtgtcctggagcccccctgtggccagctttgactactacagagtgtcctaccggcccacccaggtgggccgcctggacagctctgtggtgcccaacacagtgacagagttcaccatcacccggctgaacccagccacagaatatgagatcagcctgaacagcgtgcggggccgggaggagagcgagcgcatctgcaccctggtgcacacagccatggacaaccctgtggacctgattgccaccaacatcacccccacagaggccctgctgcagtggaaggcccctgtgggggaggtggagaactacgtgattgtgctgacccactttgctgtggccggggagaccatcctggtggatggagtgtctgaggagttccggctggtggacctgctgcccagcacccactacacagccaccatgtatgccaccaacggccccctgaccagcggcaccatcagcaccaacttcagcaccctgctggaccccccagccaacctgacagccagcgaggtgacccggcagagcgccctgatctcctggcagccccccagggctgagattgaaaattatgtgctgacctacaagagcacagatggcagcaggaaggagctgattgtggatgctgaggacacctggatccggctggagggcctgctggagaacacagactacacagtgctgctgcaggccgcccaggacaccacctggagcagcatcaccagcacagccttcaccactggaggccgggtcttcccccacccccaggactgtgcccagcacctgatgaatggagacaccctgtctggagtgtaccccatcttcctgaatggagagctgagccagaagctgcaggtgtactgtgacatgaccacagatggcggcggctggatcgtgttccagaggcggcagaatggccagacagacttcttcaggaagtgggccgactacagagtgggctttggaaatgtggaggatgagttctggctgggcctggacaacatccaccgcatcaccagccagggccgctatgagctgcgggtggacatgagagatggccaggaggccgcctttgccagctatgaccgcttctctgtggaggacagcaggaacctgtacaagctgagaattggcagctacaatggaacagctggggacagcctgagctaccaccagggccggcccttcagcacagaagatcgggacaatgatgtggccgtgaccaactgtgccatgagctacaagggggcctggtggtacaagaactgccacaggaccaacctgaatggcaagtacggggagagccgccacagccagggcatcaactggtaccactggaagggccacgagttcagcatcccctttgtggagatgaagatgaggccctacaaccaccggctgatggccggcaggaagaggcagagcctgcagttctag

SEQ ID NO: 172918 - DNA, 4077 bp, synthetic construct; identical to SEQ ID NO: 172916
  misc_feature 1..4077: note = Description of Artificial Sequence: Synthetic coding sequence
  source 1..4077: mol_type = other DNA

SEQ ID NO: 172919 - DNA, 534 bp, synthetic construct
  misc_feature 1..534: note = Description of Artificial Sequence: Synthetic coding sequence
  source 1..534: mol_type = other DNA
tgaatcaacttccccaagaaggcctgcccctgtgccagcagcgcccaggtgctgcaggagctgctgagcagaattgagatgctggagcgggaggtgtctgtgctgcgggaccagtgcaatgccaactgctgccaggagagcgctgccaccgtggcccccccagaggacctgcgggtggccggcatcagtgacaggagcattgagctggagtgggatggccccatggctgtgacagaatatgtgatctcctaccagcccacagccctgggcggcctgcagctgcagcagagggtgcctggggactggagcggcgtgaccatcacagagctggagcccggcctgacctacaacatctctgtgtatgctgtgatcagcaacatcctgagcctgcccatcacagccaaggtggccacccacctgagcaccccccagggcctgcagttcaagaccatcacagagaccaccgtggaggtgcagtgggagcccttctccttctcctttgatggctgggagatctccttcatccccaagtag

SEQ ID NO: 172920 - DNA, 12669 bp, synthetic construct
  misc_feature 1..12669: note = Description of Artificial Sequence: Synthetic coding sequence
  source 1..12669: mol_type = other DNA
atgatgcctgcccagtatgccctgaccagcagcctggtgctgctggtgctgctgagcacagcccgggccggccccttcagcagccgcagcaatgtgaccctgcctgccccccggcccccaccccagcccggcggccacacagtgggcgctggggtgggcagccccagcagccagctgtatgagcacacagtggagggcggggagaagcaggtggtgttcacccaccgcatcaacctgccccccagcacaggctgcggctgccccccaggcacagagccccctgtgctggccagcgaggtgcaggccctgcgggtgcggctggagatcctggaggagctggtgaagggcctgaaggagcagtgcaccggcggctgctgcccagccagcgcccaggccggcaccggccagacagatgtgaggaccctgtgcagcctgcacggcgtgtttgacctgagccgctgcacctgcagctgtgagcccggctggggcggccccacctgcagcgaccccacagatgctgagatcccccccagcagcccccccagcgccagcggcagctgcccagatgactgcaatgaccagggccgctgtgtgcggggccgctgtgtgtgcttccctggctacacaggccccagctgtggctggcccagctgccctggggactgccagggccggggccgctgtgtgcagggcgtgtgtgtgtgcagagctggcttcagcggccctgactgcagccagaggagctgcccccggggctgcagccagaggggccgctgtgagggcggccgctgtgtgtgtgaccccggctacacaggagatgactgtggcatgaggagctgcccccggggctgcagccagaggggccgctgtgaaaatggccgctgtgtgtgcaaccctggctacgccggggaggactgtggggtgcgcagctgcccccggggctgcagccagaggggccgctgcaaggatggccgctgtgtgtgtgaccccggctacacaggagaggactgtggcaccaggagctgcccctgggactgtggggagggcggccgctgtgtggatggccgctgtgtgtgctggccaggctacaccggggaggactgcagcaccaggacctgcccccgggactgccggggccggggccgctgtgaagatggagagtgcatctgtgacaccggctacagcggagatgactgtggggtgcgcagctgccctggggactgcaaccagaggggccgctgtgaagatggccgctgtgtgtgctggccaggctacacaggaacagactgtggcagccgggcctgcccccgggactgccggggccggggccgctgtgaaaatggagtgtgtgtgtgcaatgccggctacagcggggaggactgtggggtgcgcagctgccctggggactgccggggccggggccgctgtgagagcggccgctgcatgtgctggccaggctacacaggccgggactgtggcacccgggcctgccctggggactgccggggccggggccgctgtgtggatggccgctgtgtgtgcaaccctggcttcaccggggaggactgtggcagccgccgctgccctggggactgccggggccacggcctgtgtgaagatggagtgtgtgtgtgtgatgctggctacagcggggaggactgcagcaccaggagctgccctgggggctgccggggccggggccagtgcctggatggccgctgtgtgtgtgaagatggctacagcggggaggactgtggggtgcggcagtgccccaatgactgcagccagcacggcgtgtgccaggatggagtgtgcatctgctgggagggctacgtgtctgaggactgcagcatccgcacctgccccagcaactgccacggccggggccgctgtgaggagggccgctgcctgtgtgaccccggctacacaggccccacctgtgccaccaggatgtgcccagctgactgccggggccggggccgctgtgtgcagggcgtgtgcctgtgccacgtgggctatggaggagaggactgtggccaggaggagcccccagccagcgcctgccctgggggctgcggcccccgggagctgtgccgggccggccagtgtgtgtgtgtggagggcttccggggccctgactgtgccatccagacctgccctggggactgccggggccgcggggagtgccatgatggcagctgtgtgtgcaaggatggctatgctggggaggactgtggggaggaggtgcccaccatcgagggcatgaggatgcacctgctggaggagaccaccgtgaggacagagtggaccccagcccctggccctgtggatgcctatgagatccagttcatccccaccacagaaggagccagcccccccttcaccgcccgggtgcccagcagcgccagcgcctatgaccagaggggcctggcccctggccaggagtaccaggtgacagtgcgggccctgcggggcacctcctggggcctgcctgccagcaagaccatcaccaccatgattgatggcccccaggacctgcgggtggtggccgtgacccccaccaccctggagctgggctggctgcggccccaggccgaggtggacagatttgtggtgtcctatgtgtctgctggcaaccagagggtgcggctggaggtgcccccagaggctgatggcaccctgctgacagacctgatgcctggggtggagtatgtggtgacagtgacagctgagcggggccgggctgtgtcctacccagcctctgtgcgggccaacacaggcagcagccccctgggcctgctgggcaccacagatgagcccccaccttctggccccagcaccacccagggcgcccaggcccccctgctgcagcagaggccccaggagctgggggagctgcgggtgctgggcagagatgagaccggccgcctgcgggtggtgtggacagcccagcctgacacctttgcctacttccagctgaggatgagggtgcctgagggccctggggcccacgaggaggtgctgcctggagatgtgcggcaggccctggtgcccccacctcctcctggcaccccctatgagctgagcctgcatggagtgcccccaggcggcaagcccagcgaccccatcatctaccagggcatcatggacaaggatgaggagaagccaggcaagagcagcggccccccccggctgggggagctgactgtgacagacaggaccagtgacagcctgctgctgcgctggacagtgcctgagggggagtttgacagctttgtgatccagtacaaggacagagatggccagccccaggtggtgcctgtggagggcccccagaggtctgctgtgatcaccagcctggaccccggcaggaagtacaagtttgtgctgtatggctttgtgggcaagaagagacatggccccctggtggccgaggccaagatcctgccccagagcgaccccagccctggcaccccaccccacctgggcaacctgtgggtgacagaccccaccccagacagcctgcacctgtcctggacagtgcctgagggccagtttgacaccttcatggtgcagtacagagacagagatggccggccccaggtggtgcctgtggagggccctgagaggagctttgtggtgagcagcctggaccctgaccacaagtaccgcttcaccctgtttggcatcgccaacaagaagagatatggccccctgacagcagatggcaccacagcccctgagaggaaggaggagccccccaggcctgagttcctggagcagcccctgctgggggagctgactgtgactggagtgaccccagacagcctgcggctgtcctggacagtggcccagggcccctttgacagcttcatggtgcagtacaaggatgcccagggccagccccaggccgtgcctgtggccggagatgaaaatgaggtgacagtgcccggcctggaccctgacaggaagtacaagatgaacctgtatggcctgcggggccggcagagggtgggccctgagagcgtggtggccaagacagccccccaggaggatgtggatgagacccccagccccacagagctgggcacagaggcccctgagagccctgaggagcccctgctgggggagctgactgtgacaggcagcagcccagacagcctgagcctcttctggacagtgccccagggcagctttgacagcttcaccgtgcagtacaaggacagagatggccggcccagggctgtgcgggtgggcggcaaggagagcgaggtgacagtgggcggcctggagcccggccacaagtacaagatgcacctgtatggcctgcacgagggccagagggtgggccctgtgtctgctgtgggcgtgacagccccccagcaggaggagaccccaccagccacagagagccccctggagccccggctgggggagctgactgtgacagatgtgacccccaacagcgtgggcctgtcctggacagtgcctgagggccagtttgacagcttcatcgtgcagtacaaggacaaggatggccagccccaggtggtgcctgtggccgctgaccagcgggaggtgacagtgtacaacctggagcctgagaggaagtacaagatgaacatgtatggcctgcatgatggccagaggatgggccccctgtctgtggtgattgtgacagcccccctgcccccagccccagccacagaggccagcaagccacccctggagccccggctgggggagctgactgtgacagacatcaccccagacagcgtgggcctgtcctggacagtgcctgagggggagtttgacagctttgtggtgcagtacaaggacagagatggccagccccaggtggtgcctgtggccgctgaccagcgggaggtgaccatcccagacctggagcccagcaggaagtacaagttcctgctgtttggcatccaggacggcaagagaagaagccctgtgtctgtggaggccaagacagtggcccggggagatgccagccctggggccccaccccggctgggggagctgtgggtgacagaccccaccccagacagcctgcggctgtcctggacagtgcctgagggccagtttgacagctttgtggtgcagttcaaggacaaggatggcccccaggtggtgcctgtggagggccacgagaggtctgtgacagtgacccccctggatgctggcaggaagtaccgcttcctgctgtatggcctgctgggcaagaagagacatggccccctgacagcagatggcaccacagaggcccggagcgccatggatgacaccggcaccaagaggcctcccaagccccggctgggggaggagctgcaggtgaccaccgtgacccagaacagcgtgggcctgtcctggacagtgcctgagggccagtttgacagctttgtggtgcagtacaaggacagagatggccagccccaggtggtgcctgtggagggcagcctgcgggaggtgtctgtgcccggcctggaccctgcccaccgctacaagctgctgctgtatggcctgcaccacggcaagagggtgggccccatctctgctgtggccatcacagctggccgggaggagacagaaacagagaccacagcccccaccccaccagcccctgagccccacctgggggagctgactgtggaggaggccaccagccacaccctgcacctgtcctggatggtgacagaaggagaatttgacagctttgagatccagtacacagacagagatggccagctgcagatggtgagaattggaggagacagaaatgacatcaccctgagcggcctggagagtgaccaccgctacctggtgaccctgtatggcttcagtgatggcaagcacgtgggccctgtgcacgtggaggccctgactgtgcctgaggaggagaagcccagcgagcccccaacagccaccccagagccccccatcaagccccggctgggggagctgactgtgacagatgccaccccagacagcctgagcctgtcctggacagtgcctgagggccagtttgaccacttcctggtgcagtacagaaatggagatggccagcccaaggctgtgcgggtgcccggccacgaggagggcgtgaccatcagcggcctggagccagaccacaagtacaagatgaacctgtatggcttccatggaggccagaggatgggccctgtgtctgtggtgggcgtgacagctgctgaggaggagacccccagccccacagagcccagcatggaggcccctgagcctgctgaggagcccctgctgggggagctgactgtgacaggcagcagcccagacagcctgagcctgtcctggacagtgccccagggccgctttgacagcttcaccgtgcagtacaaggacagagatggccggccccaggtggtgcgggtgggcggggaggagagcgaggtgacagtgggcggcctggagcccggcaggaagtacaagatgcacctgtatggcctgcacgagggccggcgggtgggccctgtgtctgctgtgggcgtgacagcccctgaggaggagagcccagatgcccccctggccaagctgcggctgggccagatgacagtgcgggacatcaccagtgacagcctgagcctgtcctggacagtgcctgagggccagtttgaccacttcctggtgcagttcaagaatggagatggccagcccaaggctgtgcgggtgcccggccatgaagatggagtgaccatcagcggcctggagccagaccacaagtacaagatgaacctgtatggcttccacggcggccagagggtgggccctgtgtctgctgtgggcctgacagcccctgggaaggatgaggagatggccccagccagcacagagccccccaccccagagccccccatcaagccccggctggaggagctgactgtgacagatgccaccccagacagcctgagcctgtcctggacagtgcctgagggccagtttgaccacttcctggtgcagtacaagaatggagatggccagcccaaggccaccagggtgcccggccatgaagatagagtgaccatcagcggcctggagccagacaacaagtacaagatgaacctgtatggcttccatggaggccagagggtgggccctgtgtctgccatcggcgtgacagctgctgaggaggagacccccagccccacagagcccagcatggaggcccctgagcccccagaggagcccctgctgggggagctgactgtgacaggcagcagcccagacagcctgagcctgtcctggacagtgccccagggccgctttgacagcttcaccgtgcagtacaaggacagagatggccggccccaggtggtgcgggtgggcggggaggagagcgaggtgacagtgggcggcctggagcccggcaggaagtacaagatgcacctgtatggcctgcacgagggccggcgggtgggccctgtgtccacagtgggcgtgacagccccccaggaggatgtggatgagacccccagccccacagagcccggcacagaggcccctgagcccccagaggagcccctgctgggggagctgactgtgacaggcagcagcccagacagcctgagcctgtcctggacagtgccccagggccgctttgacagcttcaccgtgcagtacaaggacagagatggccggccccaggccgtgcgggtgggcggccaggagagcaaggtgacagtgcggggcctggagcccggcaggaagtacaagatgcacctgtatggcctgcacgagggccgccgcctgggccctgtgtctgctgtgggcgtgacagaagatgaggccgagaccacccaggccgtgcccaccatgaccccagagccccccatcaagccccggctgggggagctgaccatgacagatgccaccccagacagcctgagcctgtcctggacagtgcctgagggccagtttgaccacttcctggtgcagtacagaaatggagatggccagcccaaggctgtgcgggtgcccggccatgaagatggagtgaccatcagcggcctggagccagaccacaagtacaagatgaacctgtatggcttccacggcggccagagggtgggccccatctctgtgattggagtgacagctgctgaggaggagacccccagccccacagagctgagcacagaggcccctgagcccccagaggagcccctgctgggggagctgactgtgacaggcagcagcccagacagcctgagcctgtcctggaccatcccccagggccactttgacagcttcaccgtgcagtacaaggacagagatggccggccccaggtgatgagggtgcggggggaggagagcgaggtgacagtgggcggcctggagcccggcaggaagtacaagatgcacctgtatggcctgcacgagggcagaagagtgggccctgtgtccacagtgggcgtgacagtgcccaccaccaccccagagccccccaacaagccccggctgggggagctgactgtgacagatgccaccccagacagcctgagcctgtcctggatggtgcctgagggccagtttgaccacttcctggtgcagtacagaaatggagatggccagcccaaggtggtgcgggtgcccggccatgaagatggagtgaccatcagcggcctggagccagaccacaagtacaagatgaacctgtatggcttccatggaggccagagggtgggccccatcagcgtcatcggcgtgacagctgctgaggaggagaccccagcccccacagagcccagcacagaggcccctgagcccccagaggagcccctgctgggggagctgactgtgacaggcagcagcccagacagcctgagcctgtcctggaccatcccccagggccgctttgacagcttcaccgtgcagtacaaggacagagatggccggccccaggtggtgcgggtgcggggggaggagagcgaggtgacagtgggcggcctggagcccggctgcaagtacaagatgcacctgtatggcctgcacgagggccagagggtgggccctgtgtctgctgtgggcgtgacagtgcccaccatgaccccagagccccccatcaagccccggctgggggagctgactgtgacagatgccaccccagacagcctgagcctgtcctggatggtgcctgagggccagtttgaccacttcctggtgcagtacagaaatggagatggccagcccaaggctgtgcgggtgcccggccatgaagatggagtgaccatcagcggcctggagccagaccacaagtacaagatgaacctgtatggcttccacggcggccagagggtgggccctgtgtctgccatcggcgtgacagaggaggagacccccagccccacagagcccagcacagaggcccctgaggcccctgaggagcccctgctgggggagctgactgtgacaggcagcagcccagacagcctgagcctgtcctggacagtgccccagggccgctttgacagcttcaccgtgcagtacaaggacagagatggccagccccaggtggtgcgggtgcggggggaggagagcgaggtgacagtgggcggcctggagcccggcaggaagtacaagatgcacctgtatggcctgcacgagggccagagggtgggccctgtgtccacagtgggcatcacagcccccctgcccacccccctgcctgtggagccccggctgggggagctggccgtggccgctgtgaccagtgacagcgtgggcctgtcctggacagtggcccagggcccctttgacagcttcctggtgcagtacagagatgcccagggccagccccaggccgtgcctgtgtctggggacctgcgggctgtggccgtgtctggcctggaccctgccaggaagtacaagttcctgctgtttggcctgcagaatggcaagagacatggccctgtgcctgtggaggccaggacagccccagacaccaagcccagcccccggctgggggagctgactgtgacagatgccaccccagacagcgtgggcctgtcctggacagtgcctgagggggagtttgacagctttgtggtgcagtacaaggacaaggatggccgcctgcaggtggtgcctgtggccgccaaccagcgggaggtgacagtgcagggcctggagcccagcaggaagtaccgcttcctgctgtatggcctgagcggcaggaagaggctgggccccatctctgctgacagcaccacagcccccctggagaaggagctgcccccccacctgggggagctgactgtggccgaggagaccagcagcagcctgcggctgtcctggacagtggcccagggcccctttgacagctttgtggtgcagtacagagacacagatggccagcccagggctgtgcctgtggccgctgaccagaggacagtgacagtggaggacctggagcccgggaagaagtacaagttcctgctgtatggcctgctgggcggcaagaggctgggccctgtgtctgccctgggcatgacagcccctgaggaggacaccccagcccctgagctggcccctgaggcccctgagcccccagaggagccccggctgggcgtgctgactgtgacagacaccaccccagacagcatgaggctgtcctggagcgtggcccagggcccctttgacagctttgtggtgcagtatgaggacaccaacggccagccccaggccctgctggtggatggagaccagagcaagatcctgatcagcggcctggagcccagcaccccctaccgcttcctgctgtatggcctgcacgagggcaagaggctgggccccctgtctgctgagggcaccaccggcctggccccagctggccagaccagcgaggagagccggccccggctgagccagctgtctgtgacagatgtgaccaccagcagcctgcggctgaactgggaggcccctcctggggcctttgacagcttcctgctgcgctttggagtgcccagccccagcaccctggagccccacccccggcccctgctgcagcgggagctgatggtgcccggcaccaggcacagcgctgtgctgcgggacctgcggagcggcaccctgtacagcctgaccctgtatggcctgcggggcccccacaaggctgacagcatccagggcacagcccggaccctgagccctgtgctggagagcccccgggacctgcagttcagcgagatccgggagaccagcgccaaggtgaactggatgcccccacccagcagagctgacagcttcaaggtgtcctaccagctggctgatggaggagagccccagagcgtgcaggtggatggccaggcccggacccagaagctgcagggcctcatccctggggcccgctatgaggtgacagtggtgtctgtgcggggctttgaggagagcgagcccctgaccggcttcctgaccaccgtgcctgatggccccacccagctgcgggccctgaacctgacagagggctttgctgtgctgcactggaagccaccccagaaccctgtggacacctatgatgtgcaggtgacagcccctggggccccacccctgcaggccgagaccccaggcagcgctgtggactaccccctgcatgacctggtgctgcacaccaactacacagccaccgtgcggggcctgcggggccccaacctgaccagccctgccagcatcaccttcaccaccggcctggaggccccccgggacctggaggccaaggaggtgacccccaggacagccctgctgacctggacagagccccctgtgcggcctgctggctacctgctgtccttccacacccctgggggccagaaccaggagatcctgctgcccggcggcatcaccagccaccagctgctgggcctcttccccagcaccagctacaatgcccggctgcaggccatgtggggccagagcctgctgccccctgtgtccaccagcttcaccactggaggcctgcgcatccccttcccccgggactgtggggaggagatgcagaatggagctggggccagcaggaccagcaccatcttcctgaatggaaaccgggagcggcccctgaatgtgttctgtgacatggagacagatggcggcggctggctggtgttccagaggaggatggatggccagacagacttctggagggactgggaggactatgcccacggctttggaaacatctctggagagttctggctgggcaatgaggccctgcacagcctgacccaggccggggactacagcatgagggtggacctgcgggctggagatgaggccgtgtttgcccagtatgacagcttccacgtggacagcgctgctgagtactaccgcctgcacctggagggctaccatggaacagctggggacagcatgagctaccacagcggcagcgtcttcagcgcccgggaccgggaccccaacagcctgctgatcagctgtgctgtgtcctacagaggagcctggtggtacagaaactgccactacgccaacctgaatggcctgtatggcagcacagtggaccaccagggcgtgtcctggtaccactggaagggctttgagttctctgtgcccttcacagagatgaagctgcggcccaggaacttccgcagccctgctgggggcggctag

SEQ ID NO: 172921 - DNA, 6450 bp, synthetic construct
  misc_feature 1..6450: note = Description of Artificial Sequence: Synthetic coding sequence
  source 1..6450: mol_type = other DNA
tgagctgaggaggagacccccagccccacagagcccagcatggaggcccctgagcctgctgaggagcccctgctgggggagctgactgtgacaggcagcagcccagacagcctgagcctgtcctggacagtgccccagggccgctttgacagcttcaccgtgcagtacaaggacagagatggccggccccaggtggtgcgggtgggcggggaggagagcgaggtgacagtgggcggcctggagcccggcaggaagtacaagatgcacctgtatggcctgcacgagggcagaagagtgggccctgtgtctgctgtgggcgtgacagcccctgaggaggagagcccagatgcccccctggccaagctgcggctgggccagatgacagtgcgggacatcaccagtgacagcctgagcctgtcctggacagtgcctgagggccagtttgaccacttcctggtgcagttcaagaatggagatggccagcccaaggctgtgcgggtgcccggccatgaagatggagtgaccatcagcggcctggagccagaccacaagtacaagatgaacctgtatggcttccatggaggccagagggtgggccctgtgtctgctgtgggcctgacagcccctgggaaggatgaggagatggccccagccagcacagagccccccaccccagagccccccatcaagccccggctggaggagctgactgtgacagatgccaccccagacagcctgagcctgtcctggacagtgcctgagggccagtttgaccacttcctggtgcagtacaagaatggagatggccagcccaaggccaccagggtgcccggccacgaggacagagtgaccatcagcggcctggagccagacaacaagtacaagatgaacctgtatggcttccacggcggccagagggtgggccctgtgtctgccatcggcgtgacagctgctgaggaggagacccccagccccacagagcccagcatggaggcccctgagcccccagaggagcccctgctgggggagctgactgtgacaggcagcagcccagacagcctgagcctgtcctggacagtgccccagggccgctttgacagcttcaccgtgcagtacaaggacagagatggccggccccaggtggtgcgggtgggcggggaggagagcgaggtgacagtgggcggcctggagcccggcaggaagtacaagatgcacctgtatggcctgcacgagggcagaagagtgggccctgtgtccacagtgggcgtgacagccccccaggaggatgtggatgagacccccagccccacagagcctggaacagaggcccctgagcccccagaggagcccctgctgggggagctgactgtgacaggcagcagcccagacagcctgagcctgtcctggacagtgccccagggccgctttgacagcttcaccgtgcagtacaaggacagagatggccggccccaggccgtgcgggtgggcggccaggagagcaaggtgacagtgcggggcctggagcccggcaggaagtacaagatgcacctgtatggcctgcacgagggccggcggctgggccctgtgtctgctgtgggcgtgacagaagatgaagctgagaccacccaggccgtgcccaccatgaccccagagccccccatcaagccccggctgggggagctgaccatgacagatgccaccccagacagcctgagcctgtcctggacagtgcctgagggccagtttgaccacttcctggtgcagtacagaaatggagatggccagcccaaggctgtgcgggtgcccggccatgaagatggagtgaccatcagcggcctggagccagaccacaagtacaagatgaacctgtatggcttccatggaggccagagggtgggccccatctctgtgactggagtgacagctgctgaggaggagacccccagccccacagagctgagcacagaggcccctgagcccccagaggagcccctgctgggggagctgactgtgacaggcagcagcccagacagcctgagcctgtcctggaccatcccccagggccactttgacagcttcaccgtgcagtacaaggacagagatggccggccccaggtgatgagggtgcggggggaggagagcgaggtgacagtgggcggcctggagcccggcaggaagtacaagatgcacctgtatggcctgcacgagggccggcgggtgggccctgtgtccacagtgggcgtgacagtgcccaccaccaccccagagccccccaacaagccccggctgggggagctgactgtgacagatgccaccccagacagcctgagcctgtcctggatggtgcctgagggccagtttgaccacttcctggtgcagtacagaaatggagatggccagcccaaggtggtgcgggtgcccggccatgaagatggagtgaccatcagcggcctggagccagaccacaagtacaagatgaacctgtatggcttccacggcggccagagggtgggccccatctctgtgattggagtgacagctgctgaggaggagaccccagcccccacagagcccagcacagaggcccctgagcccccagaggagcccctgctgggggagctgactgtgacaggcagcagcccagacagcctgagcctgtcctggaccatcccccagggccgctttgacagcttcaccgtgcagtacaaggacagagatggccggccccaggtggtgcgggtgcggggggaggagagcgaggtgacagtgggcggcctggagcccggctgcaagtacaagatgcacctgtatggcctgcacgagggccagagggtgggccctgtgtctgctgtgggcgtgacagtgcccaccatgaccccagagccccccatcaagccccggctgggggagctgactgtgacagatgccaccccagacagcctgagcctgtcctggatggtgcctgagggccagtttgaccacttcctggtgcagtacagaaatggagatggccagcccaaggctgtgcgggtgcccggccatgaagatggagtgaccatcagcggcctggagccagaccacaagtacaagatgaacctgtatggcttccatggaggccagagggtgggccctgtgtctgccatcggcgtgacagaggaggagacccccagccccacagagcccagcacagaggcccctgaggcccctgaggagcccctgctgggggagctgactgtgacaggcagcagcccagacagcctgagcctgtcctggacagtgccccagggccgctttgacagcttcaccgtgcagtacaaggacagagatggccagccccaggtggtgcgggtgcggggggaggagagcgaggtgacagtgggcggcctggagcccggcaggaagtacaagatgcacctgtatggcctgcacgagggccagagggtgggccctgtgtccacagtgggcatcacagcccccctgcccacccccctgcctgtggagccccggctgggggagctggccgtggccgctgtgaccagtgacagcgtgggcctgtcctggacagtggcccagggcccctttgacagcttcctggtgcagtacagagatgcccagggccagccccaggccgtgcctgtgtctggggacctgcgggctgtggccgtgtctggcctggaccctgccaggaagtacaagttcctgctgtttggcctgcagaatggcaagagacatggccctgtgcctgtggaggccaggacagccccagacaccaagcccagcccccggctgggggagctgactgtgacagatgccaccccagattctgtgggcctgtcctggacagtgcctgagggggagtttgacagctttgtggtgcagtacaaggacaaggatggccgcctgcaggtggtgcctgtggccgccaaccagcgggaggtgacagtgcagggcctggagcccagcaggaagtaccgcttcctgctgtatggcctgagcggcaggaagaggctgggccccatctctgctgacagcaccacagcccccctggagaaggagctgcccccccacctgggggagctgactgtggccgaggagaccagcagcagcctgcggctgtcctggacagtggcccagggcccctttgacagctttgtggtgcagtacagagacacagatggccagcccagggctgtgcctgtggccgctgaccagaggacagtgacagtggaggacctggagcccgggaagaagtacaagttcctgctgtatggcctgctgggcggcaagaggctgggccctgtgtctgccctgggcatgacagcccctgaggaggacaccccagcccctgagctggcccctgaggcccctgagcccccagaggagccccggctgggcgtgctgactgtgacagacaccaccccagacagcatgaggctgtcctggagcgtggcccagggcccctttgacagctttgtggtgcagtatgaggacaccaacggccagccccaggccctgctggtggatggagaccagagcaagatcctgatcagcggcctggagcccagcaccccctaccgcttcctgctgtatggcctgcacgagggcaagaggctgggccccctgtctgctgagggcaccaccggcctggccccagctggccagaccagcgaggagagccggccccggctgagccagctgtctgtgacagatgtgaccaccagcagcctgcggctgaactgggaggcccctcctggggcctttgacagcttcctgctgcgcttcggcgtgcccagccccagcaccctggagccccacccccggcccctgctgcagcgggagctgatggtgcccggcaccaggcacagcgctgtgctgcgggacctgcggagcggcaccctgtacagcctgaccctgtatggcctgcggggcccccacaaggctgacagcatccagggcacagcccggaccctgagccctgtgctggagagcccccgggacctgcagttcagcgagatccgggagaccagcgccaaggtgaactggatgcccccacccagcagagctgacagcttcaaggtgtcctaccagctggctgatggaggagagccccagagcgtgcaggtggatggccaggcccggacccagaagctgcagggcctcatccctggggcccgctatgaggtgacagtggtgtctgtgcggggctttgaggagagcgagcccctgaccggcttcctgaccaccgtgcctgatggccccacccagctgcgggccctgaacctgacagagggctttgctgtgctgcactggaagccaccccagaaccctgtggacacctatgacatccaggtgacagcccctggggccccacccctgcaggccgagaccccaggcagcgctgtggactaccccctgcatgacctggtgctgcacaccaactacacagccaccgtgcggggcctgcggggccccaacctgaccagccctgccagcatcaccttcaccaccggcctggaggccccccgggacctggaggccaaggaggtgacccccaggacagccctgctgacctggacagagccccctgtgcggcctgctggctacctgctgtccttccacaccccaggcggccagacccaggagatcctgctgcccggcggcatcaccagccaccagctgctgggcctcttccccagcaccagctacaatgcccggctgcaggccatgtggggccagagcctgctgccccctgtgtccaccagcttcaccaccggcggcctgcgcatccccttcccccgggactgtggggaggagatgcagaatggagctggggccagcaggaccagcaccatcttcctgaatggaaaccgggagcggcccctcatcgtgttctgtgacatggagacagatggcggcggctggctggtgttccagaggaggatggatggccagacagacttctggagggactgggaggactatgcccacggcttcggcaacatcagcggggagttctggctgggcaatgaggccctgcacagcctgacccaggccggggactacagcatgagggtggacctgcgggctggagatgaagctgtgtttgcccagtatgacagcttccacgtggacagcgctgctgagtactaccgcctgcacctggagggctaccacggcacagctggggacagcatgagctaccacagcggctctgtgttcagcgcccgggaccgggaccccaacagcctgctgatcagctgtgctgtgtcctacagaggagcctggtggtacagaaactgccactacgccaacctgaatggcctgtatggcagcacagtggaccaccagggcgtgtcctggtaccactggaagggctttgagttctctgtgcccttcacagagatgaagctgcggcccaggaacttccgcagccctgctgggggcggctag

SEQ ID NO: 172922 - DNA, 27 bp, synthetic construct
  misc_feature 1..27: note = Description of Artificial Sequence: Synthetic coding sequence
  source 1..27: mol_type = other DNA
atgatgcctgcccagtatgccctgtag

SEQ ID NO: 172923 - DNA, 27 bp, synthetic construct
  misc_feature 1..27: note = Description of Artificial Sequence: Synthetic coding sequence
  source 1..27: mol_type = other DNA
atgatgcctgcccagtatgccctgtag

SEQ ID NO: 172924 - DNA, 9891 bp, synthetic construct
  misc_feature 1..9891: note = Description of Artificial Sequence: Synthetic coding sequence
  source 1..9891: mol_type = other DNA
tgaagcagccccctgggcctgctgggcaccacagatgagcccccaccttctggccccagcaccacccagggcgcccaggcccccctgctgcagcagaggccccaggagctgggggagctgcgggtgctgggcagagatgagaccggccgcctgcgggtggtgtggacagcccagcctgacacctttgcctacttccagctgaggatgagggtgcctgagggccctggggcccacgaggaggtgctgcctggagatgtgcggcaggccctggtgcccccacctcctcctggcaccccctatgagctgagcctgcatggagtgcccccaggcggcaagcccagcgaccccatcatctaccagggcatcatggacaaggatgaggagaagccaggcaagagcagcggccccccccggctgggggagctgactgtgacagacaggaccagtgacagcctgctgctgcgctggacagtgcctgagggggagtttgacagctttgtgatccagtacaaggacagagatggccagccccaggtggtgcctgtggagggcccccagaggtctgctgtgatcaccagcctggaccccggcaggaagtacaagtttgtgctgtatggctttgtgggcaagaagagacatggccccctggtggccgaggccaagatcctgccccagagcgaccccagccctggcaccccaccccacctgggcaacctgtgggtgacagaccccaccccagacagcctgcacctgtcctggacagtgcctgagggccagtttgacaccttcatggtgcagtacagagacagagatggccggccccaggtggtgcctgtggagggccctgagaggagctttgtggtgagcagcctggaccctgaccacaagtaccgcttcaccctgtttggcatcgccaacaagaagagatatggccccctgacagcagatggcaccacagcccctgagaggaaggaggagccccccaggcctgagttcctggagcagcccctgctgggggagctgactgtgactggagtgaccccagacagcctgcggctgtcctggacagtggcccagggcccctttgacagcttcatggtgcagtacaaggatgcccagggccagccccaggccgtgcctgtggccggagatgaaaatgaggtgacagtgcccggcctggaccctgacaggaagtacaagatgaacctgtatggcctgcggggccggcagagggtgggccctgagagcgtggtggccaagacagccccccaggaggatgtggatgagacccccagccccacagagctgggcacagaggcccctgagagccctgaggagcccctgctgggggagctgactgtgacaggcagcagcccagacagcctgagcctcttctggacagtgccccagggcagctttgacagcttcaccgtgcagtacaaggacagagatggccggccccaggccgtgcgggtgggcggcaaggagagcgaggtgacagtgggcggcctggagcccggccacaagtacaagatgcacctgtatggcctgcacgagggccagagggtgggccctgtgtctgctgtgggcgtgacagccccccagcaggaggagaccccaccagccacagagagccccctggagccccggctgggggagctgactgtgacagatgtgacccccaacagcgtgggcctgtcctggacagtgcctgagggccagtttgacagcttcatcgtgcagtacaaggacaaggatggccagccccaggtggtgcctgtggccgctgaccagcgggaggtgacagtgtacaacctggagcctgagaggaagtacaagatgaacatgtatggcctgcatgatggccagaggatgggccccctgtctgtggtgattgtgacagcccccctgcccccagccccagccacagaggccagcaagccacccctggagccccggctgggggagctgactgtgacagacatcaccccagacagcgtgggcctgtcctggacagtgcctgagggggagtttgacagctttgtggtgcagtacaaggacagagatggccagccccaggtggtgcctgtggccgctgaccagcgggaggtgaccatcccagacctggagcccagcaggaagtacaagttcctgctgtttggcatccaggacggcaagagaagaagccctgtgtctgtggaggccaagacagtggcccggggagatgccagccctggggccccaccccggctgggggagctgtgggtgacagaccccaccccagacagcctgcggctgtcctggacagtgcctgagggccagtttgacagctttgtggtgcagttcaaggacaaggatggcccccaggtggtgcctgtggagggccacgagaggtctgtgacagtgacccccctggatgctggcaggaagtaccgcttcctgctgtatggcctgctgggcaagaagagacatggccccctgacagcagatggcaccacagaggcccggagcgccatggatgacaccggcaccaagaggcctcccaagccccggctgggggaggagctgcaggtgaccaccgtgacccagaacagcgtgggcctgtcctggacagtgcctgagggccagtttgacagctttgtggtgcagtacaaggacagagatggccagccccaggtggtgcctgtggagggcagcctgcgggaggtgtctgtgcccggcctggaccctgcccaccgctacaagctgctgctgtatggcctgcaccacggcaagagggtgggccccatctctgctgtggccatcacagctggccgggaggagacagaaacagagaccacagcccccaccccaccagcccctgagccccacctgggggagctgactgtggaggaggccaccagccacaccctgcacctgtcctggatggtgacagaaggagaatttgacagctttgagatccagtacacagacagagatggccagctgcagatggtgagaattggaggagacagaaatgacatcaccctgagcggcctggagagtgaccaccgctacctggtgaccctgtatggcttcagtgatggcaagcacgtgggccctgtgcacgtggaggccctgactgtgcctgaggaggagaagcccagcgagcccccaacagccaccccagagccccccatcaagccccggctgggggagctgactgtgacagatgccaccccagacagcctgagcctgtcctggacagtgcctgagggccagtttgaccacttcctggtgcagtacagaaatggagatggccagcccaaggctgtgcgggtgcccggccacgaggagggcgtgaccatcagcggcctggagccagaccacaagtacaagatgaacctgtatggcttccatggaggccagaggatgggccctgtgtctgtggtgggcgtgacagctgctgaggaggagacccccagccccacagagcccagcatggaggcccctgagcctgctgaggagcccctgctgggggagctgactgtgacaggcagcagcccagacagcctgagcctgtcctggacagtgccccagggccgctttgacagcttcaccgtgcagtacaaggacagagatggccggccccaggtggtgcgggtgggcggggaggagagcgaggtgacagtgggcggcctggagcccggcaggaagtacaagatgcacctgtatggcctgcacgagggccggcgggtgggccctgtgtctgctgtgggcgtgacagcccctgaggaggagagcccagatgcccccctggccaagctgcggctgggccagatgacagtgcgggacatcaccagtgacagcctgagcctgtcctggacagtgcctgagggccagtttgaccacttcctggtgcagttcaagaatggagatggccagcccaaggctgtgcgggtgcccggccatgaagatggagtgaccatcagcggcctggagccagaccacaagtacaagatgaacctgtatggcttccacggcggccagagggtgggccctgtgtctgctgtgggcctgacagcccctgggaaggatgaggagatggccccagccagcacagagccccccaccccagagccccccatcaagccccggctggaggagctgactgtgacagatgccaccccagacagcctgagcctgtcctggacagtgcctgagggccagtttgaccacttcctggtgcagtacaagaatggagatggccagcccaaggccaccagggtgcccggccatgaagatagagtgaccatcagcggcctggagccagacaacaagtacaagatgaacctgtatggcttccatggaggccagagggtgggccctgtgtctgccatcggcgtgacagctgctgaggaggagacccccagccccacagagcccagcatggaggcccctgagcccccagaggagcccctgctgggggagctgactgtgacaggcagcagcccagacagcctgagcctgtcctggacagtgccccagggccgctttgacagcttcaccgtgcagtacaaggacagagatggccggccccaggtggtgcgggtgggcggggaggagagcgaggtgacagtgggcggcctggagcccggcaggaagtacaagatgcacctgtatggcctgcacgagggccggcgggtgggccctgtgtccacagtgggcgtgacagccccccaggaggatgtggatgagacccccagccccacagagcccggcacagaggcccctggccccccagaggagcccctgctgggggagctgactgtgacaggcagcagcccagacagcctgagcctgtcctggacagtgccccagggccgctttgacagcttcaccgtgcagtacaaggacagagatggccggccccaggccgtgcgggtgggcggccaggagagcaaggtgacagtgcggggcctggagcccggcaggaagtacaagatgcacctgtatggcctgcacgagggccgccgcctgggccctgtgtctgctgtgggcgtgacagaagatgaggccgagaccacccaggccgtgcccaccatgaccccagagccccccatcaagccccggctgggggagctgaccatgacagatgccaccccagacagcctgagcctgtcctggacagtgcctgagggccagtttgaccacttcctggtgcagtacagaaatggagatggccagcccaaggctgtgcgggtgcccggccatgaagatggagtgaccatcagcggcctggagccagaccacaagtacaagatgaacctgtatggcttccacggcggccagagggtgggccccatctctgtgattggagtgacagctgctgaggaggagacccccagccccacagagctgagcacagaggcccctgagcccccagaggagcccctgctgggggagctgactgtgacaggcagcagcccagacagcctgagcctgtcctggaccatcccccagggccactttgacagcttcaccgtgcagtacaaggacagagatggccggccccaggtgatgagggtgcggggggaggagagcgaggtgacagtgggcggcctggagcccggcaggaagtacaagatgcacctgtatggcctgcacgagggcagaagagtgggccctgtgtccacagtgggcgtgacagtgcccaccaccaccccagagccccccaacaagccccggctgggggagctgactgtgacagatgccaccccagacagcctgagcctgtcctggatggtgcctgagggccagtttgaccacttcctggtgcagtacagaaatggagatggccagcccaaggtggtgcgggtgcccggccatgaagatggagtgaccatcagcggcctggagccagaccacaagtacaagatgaacctgtatggcttccatggaggccagagggtgggccccatcagcgtcatcggcgtgacagctgctgaggaggagaccccagcccccacagagcccagcacagaggcccctgagcccccagaggagcccctgctgggggagctgactgtgacaggcagcagcccagacagcctgagcctgtcctggaccatcccccagggccgctttgacagcttcaccgtgcagtacaaggacagagatggccggccccaggtggtgcgggtgcggggggaggagagcgaggtgacagtgggcggcctggagcccggctgcaagtacaagatgcacctgtatggcctgcacgagggccagagggtgggccctgtgtctgctgtgggcgtgacagtgcccaccatgaccccagagccccccatcaagccccggctgggggagctgactgtgacagatgccaccccagacagcctgagcctgtcctggatggtgcctgagggccagtttgaccacttcctggtgcagtacagaaatggagatggccagcccaaggctgtgcgggtgcccggccatgaagatggagtgaccatcagcggcctggagccagaccacaagtacaagatgaacctgtatggcttccacggcggccagagggtgggccctgtgtctgccatcggcgtgacagaggaggagacccccagccccacagagcccagcacagaggcccctgaggcccctgaggagcccctgctgggggagctgactgtgacaggcagcagcccagacagcctgagcctgtcctggacagtgccccagggccgctttgacagcttcaccgtgcagtacaaggacagagatggccagccccaggtggtgcgggtgcgggtggaggagagcgaggtgacagtgggcggcctggagcccggcaggaagtacaagatgcacctgtatggcctgcacgagggccagagggtgggccctgtgtccacagtgggcatcacagcccccctgcccacccccctgcctgtggagccccggctgggggagctggccgtggccgctgtgaccagtgacagcgtgggcctgtcctggacagtggcccagggcccctttgacagcttcctggtgcagtacagagatgcccagggccagccccaggccgtgcctgtgtctggggacctgcgggctgtggccgtgtctggcctggaccctgccaggaagtacaagttcctgctgtttggcctgcagaatggcaagagacatggccctgtgcctgtggaggccaggacagccccagacaccaagcccagcccccggctgggggagctgactgtgacagatgccaccccagacagcgtgggcctgtcctggacagtgcctgagggggagtttgacagctttgtggtgcagtacaaggacaaggatggccgcctgcaggtggtgcctgtggccgccaaccagcgggaggtgacagtgcagggcctggagcccagcaggaagtaccgcttcctgctgtatggcctgagcggcaggaagaggctgggccccatctctgctgacagcaccacagcccccctggagaaggagctgcccccccacctgggggagctgactgtggccgaggagaccagcagcagcctgcggctgtcctggacagtggcccagggcccctttgacagctttgtggtgcagtacagagacacagatggccagcccagggctgtgcctgtggccgctgaccagaggacagtgacagtggaggacctggagcccgggaagaagtacaagttcctgctgtatggcctgctgggcggcaagaggctgggccctgtgtctgccctgggcatgacagcccctgaggaggacaccccagcccctgagctggcccctgaggcccctgagcccccagaggagccccggctgggcgtgctgactgtgacagacaccaccccagacagcatgaggctgtcctggagcgtggcccagggcccctttgacagctttgtggtgcagtatgaggacaccaacggccagccccaggccctgctggtggatggagaccagagcaagatcctgatcagcggcctggagcccagcaccccctaccgcttcctgctgtatggcctgcacgagggcaagaggctgggccccctgtctgctgagggcaccaccggcctggccccagctggccagaccagcgaggagagccggccccggctgagccagctgtctgtgacagatgtgaccaccagcagcctgcggctgaactgggaggcccctcctggggcctttgacagcttcctgctgcgctttggagtgcccagccccagcaccctggagccccacccccggcccctgctgcagcgggagctgatggtgcccggcaccaggcacagcgctgtgctgcgggacctgcggagcggcaccctgtacagcctgaccctgtatggcctgcggggcccccacaaggctgacagcatccagggcacagcccggaccctgagccctgtgctggagagcccccgggacctgcagttcagcgagatccgggagaccagcgccaaggtgaactggatgcccccacccagcagagctgacagcttcaaggtgtcctaccagctggctgatggaggagagccccagagcgtgcaggtggatggccaggcccggacccagaagctgcagggcctcatccctggggcccgctatgaggtgacagtggtgtctgtgcggggctttgaggagagcgagcccctgaccggcttcctgaccaccgtgcctgatggccccacccagctgcgggccctgaacctgacagagggctttgctgtgctgcactggaagccaccccagaaccctgtggacacctatgatgtgcaggtgacagcccctggggccccacccctgcaggccgagaccccaggcagcgctgtggactaccccctgcatgacctggtgctgcacaccaactacacagccaccgtgcggggcctgcggggccccaacctgaccagccctgccagcatcaccttcaccaccggcctggaggccccccgggacctggaggccaaggaggtgacccccaggacagccctgctgacctggacagagccccctgtgcggcctgctggctacctgctgtccttccacacccctgggggccagaaccaggagatcctgctgcccggcggcatcaccagccaccagctgctgggcctcttccccagcaccagctacaatgcccggctgcaggccatgtggggccagagcctgctgccccctgtgtccaccagcttcaccactggaggcctgcgcatccccttcccccgggactgtggggaggagatgcagaatggagctggggccagcaggaccagcaccatcttcctgaatggaaaccgggagcggcccctgaatgtgttctgtgacatggagacagatggcggcggctggctggtgttccagaggaggatggatggccagacagacttctggagggactgggaggactatgcccacggctttggaaacatctctggagagttctggctgggcaatgaggccctgcacagcctgacccaggccggggactacagcatgagggtggacctgcgggctggagatgaggccgtgtttgcccagtatgacagcttccacgtggacagcgctgctgagtactaccgcctgcacctggagggctaccatggaacagctggggacagcatgagctaccacagcggcagcgtcttcagcgcccgggaccgggaccccaacagcctgctgatcagctgtgctgtgtcctacagaggagcctggtggtacagaaactgccactacgccaacctgaatggcctgtatggcagcacagtggaccaccagggcgtgtcctggtaccactggaagggctttgagttctctgtgcccttcacagagatgaagctgcggcccaggaacttccgcagccctgctgggggcggctag

SEQ ID NO: 172925 - DNA, 12669 bp, synthetic construct
  misc_feature 1..12669: note = Description of Artificial Sequence: Synthetic coding sequence
  source 1..12669: mol_type = other DNA
atgatgcctgcccagtatgccctgaccagcagcctggtgctgctggtgctgctgagcacagcccgggccggccccttcagcagccgcagcaatgtgaccctgcctgccccccggcccccaccccagcccggcggccacacagtgggcgctggggtgggcagccccagcagccagctgtatgagcacacagtggagggcggggagaagcaggtggtgttcacccaccgcatcaacctgccccccagcacaggctgcggctgccccccaggcacagagccccctgtgctggccagcgaggtgcaggccctgcgggtgcggctggagatcctggaggagctggtgaagggcctgaaggagcagtgcaccggcggctgctgcccagccagcgcccaggccggcaccggccagacagatgtgaggaccctgtgcagcctgcacggcgtgtttgacctgagccgctgcacctgcagctgtgagcccggctggggcggccccacctgcagcgaccccacagatgctgagatcccccccagcagcccccccagcgccagcggcagctgcccagatgactgcaatgaccagggccgctgtgtgcggggccgctgtgtgtgcttccctggctacacaggccccagctgtggctggcccagctgccctggggactgccagggccggggccgctgtgtgcagggcgtgtgtgtgtgcagagctggcttcagcggccctgactgcagccagaggagctgcccccggggctgcagccagaggggccgctgtgagggcggccgctgtgtgtgtgaccccggctacacaggagatgactgtggcatgaggagctgcccccggggctgcagccagaggggccgctgtgaaaatggccgctgtgtgtgcaaccctggctacaccggggaggactgtggggtgcgcagctgcccccggggctgcagccagaggggccgctgcaaggatggccgctgtgtgtgtgaccccggctacacaggagaggactgtggcaccaggagctgcccctgggactgtggggagggcggccgctgtgtggatggccgctgtgtgtgctggccaggctacaccggggaggactgcagcaccaggacctgcccccgggactgccggggccggggccgctgtgaagatggagagtgcatctgtgacaccggctacagcggagatgactgtggggtgcgcagctgccctggggactgcaaccagaggggccgctgtgaagatggccgctgtgtgtgctggccaggctacacaggaacagactgtggcagccgggcctgcccccgggactgccggggccggggccgctgtgaaaatggagtgtgtgtgtgcaatgccggctacagcggggaggactgtggggtgcgcagctgccctggggactgccggggccggggccgctgtgagagcggccgctgcatgtgctggccaggctacacaggccgggactgtggcacccgggcctgccctggggactgccggggccggggccgctgtgtggatggccgctgtgtgtgcaaccctggcttcaccggggaggactgtggcagccgccgctgccctggggactgccggggccacggcctgtgtgaagatggagtgtgtgtgtgtgatgctggctacagcggggaggactgcagcaccaggagctgccctgggggctgccggggccggggccagtgcctggatggccgctgtgtgtgtgaagatggctacagcggggaggactgtggggtgcggcagtgccccaatgactgcagccagcacggcgtgtgccaggatggagtgtgcatctgctgggagggctacgtgtctgaggactgcagcatccgcacctgccccagcaactgccacggccggggccgctgtgaggagggccgctgcctgtgtgaccccggctacacaggccccacctgtgccaccaggatgtgcccagctgactgccggggccggggccgctgtgtgcagggcgtgtgcctgtgccacgtgggctatggaggagaggactgtggccaggaggagcccccagccagcgcctgccctgggggctgcggcccccgggagctgtgccgggccggccagtgtgtgtgtgtggagggcttccggggccctgactgtgccatccagacctgccctggggactgccggggccgcggggagtgccatgatggcagctgtgtgtgcaaggatggctatgctggggaggactgtggggaggaggtgcccaccatcgagggcatgaggatgcacctgctggaggagaccaccgtgaggacagagtggaccccagcccctggccctgtggatgcctatgagatccagttcatccccaccacagaaggagccagcccccccttcaccgcccgggtgcccagcagcgccagcgcctatgaccagaggggcctggcccctggccaggagtaccaggtgacagtgcgggccctgcggggcacctcctggggcctgcctgccagcaagaccatcaccaccatgattgatggcccccaggacctgcgggtggtggccgtgacccccaccaccctggagctgggctggctgcggccccaggccgaggtggacagatttgtggtgtcctatgtgtctgctggcaaccagagggtgcggctggaggtgcccccagaggctgatggcaccctgctgacagacctgatgcctggggtggagtatgtggtgacagtgacagctgagcggggccgggctgtgtcctacccagcctctgtgcgggccaacacaggcagcagccccctgggcctgctgggcaccacagatgagcccccaccttctggccccagcaccacccagggcgcccaggcccccctgctgcagcagaggccccaggagctgggggagctgcgggtgctgggcagagatgagaccggccgcctgcgggtggtgtggacagcccagcctgacacctttgcctacttccagctgaggatgagggtgcctgagggccctggggcccacgaggaggtgctgcctggagatgtgcggcaggccctggtgcccccacctcctcctggcaccccctatgagctgagcctgcatggagtgcccccaggcggcaagcccagcgaccccatcatctaccagggcatcatggacaaggatgaggagaagccaggcaagagcagcggccccccccggctgggggagctgactgtgacagacaggaccagtgacagcctgctgctgcgctggacagtgcctgagggggagtttgacagctttgtgatccagtacaaggacagagatggccagccccaggtggtgcctgtggagggcccccagaggtctgctgtgatcaccagcctggaccccggcaggaagtacaagtttgtgctgtatggctttgtgggcaagaagagacatggccccctggtggccgaggccaagatcctgccccagagcgaccccagccctggcaccccaccccggctgggcaacctgtgggtgacagaccccaccccagacagcctgcacctgtcctggacagtgcctgagggccagtttgacaccttcatggtgcagtacagagacagagatggccggccccaggtggtgcctgtggagggccctgagaggagctttgtggtgagcagcctggaccctgaccacaagtaccgcttcaccctgtttggcatcgccaacaagaagagatatggccccctgacagcagatggcaccacagcccctgagaggaaggaggagccccccaggcctgagttcctggagcagcccctgctgggggagctgactgtgactggagtgaccccagacagcctgcggctgtcctggacagtggcccagggcccctttgacagcttcatggtgcagtacaaggatgcccagggccagccccaggccgtgcctgtggccggagatgaaaatgaggtgacagtgcccggcctggaccctgacaggaagtacaagatgaacctgtatggcctgcggggccggcagagggtgggccctgagagcgtggtggccaagacagccccccaggaggatgtggatgagacccccagccccacagagctgggcacagaggcccctgagagccctgaggagcccctgctgggggagctgactgtgacaggcagcagcccagacagcctgagcctcttctggacagtgccccagggcagctttgacagcttcaccgtgcagtacaaggacagagatggccggcccagggctgtgcgggtgggcggcaaggagagcgaggtgacagtgggcggcctggagcccggccacaagtacaagatgcacctgtatggcctgcacgagggccagagggtgggccctgtgtctgctgtgggcgtgacagccccccagcaggaggagaccccaccagccacagagagccccctggagccccggctgggggagctgactgtgacagatgtgacccccaacagcgtgggcctgtcctggacagtgcctgagggccagtttgacagcttcatcgtgcagtacaaggacaaggatggccagccccaggtggtgcctgtggccgctgaccagcgggaggtgacagtgtacaacctggagcctgagaggaagtacaagatgaacatgtatggcctgcatgatggccagaggatgggccccctgtctgtggtgattgtgacagcccccctgcccccagccccagccacagaggccagcaagccacccctggagccccggctgggggagctgactgtgacagacatcaccccagacagcgtgggcctgtcctggacagtgcctgagggggagtttgacagctttgtggtgcagtacaaggacagagatggccagccccaggtggtgcctgtggccgctgaccagcgggaggtgaccatcccagacctggagcccagcaggaagtacaagttcctgctgtttggcatccaggacggcaagagaagaagccctgtgtctgtggaggccaagacagtggcccggggagatgccagccctggggccccaccccggctgggggagctgtgggtgacagaccccaccccagacagcctgcggctgtcctggacagtgcctgagggccagtttgacagctttgtggtgcagttcaaggacaaggatggcccccaggtggtgcctgtggagggccacgagaggtctgtgacagtgacccccctggatgctggcaggaagtaccgcttcctgctgtatggcctgctgggcaagaagagacatggccccctgacagcagatggcaccacagaggcccggagcgccatggatgacaccggcaccaagaggcctcccaagccccggctgggggaggagctgcaggtgaccaccgtgacccagaacagcgtgggcctgtcctggacagtgcctgagggccagtttgacagctttgtggtgcagtacaaggacagagatggccagccccaggtggtgcctgtggagggcagcctgcgggaggtgtctgtgcccggcctggaccctgcccaccgctacaagctgctgctgtatggcctgcaccacggcaagagggtgggccccatctctgctgtggccatcacagctggccgggaggagacagaaacagagaccacagcccccaccccaccagcccctgagccccacctgggggagctgactgtggaggaggccaccagccacaccctgcacctgtcctggatggtgacagaaggagaatttgacagctttgagatccagtacacagacagagatggccagctgcagatggtgagaattggaggagacagaaatgacatcaccctgagcggcctggagagtgaccaccgctacctggtgaccctgtatggcttcagtgatggcaagcacgtgggccctgtgcacgtggaggccctgactgtgcctgaggaggagaagcccagcgagcccccaacagccaccccagagccccccatcaagccccggctgggggagctgactgtgacagatgccaccccagacagcctgagcctgtcctggacagtgcctgagggccagtttgaccacttcctggtgcagtacagaaatggagatggccagcccaaggctgtgcgggtgcccggccacgaggagggcgtgaccatcagcggcctggagccagaccacaagtacaagatgaacctgtatggcttccatggaggccagaggatgggccctgtgtctgtggtgggcgtgacagctgctgaggaggagacccccagccccacagagcccagcatggaggcccctgagcctgctgaggagcccctgctgggggagctgactgtgacaggcagcagcccagacagcctgagcctgtcctggacagtgccccagggccgctttgacagcttcaccgtgcagtacaaggacagagatggccggccccaggtggtgcgggtgggcggggaggagagcgaggtgacagtgggcggcctggagcccggcaggaagtacaagatgcacctgtatggcctgcacgagggccggcgggtgggccctgtgtctgctgtgggcgtgacagcccctgaggaggagagcccagatgcccccctggccaagctgcggctgggccagatgacagtgcgggacatcaccagtgacagcctgagcctgtcctggacagtgcctgagggccagtttgaccacttcctggtgcagttcaagaatggagatggccagcccaaggctgtgcgggtgcccggccatgaagatggagtgaccatcagcggcctggagccagaccacaagtacaagatgaacctgtatggcttccacggcggccagagggtgggccctgtgtctgctgtgggcctgacagcccctgggaaggatgaggagatggccccagccagcacagagccccccaccccagagccccccatcaagccccggctggaggagctgactgtgacagatgccaccccagacagcctgagcctgtcctggacagtgcctgagggccagtttgaccacttcctggtgcagtacaagaatggagatggccagcccaaggccaccagggtgcccggccatgaagatagagtgaccatcagcggcctggagccagacaacaagtacaagatgaacctgtatggcttccatggaggccagagggtgggccctgtgtctgccatcggcgtgacagctgctgaggaggagacccccagccccacagagcccagcatggaggcccctgagcccccagaggagcccctgctgggggagctgactgtgacaggcagcagcccagacagcctgagcctgtcctggacagtgccccagggccgctttgacagcttcaccgtgcagtacaaggacagagatggccggccccaggtggtgcgggtgggcggggaggagagcgaggtgacagtgggcggcctggagcccggcaggaagtacaagatgcacctgtatggcctgcacgagggccggcgggtgggccctgtgtccacagtgggcgtgacagccccccaggaggatgtggatgagacccccagccccacagagcccggcacagaggcccctgagcccccagaggagcccctgctgggggagctgactgtgacaggcagcagcccagacagcctgagcctgtcctggacagtgccccagggccgctttgacagcttcaccgtgcagtacaaggacagagatggccggccccaggccgtgcgggtgggcggccaggagagcaaggtgacagtgcggggcctggagcccggcaggaagtacaagatgcacctgtatggcctgcacgagggccgccgcctgggccctgtgtctgctgtgggcgtgacagaagatgaggccgagaccacccaggccgtgcccaccatgaccccagagccccccatcaagccccggctgggggagctgaccatgacagatgccaccccagacagcctgagcctgtcctggacagtgcctgagggccagtttgaccacttcctggtgcagtacagaaatggagatggccagcccaaggctgtgcgggtgcccggccatgaagatggagtgaccatcagcggcctggagccagaccacaagtacaagatgaacctgtatggcttccacggcggccagagggtgggccccatctctgtgattggagtgacagctgctgaggaggagacccccagccccacagagctgagcacagaggcccctgagcccccagaggagcccctgctgggggagctgactgtgacaggcagcagcccagacagcctgagcctgtcctggaccatcccccagggccactttgacagcttcaccgtgcagtacaaggacagagatggccggccccaggtgatgagggtgcggggggaggagagcgaggtgacagtgggcggcctggagcccggcaggaagtacaagatgcacctgtatggcctgcacgagggcagaagagtgggccctgtgtccacagtgggcgtgacagtgcccaccaccaccccagagccccccaacaagccccggctgggggagctgactgtgacagatgccaccccagacagcctgagcctgtcctggatggtgcctgagggccagtttgaccacttcctggtgcagtacagaaatggagatggccagcccaaggtggtgcgggtgcccggccatgaagatggagtgaccatcagcggcctggagccagaccacaagtacaagatgaacctgtatggcttccatggaggccagagggtgggccccatcagcgtcatcggcgtgacagctgctgaggaggagaccccagcccccacagagcccagcacagaggcccctgagcccccagaggagcccctgctgggggagctgactgtgacaggcagcagcccagacagcctgagcctgtcctggaccatcccccagggccgctttgacagcttcaccgtgcagtacaaggacagagatggccggccccaggtggtgcgggtgcggggggaggagagcgaggtgacagtgggcggcctggagcccggctgcaagtacaagatgcacctgtatggcctgcacgagggccagagggtgggccctgtgtctgctgtgggcgtgacagtgcccaccatgaccccagagccccccatcaagccccggctgggggagctgactgtgacagatgccaccccagacagcctgagcctgtcctggatggtgcctgagggccagtttgaccacttcctggtgcagtacagaaatggagatggccagcccaaggctgtgcgggtgcccggccatgaagatggagtgaccatcagcggcctggagccagaccacaagtacaagatgaacctgtatggcttccacggcggccagagggtgggccctgtgtctgccatcggcgtgacagaggaggagacccccagccccacagagcccagcacagaggcccctgaggcccctgaggagcccctgctgggggagctgactgtgacaggcagcagcccagacagcctgagcctgtcctggacagtgccccagggccgctttgacagcttcaccgtgcagtacaaggacagagatggccagccccaggtggtgcgggtgcggggggaggagagcgaggtgacagtgggcggcctggagcccggcaggaagtacaagatgcacctgtatggcctgcacgagggccagagggtgggccctgtgtccacagtgggcatcacagcccccctgcccacccccctgcctgtggagccccggctgggggagctggccgtggccgctgtgaccagtgacagcgtgggcctgtcctggacagtggcccagggcccctttgacagcttcctggtgcagtacagagatgcccagggccagccccaggccgtgcctgtgtctggggacctgcgggctgtggccgtgtctggcctggaccctgccaggaagtacaagttcctgctgtttggcctgcagaatggcaagagacatggccctgtgcctgtggaggccaggacagccccagacaccaagcccagcccccggctgggggagctgactgtgacagatgccaccccagacagcgtgggcctgtcctggacagtgcctgagggggagtttgacagctttgtggtgcagtacaaggacaaggatggccgcctgcaggtggtgcctgtggccgccaaccagcgggaggtgacagtgcagggcctggagcccagcaggaagtaccgcttcctgctgtatggcctgagcggcaggaagaggctgggccccatctctgctgacagcaccacagcccccctggagaaggagctgcccccccacctgggggagctgactgtggccgaggagaccagcagcagcctgcggctgtcctggacagtggcccagggcccctttgacagctttgtggtgcagtacagagacacagatggccagcccagggctgtgcctgtggccgctgaccagaggacagtgacagtggaggacctggagcccgggaagaagtacaagttcctgctgtatggcctgctgggcggcaagaggctgggccctgtgtctgccctgggcatgacagcccctgaggaggacaccccagcccctgagctggcccctgaggcccctgagcccccagaggagccccggctgggcgtgctgactgtgacagacaccaccccagacagcatgaggctgtcctggagcgtggcccagggcccctttgacagctttgtggtgcagtatgaggacaccaacggccagccccaggccctgctggtggatggagaccagagcaagatcctgatcagcggcctggagcccagcaccccctaccgcttcctgctgtatggcctgcacgagggcaagaggctgggccccctgtctgctgagggcaccaccggcctggccccagctggccagaccagcgaggagagccggccccggctgagccagctgtctgtgacagatgtgaccaccagcagcctgcggctgaactgggaggcccctcctggggcctttgacagcttcctgctgcgctttggagtgcccagccccagcaccctggagccccacccccggcccctgctgcagcgggagctgatggtgcccggcaccaggcacagcgctgtgctgcgggacctgcggagcggcaccctgtacagcctgaccctgtatggcctgcggggcccccacaaggctgacagcatccagggcacagcccggaccctgagccctgtgctggagagcccccgggacctgcagttcagcgagatccgggagaccagcgccaaggtgaactggatgcccccacccagcagagctgacagcttcaaggtgtcctaccagctggctgatggaggagagccccagagcgtgcaggtggatggccaggcccggacccagaagctgcagggcctcatccctggggcccgctatgaggtgacagtggtgtctgtgcggggctttgaggagagcgagcccctgaccggcttcctgaccaccgtgcctgatggccccacccagctgcgggccctgaacctgacagagggctttgctgtgctgcactggaagccaccccagaaccctgtggacacctatgacatccaggtgacagcccctggggccccacccctgcaggccgagaccccaggcagcgctgtggactaccccctgcatgacctggtgctgcacaccaactacacagccaccgtgcggggcctgcggggccccaacctgaccagccctgccagcatcaccttcaccaccggcctggaggccccccgggacctggaggccaaggaggtgacccccaggacagccctgctgacctggacagagccccctgtgcggcctgctggctacctgctgtccttccacacccctgggggccagacccaggagatcctgctgcccggcggcatcaccagccaccagctgctgggcctcttccccagcaccagctacaatgcccggctgcaggccatgtggggccagagcctgctgccccctgtgtccaccagcttcaccactggaggcctgcgcatccccttcccccgggactgtggggaggagatgcagaatggagctggggccagcaggaccagcaccatcttcctgaatggaaaccgggagcggcccctgattgtgttctgtgacatggagacagatggcggcggctggctggtgttccagaggaggatggatggccagacagacttctggagggactgggaggactatgcccacggctttggaaacatctctggagagttctggctgggcaatgaggccctgcacagcctgacccaggccggggactacagcatgagggtggacctgcgggctggagatgaggccgtgtttgcccagtatgacagcttccacgtggacagcgctgctgagtactaccgcctgcacctggagggctaccatggaacagctggggacagcatgagctaccacagcggcagcgtcttcagcgcccgggaccgggaccccaacagcctgctgatcagctgtgctgtgtcctacagaggagcctggtggtacagaaactgccactacgccaacctgaatggcctgtatggcagcacagtggaccaccagggcgtgtcctggtaccactggaagggctttgagttctctgtgcccttcacagagatgaagctgcggcccaggaacttccgcagccctgctgggggcggctag

SEQ ID NO: 172926 - DNA, 27 bp, synthetic construct
  misc_feature 1..27: note = Description of Artificial Sequence: Synthetic coding sequence
  source 1..27: mol_type = other DNA
atgatgcctgcccagtatgccctgtag

SEQ ID NO: 172927 - DNA, 1905 bp, synthetic construct
  misc_feature 1..1905: note = Description of Artificial Sequence: Synthetic coding sequence
  source 1..1905: mol_type = other DNA
tgaagcagccccctgggcctgctgggcaccacagatgagcccccaccttctggccccagcaccacccagggcgcccaggcccccctgctgcagcagaggccccaggagctgggggagctgcgggtgctgggcagagatgagaccggccgcctgcgggtggtgtggacagcccagcctgacacctttgcctacttccagctgaggatgagggtgcctgagggccctggggcccacgaggaggtgctgcctggagatgtgcggcaggccctggtgcccccacctcctcctggcaccccctatgagctgagcctgcatggagtgcccccaggcggcaagcccagcgaccccatcatctaccagggcatcatggacaaggatgaggagaagccaggcaagagcagcggccccccccggctgggggagctgactgtgacagacaggaccagtgacagcctgctgctgcgctggacagtgcctgagggggagtttgacagctttgtgatccagtacaaggacagagatggccagccccaggtggtgcctgtggagggcccccagaggtctgctgtgatcaccagcctggaccccggcaggaagtacaagtttgtgctgtatggctttgtgggcaagaagagacatggccccctggtggccgaggccaagatcctgccccagagcgaccccagccctggcaccccaccccggctgggcaacctgtgggtgacagaccccaccccagacagcctgcacctgtcctggacagtgcctgagggccagtttgacaccttcatggtgcagtacagagacagagatggccggccccaggtggtgcctgtggagggccctgagaggagctttgtggtgagcagcctggaccctgaccacaagtaccgcttcaccctgtttggcatcgccaacaagaagagatatggccccctgacagcagatggcaccacagcccctgagaggaaggaggagccccccaggcctgagttcctggagcagcccctgctgggggagctgactgtgactggagtgaccccagacagcctgcggctgtcctggacagtggcccagggcccctttgacagcttcatggtgcagtacaaggatgcccagggccagccccaggccgtgcctgtggccggagatgaaaatgaggtgacagtgcccggcctggaccctgacaggaagtacaagatgaacctgtatggcctgcggggccggcagagggtgggccctgagagcgtggtggccaagacagccccccaggaggatgtggatgagacccccagccccacagagctgggcacagaggcccctgagagccctgaggagcccctgctgggggagctgactgtgacaggcagcagcccagacagcctgagcctcttctggacagtgccccagggcagctttgacagcttcaccgtgcagtacaaggacagagatggccggcccagggctgtgcgggtgggcggcaaggagagcgaggtgacagtgggcggcctggagcccggccacaagtacaagatgcacctgtatggcctgcacgagggccagagggtgggccctgtgtctgctgtgggcgtgacagccccccagcaggaggagaccccaccagccacagagagccccctggagccccggctgggggagctgactgtgacagatgtgacccccaacagcgtgggcctgtcctggacagtgcctgagggccagtttgacagcttcatcgtgcagtacaaggacaaggatggccagccccaggtggtgcctgtggccgctgaccagcgggaggtgacagtgtacaacctggagcctgagaggaagtacaagatgaacatgtatggcctgcatgatggccagaggatgggccccctgtctgtggtgattgtgacctag

SEQ ID NO: 172928 - DNA, 27 bp, synthetic construct
  misc_feature 1..27: note = Description of Artificial Sequence: Synthetic coding sequence
  source 1..27: mol_type = other DNA
atgatgcctgcccagtatgccctgtag

SEQ ID NO: 172929 - DNA, 12669 bp, synthetic construct
  misc_feature 1..12669: note = Description of Artificial Sequence: Synthetic coding sequence
  source 1..12669: mol_type = other DNA
atgatgcctgcccagtatgccctgaccagcagcctggtgctgctggtgctgctgagcacagcccgggccggccccttcagcagccgcagcaatgtgaccctgcctgccccccggcccccaccccagcccggcggccacacagtgggcgctggggtgggcagccccagcagccagctgtatgagcacacagtggagggcggggagaagcaggtggtgttcacccaccgcatcaacctgccccccagcacaggctgcggctgccccccaggcacagagccccctgtgctggccagcgaggtgcaggccctgcgggtgcggctggagatcctggaggagctggtgaagggcctgaaggagcagtgcaccggcggctgctgcccagccagcgcccaggccggcaccggccagacagatgtgaggaccctgtgcagcctgcacggcgtgtttgacctgagccgctgcacctgcagctgtgagcccggctggggcggccccacctgcagcgaccccacagatgctgagatcccccccagcagcccccccagcgccagcggcagctgcccagatgactgcaatgaccagggccgctgtgtgcggggccgctgtgtgtgcttccctggctacacaggccccagctgtggctggcccagctgccctggggactgccagggccggggccgctgtgtgcagggcgtgtgtgtgtgcagagctggcttcagcggccctgactgcagccagaggagctgcccccggggctgcagccagaggggccgctgtgagggcggccgctgtgtgtgtgaccccggctacacaggagatgactgtggcatgaggagctgcccccggggctgcagccagaggggccgctgtgaaaatggccgctgtgtgtgcaaccctggctacaccggggaggactgtggggtgcgcagctgcccccggggctgcagccagaggggccgctgcaaggatggccgctgtgtgtgtgaccccggctacacaggagaggactgtggcaccaggagctgcccctgggactgtggggagggcggccgctgtgtggatggccgctgtgtgtgctggccaggctacaccggggaggactgcagcaccaggacctgcccccgggactgccggggccggggccgctgtgaagatggagagtgcatctgtgacaccggctacagcggagatgactgtggggtgcgcagctgccctggggactgcaaccagaggggccgctgtgaagatggccgctgtgtgtgctggccaggctacacaggaacagactgtggcagccgggcctgcccccgggactgccggggccggggccgctgtgaaaatggagtgtgtgtgtgcaatgccggctacagcggggaggactgtggggtgcgcagctgccctggggactgccggggccggggccgctgtgagagcggccgctgcatgtgctggccaggctacacaggccgggactgtggcacccgggcctgccctggggactgccggggccggggccgctgtgtggatggccgctgtgtgtgcaaccctggcttcaccggggaggactgtggcagccgccgctgccctggggactgccggggccacggcctgtgtgaagatggagtgtgtgtgtgtgatgctggctacagcggggaggactgcagcaccaggagctgccctgggggctgccggggccggggccagtgcctggatggccgctgtgtgtgtgaagatggctacagcggggaggactgtggggtgcggcagtgccccaatgactgcagccagcacggcgtgtgccaggatggagtgtgcatctgctgggagggctacgtgtctgaggactgcagcatccgcacctgccccagcaactgccacggccggggccgctgtgaggagggccgctgcctgtgtgaccccggctacacaggccccacctgtgccaccaggatgtgcccagctgactgccggggccggggccgctgtgtgcagggcgtgtgcctgtgccacgtgggctatggaggagaggactgtggccaggaggagcccccagccagcgcctgccctgggggctgcggcccccgggagctgtgccgggccggccagtgtgtgtgtgtggagggcttccggggccctgactgtgccatccagacctgccctggggactgccggggccgcggggagtgccatgatggcagctgtgtgtgcaaggatggctatgctggggaggactgtggggaggaggtgcccaccatcgagggcatgaggatgcacctgctggaggagaccaccgtgaggacagagtggaccccagcccctggccctgtggatgcctatgagatccagttcatccccaccacagaaggagccagcccccccttcaccgcccgggtgcccagcagcgccagcgcctatgaccagaggggcctggcccctggccaggagtaccaggtgacagtgcgggccctgcggggcacctcctggggcctgcctgccagcaagaccatcaccaccatgattgatggcccccaggacctgcgggtggtggccgtgacccccaccaccctggagctgggctggctgcggccccaggccgaggtggacagatttgtggtgtcctatgtgtctgctggcaaccagagggtgcggctggaggtgcccccagaggctgatggcaccctgctgacagacctgatgcctggggtggagtatgtggtgacagtgacagctgagcggggccgggctgtgtcctacccagcctctgtgcgggccaacacaggcagcagccccctgggcctgctgggcaccacagatgagcccccaccttctggccccagcaccacccagggcgcccaggcccccctgctgcagcagaggccccaggagctgggggagctgcgggtgctgggcagagatgagaccggccgcctgcgggtggtgtggacagcccagcctgacacctttgcctacttccagctgaggatgagggtgcctgagggccctggggcccacgaggaggtgctgcctggagatgtgcggcaggccctggtgcccccacctcctcctggcaccccctatgagctgagcctgcatggagtgcccccaggcggcaagcccagcgaccccatcatctaccagggcatcatggacaaggatgaggagaagccaggcaagagcagcggccccccccggctgggggagctgactgtgacagacaggaccagtgacagcctgctgctgcgctggacagtgcctgagggggagtttgacagctttgtgatccagtacaaggacagagatggccagccccaggtggtgcctgtggagggcccccagaggtctgctgtgatcaccagcctggaccccggcaggaagtacaagtttgtgctgtatggctttgtgggcaagaagagacatggccccctggtggccgaggccaagatcctgccccagagcgaccccagccctggcaccccaccccggctgggcaacctgtgggtgacagaccccaccccagacagcctgcacctgtcctggacagtgcctgagggccagtttgacaccttcatggtgcagtacagagacagagatggccggccccaggtggtgcctgtggagggccctgagaggagctttgtggtgagcagcctggaccctgaccacaagtaccgcttcaccctgtttggcatcgccaacaagaagagatatggccccctgacagcagatggcaccacagcccctgagaggaaggaggagcccccccaccctgagttcctggagcagcccctgctgggggagctgactgtgactggagtgaccccagacagcctgcggctgtcctggacagtggcccagggcccctttgacagcttcatggtgcagtacaaggatgcccagggccagccccaggccgtgcctgtggccggagatgaaaatgaggtgacagtgcccggcctggaccctgacaggaagtacaagatgaacctgtatggcctgcggggccggcagagggtgggccctgagagcgtggtggccaagacagccccccaggaggatgtggatgagacccccagccccacagagctgggcacagaggcccctgagagccctgaggagcccctgctgggggagctgactgtgacaggcagcagcccagacagcctgagcctcttctggacagtgccccagggcagctttgacagcttcaccgtgcagtacaaggacagagatggccggcccagggctgtgcgggtgggcggcaaggagagcgaggtgacagtgggcggcctggagcccggccacaagtacaagatgcacctgtatggcctgcacgagggccagagggtgggccctgtgtctgctgtgggcgtgacagccccccagcaggaggagaccccaccagccacagagagccccctggagccccggctgggggagctgactgtgacagatgtgacccccaacagcgtgggcctgtcctggacagtgcctgagggccagtttgacagcttcatcgtgcagtacaaggacaaggatggccagccccaggtggtgcctgtggccgctgaccagcgggaggtgacagtgtacaacctggagcctgagaggaagtacaagatgaacatgtatggcctgcatgatggccagaggatgggccccctgtctgtggtgattgtgacagcccccctgcccccagccccagccacagaggccagcaagccacccctggagccccggctgggggagctgactgtgacagacatcaccccagacagcgtgggcctgtcctggacagtgcctgagggggagtttgacagctttgtggtgcagtacaaggacagagatggccagccccaggtggtgcctgtggccgctgaccagcgggaggtgaccatcccagacctggagcccagcaggaagtacaagttcctgctgtttggcatccaggacggcaagagaagaagccctgtgtctgtggaggccaagacagtggcccggggagatgccagccctggggccccaccccggctgggggagctgtgggtgacagaccccaccccagacagcctgcggctgtcctggacagtgcctgagggccagtttgacagctttgtggtgcagttcaaggacaaggatggcccccaggtggtgcctgtggagggccacgagaggtctgtgacagtgacccccctggatgctggcaggaagtaccgcttcctgctgtatggcctgctgggcaagaagagacatggccccctgacagcagatggcaccacagaggcccggagcgccatggatgacaccggcaccaagaggcctcccaagccccggctgggggaggagctgcaggtgaccaccgtgacccagaacagcgtgggcctgtcctggacagtgcctgagggccagtttgacagctttgtggtgcagtacaaggacagagatggccagccccaggtggtgcctgtggagggcagcctgcgggaggtgtctgtgcccggcctggaccctgcccaccgctacaagctgctgctgtatggcctgcaccacggcaagagggtgggccccatctctgctgtggccatcacagctggccgggaggagacagaaacagagaccacagcccccaccccaccagcccctgagccccacctgggggagctgactgtggaggaggccaccagccacaccctgcacctgtcctggatggtgacagaaggagaatttgacagctttgagatccagtacacagacagagatggccagctgcagatggtgagaattggaggagacagaaatgacatcaccctgagcggcctggagagtgaccaccgctacctggtgaccctgtatggcttcagtgatggcaagcacgtgggccctgtgcacgtggaggccctgactgtgcctgaggaggagaagcccagcgagcccccaacagccaccccagagccccccatcaagccccggctgggggagctgactgtgacagatgccaccccagacagcctgagcctgtcctggacagtgcctgagggccagtttgaccacttcctggtgcagtacagaaatggagatggccagcccaaggctgtgcgggtgcccggccacgaggagggcgtgaccatcagcggcctggagccagaccacaagtacaagatgaacctgtatggcttccatggaggccagaggatgggccctgtgtctgtggtgggcgtgacagctgctgaggaggagacccccagccccacagagcccagcatggaggcccctgagcctgctgaggagcccctgctgggggagctgactgtgacaggcagcagcccagacagcctgagcctgtcctggacagtgccccagggccgctttgacagcttcaccgtgcagtacaaggacagagatggccggccccaggtggtgcgggtgggcggggaggagagcgaggtgacagtgggcggcctggagcccggcaggaagtacaagatgcacctgtatggcctgcacgagggccggcgggtgggccctgtgtctgctgtgggcgtgacagcccctgaggaggagagcccagatgcccccctggccaagctgcggctgggccagatgacagtgcgggacatcaccagtgacagcctgagcctgtcctggacagtgcctgagggccagtttgaccacttcctggtgcagttcaagaatggagatggccagcccaaggctgtgcgggtgcccggccatgaagatggagtgaccatcagcggcctggagccagaccacaagtacaagatgaacctgtatggcttccacggcggccagagggtgggccctgtgtctgctgtgggcctgacagcccctgggaaggatgaggagatggccccagccagcacagagccccccaccccagagccccccatcaagccccggctggaggagctgactgtgacagatgccaccccagacagcctgagcctgtcctggacagtgcctgagggccagtttgaccacttcctggtgcagtacaagaatggagatggccagcccaaggccaccagggtgcccggccatgaagatagagtgaccatcagcggcctggagccagacaacaagtacaagatgaacctgtatggcttccatggaggccagagggtgggccctgtgtctgccatcggcgtgacagctgctgaggaggagacccccagccccacagagcccagcatggaggcccctgagcccccagaggagcccctgctgggggagctgactgtgacaggcagcagcccagacagcctgagcctgtcctggacagtgccccagggccgctttgacagcttcaccgtgcagtacaaggacagagatggccggccccaggtggtgcgggtgggcggggaggagagcgaggtgacagtgggcggcctggagcccggcaggaagtacaagatgcacctgtatggcctgcacgagggccggcgggtgggccctgtgtccacagtgggcgtgacagccccccaggaggatgtggatgagacccccagccccacagagcccggcacagaggcccctgagcccccagaggagcccctgctgggggagctgactgtgacaggcagcagcccagacagcctgagcctgtcctggacagtgccccagggccgctttgacagcttcaccgtgcagtacaaggacagagatggccggccccaggccgtgcgggtgggcggccaggagagcaaggtgacagtgcggggcctggagcccggcaggaagtacaagatgcacctgtatggcctgcacgagggccgccgcctgggccctgtgtctgctgtgggcgtgacagaagatgaggccgagaccacccaggccgtgcccaccatgaccccagagccccccatcaagccccggctgggggagctgaccatgacagatgccaccccagacagcctgagcctgtcctggacagtgcctgagggccagtttgaccacttcctggtgcagtacagaaatggagatggccagcccaaggctgtgcgggtgcccggccatgaagatggagtgaccatcagcggcctggagccagaccacaagtacaagatgaacctgtatggcttccacggcggccagagggtgggccccatctctgtgattggagtgacagctgctgaggaggagacccccagccccacagagctgagcacagaggcccctgagcccccagaggagcccctgctgggggagctgactgtgacaggcagcagcccagacagcctgagcctgtcctggaccatcccccagggccactttgacagcttcaccgtgcagtacaaggacagagatggccggccccaggtgatgagggtgcggggggaggagagcgaggtgacagtgggcggcctggagcccggcaggaagtacaagatgcacctgtatggcctgcacgagggcagaagagtgggccctgtgtccacagtgggcgtgacagtgcccaccaccaccccagagccccccaacaagccccggctgggggagctgactgtgacagatgccaccccagacagcctgagcctgtcctggatggtgcctgagggccagtttgaccacttcctggtgcagtacagaaatggagatggccagcccaaggtggtgcgggtgcccggccatgaagatggagtgaccatcagcggcctggagccagaccacaagtacaagatgaacctgtatggcttccatggaggccagagggtgggccccatcagcgtcatcggcgtgacagctgctgaggaggagaccccagcccccacagagcccagcacagaggcccctgagcccccagaggagcccctgctgggggagctgactgtgacaggcagcagcccagacagcctgagcctgtcctggaccatcccccagggccgctttgacagcttcaccgtgcagtacaaggacagagatggccggccccaggtggtgcgggtgcggggggaggagagcgaggtgacagtgggcggcctggagcccggctgcaagtacaagatgcacctgtatggcctgcacgagggccagagggtgggccctgtgtctgctgtgggcgtgacagtgcccaccatgaccccagagccccccatcaagccccggctgggggagctgactgtgacagatgccaccccagacagcctgagcctgtcctggatggtgcctgagggccagtttgaccacttcctggtgcagtacagaaatggagatggccagcccaaggctgtgcgggtgcccggccatgaagatggagtgaccatcagcggcctggagccagaccacaagtacaagatgaacctgtatggcttccacggcggccagagggtgggccctgtgtctgccatcggcgtgacagaggaggagacccccagccccacagagcccagcacagaggcccctgaggcccctgaggagcccctgctgggggagctgactgtgacaggcagcagcccagacagcctgagcctgtcctggaccatcccccagggccgctttgacagcttcaccgtgcagtacaaggacagagatggccagccccaggtggtgcgggtgcggggggaggagagcgaggtgacagtgggcggcctggagcccggcaggaagtacaagatgcacctgtatggcctgcacgagggccagagggtgggccctgtgtccacagtgggcatcacagcccccctgcccacccccctgcctgtggagccccggctgggggagctggccgtggccgctgtgaccagtgacagcgtgggcctgtcctggacagtggcccagggcccctttgacagcttcctggtgcagtacagagatgcccagggccagccccaggccgtgcctgtgtctggggacctgcgggctgtggccgtgtctggcctggaccctgccaggaagtacaagttcctgctgtttggcctgcagaatggcaagagacatggccctgtgcctgtggaggccaggacagccccagacaccaagcccagcccccggctgggggagctgactgtgacagatgccaccccagacagcgtgggcctgtcctggacagtgcctgagggggagtttgacagctttgtggtgcagtacaaggacaaggatggccgcctgcaggtggtgcctgtggccgccaaccagcgggaggtgacagtgcagggcctggagcccagcaggaagtaccgcttcctgctgtatggcctgagcggcaggaagaggctgggccccatctctgctgacagcaccacagcccccctggagaaggagctgcccccccacctgggggagctgactgtggccgaggagaccagcagcagcctgcggctgtcctggacagtggcccagggcccctttgacagctttgtggtgcagtacagagacacagatggccagcccagggctgtgcctgtggccgctgaccagaggacagtgacagtggaggacctggagcccgggaagaagtacaagttcctgctgtatggcctgctgggcggcaagaggctgggccctgtgtctgccctgggcatgacagcccctgaggaggacaccccagcccctgagctggcccctgaggcccctgagcccccagaggagccccggctgggcgtgctgactgtgacagacaccaccccagacagcatgaggctgtcctggagcgtggcccagggcccctttgacagctttgtggtgcagtatgaggacaccaacggccagccccaggccctgctggtggatggagaccagagcaagatcctgatcagcggcctggagcccagcaccccctaccgcttcctgctgtatggcctgcacgagggcaagaggctgggccccctgtctgctgagggcaccaccggcctggccccagctggccagaccagcgaggagagccggccccggctgagccagctgtctgtgacagatgtgaccaccagcagcctgcggctgaactgggaggcccctcctggggcctttgacagcttcctgctgcgctttggagtgcccagccccagcaccctggagccccacccccggcccctgctgcagcgggagctgatggtgcccggcaccaggcacagcgctgtgctgcgggacctgcggagcggcaccctgtacagcctgaccctgtatggcctgcggggcccccacaaggctgacagcatccagggcacagcccggaccctgagccctgtgctggagagcccccgggacctgcagttcagcgagatccgggagaccagcgccaaggtgaactggatgcccccacccagcagagctgacagcttcaaggtgtcctaccagctggctgatggaggagagccccagagcgtgcaggtggatggccaggcccggacccagaagctgcagggcctcatccctggggcccgctatgaggtgacagtggtgtctgtgcggggctttgaggagagcgagcccctgaccggcttcctgaccaccgtgcctgatggccccacccagctgcgggccctgaacctgacagagggctttgctgtgctgcactggaagccaccccagaaccctgtggacacctatgacatccaggtgacagcccctggggccccacccctgcaggccgagaccccaggcagcgctgtggactaccccctgcatgacctggtgctgcacaccaactacacagccaccgtgcggggcctgcggggccccaacctgaccagccctgccagcatcaccttcaccaccggcctggaggccccccgggacctggaggccaaggaggtgacccccaggacagccctgctgacctggacagagccccctgtgcggcctgctggctacctgctgtccttccacacccctgggggccagacccaggagatcctgctgcccggcggcatcaccagccaccagctgctgggcctcttccccagcaccagctacaatgcccggctgcaggccacctggggccagagcctgctgccccctgtgtccaccagcttcaccactggaggcctgcgcatccccttcccccgggactgtggggaggagatgcagaatggagctggggccagcaggaccagcaccatcttcctgaatggaaaccgggagcggcccctgaatgtgttctgtgacatggagacagatggcggcggctggctggtgttccagaggaggatggatggccagacagacttctggagggactgggaggactatgcccacggctttggaaacatctctggagagttctggctgggcaatgaggccctgcacagcctgacccaggccggggactacagcatgagggtggacctgcgggctggagatgaggccgtgtttgcccagtatgacagcttccacgtggacagcgctgctgagtactaccgcctgcacctggagggctaccatggaacagctggggacagcatgagctaccacagcggcagcgtcttcagcgcccgggaccgggaccccaacagcctgctgatcagctgtgctgtgtcctacagaggagcctggtggtacagaaactgccactacgccaacctgaatggcctgtatggcagcacagtggaccaccagggcgtgtcctggtaccactggaagggctttgagttctctgtgcccttcacagagatgaagctgcggcccaggaacttccgcagccctgctgggggcggctag

SEQ ID NO: 172930 - DNA, 27 bp, synthetic construct
  misc_feature 1..27: note = Description of Artificial Sequence: Synthetic coding sequence
  source 1..27: mol_type = other DNA
atgatgcctgcccagtatgccctgtag

SEQ ID NO: 172931 - DNA, 6843 bp, synthetic construct
  misc_feature 1..6843: note = Description of Artificial Sequence: Synthetic coding sequence
  source 1..6843: mol_type = other DNA
atgatgcctgcccagtatgccctgaccagcagcctggtgctgctggtgctgctgagcacagcccgggccggccccttcagcagccgcagcaatgtgaccctgcctgccccccggcccccaccccagcccggcggccacacagtgggcgctggggtgggcagccccagcagccagctgtatgagcacacagtggagggcggggagaagcaggtggtgttcacccaccgcatcaacctgccccccagcacaggctgcggctgccccccaggcacagagccccctgtgctggccagcgaggtgcaggccctgcgggtgcggctggagatcctggaggagctggtgaagggcctgaaggagcagtgcaccggcggctgctgcccagccagcgcccaggccggcaccggccagacagatgtgaggaccctgtgcagcctgcacggcgtgtttgacctgagccgctgcacctgcagctgtgagcccggctggggcggccccacctgcagcgaccccacagatgctgagatcccccccagcagcccccccagcgccagcggcagctgcccagatgactgcaatgaccagggccgctgtgtgcggggccgctgtgtgtgcttccctggctacacaggccccagctgtggctggcccagctgccctggggactgccagggccggggccgctgtgtgcagggcgtgtgtgtgtgcagagctggcttcagcggccctgactgcagccagaggagctgcccccggggctgcagccagaggggccgctgtgagggcggccgctgtgtgtgtgaccccggctacacaggagatgactgtggcatgaggagctgcccccggggctgcagccagaggggccgctgtgaaaatggccgctgtgtgtgcaaccctggctacaccggggaggactgtggggtgcgcagctgcccccggggctgcagccagaggggccgctgcaaggatggccgctgtgtgtgtgaccccggctacacaggagaggactgtggcaccaggagctgcccctgggactgtggggagggcggccgctgtgtggatggccgctgtgtgtgctggccaggctacaccggggaggactgcagcaccaggacctgcccccgggactgccggggccggggccgctgtgaagatggagagtgcatctgtgacaccggctacagcggagatgactgtggggtgcgcagctgccctggggactgcaaccagaggggccgctgtgaagatggccgctgtgtgtgctggccaggctacacaggaacagactgtggcagccgggcctgcccccgggactgccggggccggggccgctgtgaaaatggagtgtgtgtgtgcaatgccggctacagcggggaggactgtggggtgcgcagctgccctggggactgccggggccggggccgctgtgagagcggccgctgcatgtgctggccaggctacacaggccgggactgtggcacccgggcctgccctggggactgccggggccggggccgctgtgtggatggccgctgtgtgtgcaaccctggcttcaccggggaggactgtggcagccgccgctgccctggggactgccggggccacggcctgtgtgaagatggagtgtgtgtgtgtgatgctggctacagcggggaggactgcagcaccaggagctgccctgggggctgccggggccggggccagtgcctggatggccgctgtgtgtgtgaagatggctacagcggggaggactgtggggtgcggcagtgccccaatgactgcagccagcacggcgtgtgccaggatggagtgtgcatctgctgggagggctacgtgtctgaggactgcagcatccgcacctgccccagcaactgccacggccggggccgctgtgaggagggccgctgcctgtgtgaccccggctacacaggccccacctgtgccaccaggatgtgcccagctgactgccggggccggggccgctgtgtgcagggcgtgtgcctgtgccacgtgggctatggaggagaggactgtggccaggaggagcccccagccagcgcctgccctgggggctgcggcccccgggagctgtgccgggccggccagtgtgtgtgtgtggagggcttccggggccctgactgtgccatccagacctgccctggggactgccggggccgcggggagtgccatgatggcagctgtgtgtgcaaggatggctatgctggggaggactgtggggaggaggtgcccaccatcgagggcatgaggatgcacctgctggaggagaccaccgtgaggacagagtggaccccagcccctggccctgtggatgcctatgagatccagttcatccccaccacagaaggagccagcccccccttcaccgcccgggtgcccagcagcgccagcgcctatgaccagaggggcctggcccctggccaggagtaccaggtgacagtgcgggccctgcggggcacctcctggggcctgcctgccagcaagaccatcaccaccatgattgatggcccccaggacctgcgggtggtggccgtgacccccaccaccctggagctgggctggctgcggccccaggccgaggtggacagatttgtggtgtcctatgtgtctgctggcaaccagagggtgcggctggaggtgcccccagaggctgatggcaccctgctgacagacctgatgcctggggtggagtatgtggtgacagtgacagctgagcggggccgggctgtgtcctacccagcctctgtgcgggccaacacaggcagcagccccctgggcctgctgggcaccacagatgagcccccaccttctggccccagcaccacccagggcgcccaggcccccctgctgcagcagaggccccaggagctgggggagctgcgggtgctgggcagagatgagaccggccgcctgcgggtggtgtggacagcccagcctgacacctttgcctacttccagctgaggatgagggtgcctgagggccctggggcccacgaggaggtgctgcctggagatgtgcggcaggccctggtgcccccacctcctcctggcaccccctatgagctgagcctgcatggagtgcccccaggcggcaagcccagcgaccccatcatctaccagggcatcatggacaaggatgaggagaagccaggcaagagcagcggccccccccggctgggggagctgactgtgacagacaggaccagtgacagcctgctgctgcgctggacagtgcctgagggggagtttgacagctttgtgatccagtacaaggacagagatggccagccccaggtggtgcctgtggagggcccccagaggtctgctgtgatcaccagcctggaccccggcaggaagtacaagtttgtgctgtatggctttgtgggcaagaagagacatggccccctggtggccgaggccaagatcctgccccagagcgaccccagccctggcaccccaccccacctgggcaacctgtgggtgacagaccccaccccagacagcctgcacctgtcctggacagtgcctgagggccagtttgacaccttcatggtgcagtacagagacagagatggccggccccaggtggtgcctgtggagggccctgagaggagctttgtggtgagcagcctggaccctgaccacaagtaccgcttcaccctgtttggcatcgccaacaagaagagatatggccccctgacagcagatggcaccacagcccctgagaggaaggaggagccccccaggcctgagttcctggagcagcccctgctgggggagctgactgtgactggagtgaccccagacagcctgcggctgtcctggacagtggcccagggcccctttgacagcttcatggtgcagtacaaggatgcccagggccagccccaggccgtgcctgtggccggagatgaaaatgaggtgacagtgcccggcctggaccctgacaggaagtacaagatgaacctgtatggcctgcggggccggcagagggtgggccctgagagcgtggtggccaagacagccccccaggaggatgtggatgagacccccagccccacagagctgggcacagaggcccctgagagccctgaggagcccctgctgggggagctgactgtgacaggcagcagcccagacagcctgagcctcttctggacagtgccccagggcagctttgacagcttcaccgtgcagtacaaggacagagatggccggcccagggctgtgcgggtgggcggcaaggagagcgaggtgacagtgggcggcctggagcccggccacaagtacaagatgcacctgtatggcctgcacgagggccagagggtgggccctgtgtctgctgtgggcgtgacagccccccagcaggaggagaccccaccagccacagagagccccctggagccccggctgggggagctgactgtgacagatgtgacccccaacagcgtgggcctgtcctggacagtgcctgagggccagtttgacagcttcatcgtgcagtacaaggacaaggatggccagccccaggtggtgcctgtggccgctgaccagcgggaggtgacagtgtacaacctggagcctgagaggaagtacaagatgaacatgtatggcctgcatgatggccagaggatgggccccctgtctgtggtgattgtgacagcccccctgcccccagccccagccacagaggccagcaagccacccctggagccccggctgggggagctgactgtgacagacatcaccccagacagcgtgggcctgtcctggacagtgcctgagggggagtttgacagctttgtggtgcagtacaaggacagagatggccagccccaggtggtgcctgtggccgctgaccagcgggaggtgaccatcccagacctggagcccagcaggaagtacaagttcctgctgtttggcatccaggacggcaagagaagaagccctgtgtctgtggaggccaagacagtggcccggggagatgccagccctggggccccaccccggctgggggagctgtgggtgacagaccccaccccagacagcctgcggctgtcctggacagtgcctgagggccagtttgacagctttgtggtgcagttcaaggacaaggatggcccccaggtggtgcctgtggagggccacgagaggtctgtgacagtgacccccctggatgctggcaggaagtaccgcttcctgctgtatggcctgctgggcaagaagagacatggccccctgacagcagatggcaccacagaggcccggagcgccatggatgacaccggcaccaagaggcctcccaagccccggctgggggaggagctgcaggtgaccaccgtgacccagaacagcgtgggcctgtcctggacagtgcctgagggccagtttgacagctttgtggtgcagtacaaggacagagatggccagccccaggtggtgcctgtggagggcagcctgcgggaggtgtctgtgcccggcctggaccctgcccaccgctacaagctgctgctgtatggcctgcaccacggcaagagggtgggccccatctctgctgtggccatcacagctggccgggaggagacagaaacagagaccacagcccccaccccaccagcccctgagccccacctgggggagctgactgtggaggaggccaccagccacaccctgcacctgtcctggatggtgacagaaggagaatttgacagctttgagatccagtacacagacagagatggccagctgcagatggtgagaattggaggagacagaaatgacatcaccctgagcggcctggagagtgaccaccgctacctggtgaccctgtatggcttcagtgatggcaagcacgtgggccctgtgcacgtggaggccctgactgtgcctgaggaggagaagcccagcgagcccccaacagccaccccagagccccccatcaagccccggctgggggagctgactgtgacagatgccaccccagacagcctgagcctgtcctggacagtgcctgagggccagtttgaccacttcctggtgcagtacagaaatggagatggccagcccaaggctgtgcgggtgcccggccacgaggagggcgtgaccatcagcggcctggagccagaccacaagtacaagatgaacctgtatggcttccatggaggccagaggatgggccctgtgtctgtggtgggcgtgacagctgctgaggaggagacccccagccccacagagcccagcatggaggcccctgagcctgctgaggagcccctgctgggggagctgactgtgacaggcagcagcccagacagcctgagcctgtcctggacagtgccccagggccgctttgacagcttcaccgtgcagtacaaggacagagatggccggccccaggtggtgcgggtgggcggggaggagagcgaggtgacagtgggcggcctggagcccggcaggaagtacaagatgcacctgtatggcctgcacgagggccggcgggtgggccctgtgtctgctgtgggcgtgacagcccctgaggaggagagcccagatgcccccctggccaagctgcggctgggccagatgacagtgcgggacatcaccagtgacagcctgagcctgtcctggacagtgcctgagggccagtttgaccacttcctggtgcagttcaagaatggagatggccagcccaaggctgtgcgggtgcccggccatgaagatggagtgaccatcagcggcctggagccagaccacaagtacaagatgaacctgtatggcttccacggcggccagagggtgggccctgtgtctgctgtgggcctgacctag

SEQ ID NO: 172932 - DNA, 2022 bp, synthetic construct
  misc_feature 1..2022: note = Description of Artificial Sequence: Synthetic coding sequence
  source 1..2022: mol_type = other DNA
atgaggctgtcctggagcgtggcccagggcccctttgacagctttgtggtgcagtatgaggacaccaacggccagccccaggccctgctggtggatggagaccagagcaagatcctgatcagcggcctggagcccagcaccccctaccgcttcctgctgtatggcctgcacgagggcaagaggctgggccccctgtctgctgagggcaccaccggcctggccccagctggccagaccagcgaggagagccggccccggctgagccagctgtctgtgacagatgtgaccaccagcagcctgcggctgaactgggaggcccctcctggggcctttgacagcttcctgctgcgcttcggcgtgcccagccccagcaccctggagccccacccccggcccctgctgcagcgggagctgatggtgcccggcaccaggcacagcgctgtgctgcgggacctgcggagcggcaccctgtacagcctgaccctgtatggcctgcggggcccccacaaggctgacagcatccagggcacagcccggaccctgagccctgtgctggagagcccccgggacctgcagttcagcgagatccgggagaccagcgccaaggtgaactggatgcccccacccagcagagctgacagcttcaaggtgtcctaccagctggctgatggaggagagccccagagcgtgcaggtggatggccaggcccggacccagaagctgcagggcctcatccctggggcccgctatgaggtgacagtggtgtctgtgcggggctttgaggagagcgagcccctgaccggcttcctgaccaccgtgcctgatggccccacccagctgcgggccctgaacctgacagagggctttgctgtgctgcactggaagccaccccagaaccctgtggacacctatgacatccaggtgacagcccctggggccccacccctgcaggccgagaccccaggcagcgctgtggactaccccctgcatgacctggtgctgcacaccaactacacagccaccgtgcggggcctgcggggccccaacctgaccagccctgccagcatcaccttcaccaccggcctggaggccccccgggacctggaggccaaggaggtgacccccaggacagccctgctgacctggacagagccccctgtgcggcctgctggctacctgctgtccttccacaccccaggcggccagacccaggagatcctgctgcccggcggcatcaccagccaccagctgctgggcctcttccccagcaccagctacaatgcccggctgcaggccatgtggggccagagcctgctgccccctgtgtccaccagcttcaccaccggcggcctgcgcatccccttcccccgggactgtggggaggagatgcagaatggagctggggccagcaggaccagcaccatcttcctgaatggaaaccgggagcggcccctcatcgtgttctgtgacatggagacagatggcggcggctggctggtgttccagaggaggatggatggccagacagacttctggagggactgggaggactatgcccacggcttcggcaacatcagcggggagttctggctgggcaatgaggccctgcacagcctgacccaggccggggactacagcatgagggtggacctgcgggctggagatgaagctgtgtttgcccagtatgacagcttccacgtggacagcgctgctgagtactaccgcctgcacctggagggctaccacggcacagctggggacagcatgagctaccacagcggctctgtgttcagcgcccgggaccgggaccccaacagcctgctgatcagctgtgctgtgtcctacagaggagcctggtggtacagaaactgccactacgccaacctgaatggcctgtatggcagcacagtggaccaccagggcgtgtcctggtaccactggaagggctttgagttctctgtgcccttcacagagatgaagctgcggcccaggaacttccgcagccctgctgggggcggctag

SEQ ID NO: 172933 - DNA, 654 bp, synthetic construct
  misc_feature 1..654: note = Description of Artificial Sequence: Synthetic coding sequence
  source 1..654: mol_type = other DNA
gcccctgggaaggatgaggagatggccccagccagcacagagccccccaccccagagccccccatcaagccccggctggaggagctgactgtgacagatgccaccccagacagcctgagcctgtcctggacagtgcctgagggccagtttgaccacttcctggtgcagtacaagaatggagatggccagcccaaggccaccagggtgcccggccatgaagatagagtgaccatcagcggcctggagccagacaacaagtacaagatgaacctgtatggcttccatggaggccagagggtgggccctgtgtctgccatcggcgtgacagctgctgaggaggagacccccagccccacagagcccagcatggaggcccctgagcccccagaggagcccctgctgggggagctgactgtgacaggcagcagcccagacagcctgagcctgtcctggacagtgccccagggccgctttgacagcttcaccgtgcagtacaaggacagagatggccggccccaggtggtgcgggtgggcggggaggagagcgaggtgacagtgggcggcctggagcccggcaggaagtacaagatgcacctgtatggcctgcacgagggccggcgggtgggccctgtgtccacagtgggcgtgacctag

SEQ ID NO: 172934 - DNA, 12729 bp, synthetic construct
  misc_feature 1..12729: note = Description of Artificial Sequence: Synthetic coding sequence
  source 1..12729: mol_type = other DNA
atgatgcctgcccagtatgccctgaccagcagcctggtgctgctggtgctgctgagcacagcccgggccggccccttcagcagccgcagcaatgtgaccctgcctgccccccggcccccaccccagcccggcggccacacagtgggcgctggggtgggcagccccagcagccagctgtatgagcacacagtggagggcggggagaagcaggtggtgttcacccaccgcatcaacctgccccccagcacaggctgcggctgccccccaggcacagagccccctgtgctggccagcgaggtgcaggccctgcgggtgcggctggagatcctggaggagctggtgaagggcctgaaggagcagtgcaccggcggctgctgcccagccagcgcccaggccggcaccggccagacagatgtgaggaccctgtgcagcctgcacggcgtgtttgacctgagccgctgcacctgcagctgtgagcccggctggggcggccccacctgcagcgaccccacagatgctgagatcccccccagcagcccccccagcgccagcggcagctgcccagatgactgcaatgaccagggccgctgtgtgcggggccgctgtgtgtgcttccctggctacacaggccccagctgtggctggcccagctgccctggggactgccagggccggggccgctgtgtgcagggcgtgtgtgtgtgcagagctggcttcagcggccctgactgcagccagaggagctgcccccggggctgcagccagaggggccgctgtgagggcggccgctgtgtgtgtgaccccggctacacaggagatgactgtggcatgaggagctgcccccggggctgcagccagaggggccgctgtgaaaatggccgctgtgtgtgcaaccctggctacaccggggaggactgtggggtgcgcagctgcccccggggctgcagccagaggggccgctgcaaggatggccgctgtgtgtgtgaccccggctacacaggagaggactgtggcaccaggagctgcccctgggactgtggggagggcggccgctgtgtggatggccgctgtgtgtgctggccaggctacaccggggaggactgcagcaccaggacctgcccccgggactgccggggccggggccgctgtgaagatggagagtgcatctgtgacaccggctacagcggagatgactgtggggtgcgcagctgccctggggactgcaaccagaggggccgctgtgaagatggccgctgtgtgtgctggccaggctacacaggaacagactgtggcagccgggcctgcccccgggactgccggggccggggccgctgtgaaaatggagtgtgtgtgtgcaatgccggctacagcggggaggactgtggggtgcgcagctgccctggggactgccggggccggggccgctgtgagagcggccgctgcatgtgctggccaggctacacaggccgggactgtggcacccgggcctgccctggggactgccggggccggggccgctgtgtggatggccgctgtgtgtgcaaccctggcttcaccggggaggactgtggcagccgccgctgccctggggactgccggggccacggcctgtgtgaagatggagtgtgtgtgtgtgatgctggctacagcggggaggactgcagcaccaggagctgccctgggggctgccggggccggggccagtgcctggatggccgctgtgtgtgtgaagatggctacagcggggaggactgtggggtgcggcagtgccccaatgactgcagccagcacggcgtgtgccaggatggagtgtgcatctgctgggagggctacgtgtctgaggactgcagcatccgcacctgccccagcaactgccacggccggggccgctgtgaggagggccgctgcctgtgtgaccccggctacacaggccccacctgtgccaccaggatgtgcccagctgactgccggggccggggccgctgtgtgcagggcgtgtgcctgtgccacgtgggctatggaggagaggactgtggccaggaggagcccccagccagcgcctgccctgggggctgcggcccccgggagctgtgccgggccggccagtgtgtgtgtgtggagggcttccggggccctgactgtgccatccagacctgccctggggactgccggggccgcggggagtgccatgatggcagctgtgtgtgcaaggatggctatgctggggaggactgtggggaggaggtgcccaccatcgagggcatgaggatgcacctgctggaggagaccaccgtgaggacagagtggaccccagcccctggccctgtggatgcctatgagatccagttcatccccaccacagaaggagccagcccccccttcaccgcccgggtgcccagcagcgccagcgcctatgaccagaggggcctggcccctggccaggagtaccaggtgacagtgcgggccctgcggggcacctcctggggcctgcctgccagcaagaccatcaccaccatgattgatggcccccaggacctgcgggtggtggccgtgacccccaccaccctggagctgggctggctgcggccccaggccgaggtggacagatttgtggtgtcctatgtgtctgctggcaaccagagggtgcggctggaggtgcccccagaggctgatggcaccctgctgacagacctgatgcctggggtggagtatgtggtgacagtgacagctgagcggggccgggctgtgtcctacccagcctctgtgcgggccaacacaggcagcagccccctgggcctgctgggcaccacagatgagcccccaccttctggccccagcaccacccagggcgcccaggcccccctgctgcagcagaggccccaggagctgggggagctgcgggtgctgggcagagatgagaccggccgcctgcgggtggtgtggacagcccagcctgacacctttgcctacttccagctgaggatgagggtgcctgagggccctggggcccacgaggaggtgctgcctggagatgtgcggcaggccctggtgcccccacctcctcctggcaccccctatgagctgagcctgcatggagtgcccccaggcggcaagcccagcgaccccatcatctaccagggcatcatggacaaggatgaggagaagccaggcaagagcagcggccccccccggctgggggagctgactgtgacagacaggaccagtgacagcctgctgctgcgctggacagtgcctgagggggagtttgacagctttgtgatccagtacaaggacagagatggccagccccaggtggtgcctgtggagggcccccagaggtctgctgtgatcaccagcctggaccccggcaggaagtacaagtttgtgctgtatggctttgtgggcaagaagagacatggccccctggtggccgaggccaagatcctgccccagagcgaccccagccctggcaccccaccccggctgggcaacctgtgggtgacagaccccaccccagacagcctgcacctgtcctggacagtgcctgagggccagtttgacaccttcatggtgcagtacagagacagagatggccggccccaggtggtgcctgtggagggccctgagaggagctttgtggtgagcagcctggaccctgaccacaagtaccgcttcaccctgtttggcatcgccaacaagaagagatatggccccctgacagcagatggcaccacagcccctgagaggaaggaggagccccccaggcctgagttcctggagcagcccctgctgggggagctgactgtgactggagtgaccccagacagcctgcggctgtcctggacagtggcccagggcccctttgacagcttcatggtgcagtacaaggatgcccagggccagccccaggccgtgcctgtggccggagatgaaaatgaggtgacagtgcccggcctggaccctgacaggaagtacaagatgaacctgtatggcctgcggggccggcagagggtgggccctgagagcgtggtggccaagacagccccccaggaggatgtggatgagacccccagccccacagagctgggcacagaggcccctgagagccctgaggagcccctgctgggggagctgactgtgacaggcagcagcccagacagcctgagcctcttctggacagtgccccagggcagctttgacagcttcaccgtgcagtacaaggacagagatggccggcccagggctgtgcgggtgggcggcaaggagagcgaggtgacagtgggcggcctggagcccggccacaagtacaagatgcacctgtatggcctgcacgagggccagagggtgggccctgtgtctgctgtgggcgtgacagccccccagcaggaggagaccccaccagccacagagagccccctggagccccggctgggggagctgactgtgacagatgtgacccccaacagcgtgggcctgtcctggacagtgcctgagggccagtttgacagcttcatcgtgcagtacaaggacaaggatggccagccccaggtggtgcctgtggccgctgaccagcgggaggtgacagtgtacaacctggagcctgagaggaagtacaagatgaacatgtatggcctgcatgatggccagaggatgggccccctgtctgtggtgattgtgacagcccccctgcccccagccccagccacagaggccagcaagccacccctggagccccggctgggggagctgactgtgacagacatcaccccagacagcgtgggcctgtcctggacagtgcctgagggggagtttgacagctttgtggtgcagtacaaggacagagatggccagccccaggtggtgcctgtggccgctgaccagcgggaggtgaccatcccagacctggagcccagcaggaagtacaagttcctgctgtttggcatccaggacggcaagagaagaagccctgtgtctgtggaggccaagacagtggcccggggagatgccagccctggggccccaccccggctgggggagctgtgggtgacagaccccaccccagacagcctgcggctgtcctggacagtgcctgagggccagtttgacagctttgtggtgcagttcaaggacaaggatggcccccaggtggtgcctgtggagggccacgagaggtctgtgacagtgacccccctggatgctggcaggaagtaccgcttcctgctgtatggcctgctgggcaagaagagacatggccccctgacagcagatggcaccacagaggcccggagcgccatggatgacaccggcaccaagaggcctcccaagccccggctgggggaggagctgcaggtgaccaccgtgacccagaacagcgtgggcctgtcctggacagtgcctgagggccagtttgacagctttgtggtgcagtacaaggacagagatggccagccccaggtggtgcctgtggagggcagcctgcgggaggtgtctgtgcccggcctggaccctgcccaccgctacaagctgctgctgtatggcctgcaccacggcaagagggtgggccccatctctgctgtggccatcacagctggccgggaggagacagaaacagagaccacagcccccaccccaccagcccctgagccccacctgggggagctgactgtggaggaggccaccagccacaccctgcacctgtcctggatggtgacagaaggagaatttgacagctttgagatccagtacacagacagagatggccagctgcagatggtgagaattggaggagacagaaatgacatcaccctgagcggcctggagagtgaccaccgctacctggtgaccctgtatggcttcagtgatggcaagcacgtgggccctgtgcacgtggaggccctgactgtgcctgaggaggagaagcccagcgagcccccaacagccaccccagagccccccatcaagccccggctgggggagctgactgtgacagatgccaccccagacagcctgagcctgtcctggacagtgcctgagggccagtttgaccacttcctggtgcagtacagaaatggagatggccagcccaaggctgtgcgggtgcccggccacgaggagggcgtgaccatcagcggcctggagccagaccacaagtacaagatgaacctgtatggcttccatggaggccagaggatgggccctgtgtctgtggtgggcgtgacagctgctgaggaggagacccccagccccacagagcccagcatggaggcccctgagcctgctgaggagcccctgctgggggagctgactgtgacaggcagcagcccagacagcctgagcctgtcctggacagtgccccagggccgctttgacagcttcaccgtgcagtacaaggacagagatggccggccccaggtggtgcgggtgggcggggaggagagcgaggtgacagtgggcggcctggagcccggcaggaagtacaagatgcacctgtatggcctgcacgagggccggcgggtgggccctgtgtctgctgtgggcgtgacagcccctgaggaggagagcccagatgcccccctggccaagctgcggctgggccagatgacagtgcgggacatcaccagtgacagcctgagcctgtcctggacagtgcctgagggccagtttgaccacttcctggtgcagttcaagaatggagatggccagcccaaggctgtgcgggtgcccggccatgaagatggagtgaccatcagcggcctggagccagaccacaagtacaagatgaacctgtatggcttccacggcggccagagggtgggccctgtgtctgctgtgggcctgacagcccctgggaaggatgaggagatggccccagccagcacagagccccccaccccagagccccccatcaagccccggctggaggagctgactgtgacagatgccaccccagacagcctgagcctgtcctggacagtgcctgagggccagtttgaccacttcctggtgcagtacaagaatggagatggccagcccaaggccaccagggtgcccggccatgaagatagagtgaccatcagcggcctggagccagacaacaagtacaagatgaacctgtatggcttccatggaggccagagggtgggccctgtgtctgccatcggcgtgacagctgctgaggaggagacccccagccccacagagcccagcatggaggcccctgagcccccagaggagcccctgctgggggagctgactgtgacaggcagcagcccagacagcctgagcctgtcctggacagtgccccagggccgctttgacagcttcaccgtgcagtacaaggacagagatggccggccccaggtggtgcgggtgggcggggaggagagcgaggtgacagtgggcggcctggagcccggcaggaagtacaagatgcacctgtatggcctgcacgagggccggcgggtgggccctgtgtccacagtgggcgtgacagccccccaggaggatgtggatgagacccccagccccacagagcccggcacagaggcccctgagcccccagaggagcccctgctgggggagctgactgtgacaggcagcagcccagacagcctgagcctgtcctggacagtgccccagggccgctttgacagcttcaccgtgcagtacaaggacagagatggccggccccaggccgtgcgggtgggcggccaggagagcaaggtgacagtgcggggcctggagcccggcaggaagtacaagatgcacctgtatggcctgcacgagggccgccgcctgggccctgtgtctgctgtgggcgtgacagaagatgaggccgagaccacccaggccgtgcccaccatgaccccagagccccccatcaagccccggctgggggagctgaccatgacagatgccaccccagacagcctgagcctgtcctggacagtgcctgagggccagtttgaccacttcctggtgcagtacagaaatggagatggccagcccaaggctgtgcgggtgcccggccatgaagatggagtgaccatcagcggcctggagccagaccacaagtacaagatgaacctgtatggcttccacggcggccagagggtgggccccatctctgtgattggagtgacagctgctgaggaggagacccccagccccacagagctgagcacagaggcccctgagcccccagaggagcccctgctgggggagctgactgtgacaggcagcagcccagacagcctgagcctgtcctggaccatcccccagggccactttgacagcttcaccgtgcagtacaaggacagagatggccggccccaggtgatgagggtgcggggggaggagagcgaggtgacagtgggcggcctggagcccggcaggaagtacaagatgcacctgtatggcctgcacgagggcagaagagtgggccctgtgtccacagtgggcgtgacagaagatgaggccgagaccacccaggccgtgcccaccaccaccccagagccccccaacaagccccggctgggggagctgactgtgacagatgccaccccagacagcctgagcctgtcctggatggtgcctgagggccagtttgaccacttcctggtgcagtacagaaatggagatggccagcccaaggtggtgcgggtgcccggccatgaagatggagtgaccatcagcggcctggagccagaccacaagtacaagatgaacctgtatggcttccacggcggccagagggtgggccccatctctgtgattggagtgacagctgctgaggaggagaccccagcccccacagagcccagcacagaggcccctgagcccccagaggagcccctgctgggggagctgactgtgacaggcagcagcccagacagcctgagcctgtcctggaccatcccccagggccgctttgacagcttcaccgtgcagtacaaggacagagatggccggccccaggtggtgcgggtgcggggggaggagagcgaggtgacagtgggcggcctggagcccggctgcaagtacaagatgcacctgtatggcctgcacgagggccagagggtgggccctgtgtctgctgtgggcgtgacagcccccaaggatgaggccgagaccacccaggccgtgcccaccatgaccccagagccccccatcaagccccggctgggggagctgactgtgacagatgccaccccagacagcctgagcctgtcctggatggtgcctgagggccagtttgaccacttcctggtgcagtacagaaatggagatggccagcccaaggctgtgcgggtgcccggccatgaagatggagtgaccatcagcggcctggagccagaccacaagtacaagatgaacctgtatggcttccacggcggccagagggtgggccctgtgtctgccatcggcgtgacagaggaggagacccccagccccacagagcccagcacagaggcccctgaggcccctgaggagcccctgctgggggagctgactgtgacaggcagcagcccagacagcctgagcctgtcctggacagtgccccagggccgctttgacagcttcaccgtgcagtacaaggacagagatggccagccccaggtggtgcgggtgcggggggaggagagcgaggtgacagtgggcggcctggagcccggcaggaagtacaagatgcacctgtatggcctgcacgagggccagagggtgggccctgtgtccacagtgggcatcacagcccccctgcccacccccctgcctgtggagccccggctgggggagctggccgtggccgctgtgaccagtgacagcgtgggcctgtcctggacagtggcccagggcccctttgacagcttcctggtgcagtacagagatgcccagggccagccccaggccgtgcctgtgtctggggacctgcgggctgtggccgtgtctggcctggaccctgccaggaagtacaagttcctgctgtttggcctgcagaatggcaagagacatggccctgtgcctgtggaggccaggacagccccagacaccaagcccagcccccggctgggggagctgactgtgacagatgccaccccagacagcgtgggcctgtcctggacagtgcctgagggggagtttgacagctttgtggtgcagtacaaggacaaggatggccgcctgcaggtggtgcctgtggccgccaaccagcgggaggtgacagtgcagggcctggagcccagcaggaagtaccgcttcctgctgtatggcctgagcggcaggaagaggctgggccccatctctgctgacagcaccacagcccccctggagaaggagctgcccccccacctgggggagctgactgtggccgaggagaccagcagcagcctgcggctgtcctggacagtggcccagggcccctttgacagctttgtggtgcagtacagagacacagatggccagcccagggctgtgcctgtggccgctgaccagaggacagtgacagtggaggacctggagcccgggaagaagtacaagttcctgctgtatggcctgctgggcggcaagaggctgggccctgtgtctgccctgggcatgacagcccctgaggaggacaccccagcccctgagctggcccctgaggcccctgagcccccagaggagccccggctgggcgtgctgactgtgacagacaccaccccagacagcatgaggctgtcctggagcgtggcccagggcccctttgacagctttgtggtgcagtatgaggacaccaacggccagccccaggccctgctggtggatggagaccagagcaagatcctgatcagcggcctggagcccagcaccccctaccgcttcctgctgtatggcctgcacgagggcaagaggctgggccccctgtctgctgagggcaccaccggcctggccccagctggccagaccagcgaggagagccggccccggctgagccagctgtctgtgacagatgtgaccaccagcagcctgcggctgaactgggaggcccctcctggggcctttgacagcttcctgctgcgctttggagtgcccagccccagcaccctggagccccacccccggcccctgctgcagcgggagctgatggtgcccggcaccaggcacagcgctgtgctgcgggacctgcggagcggcaccctgtacagcctgaccctgtatggcctgcggggcccccacaaggctgacagcatccagggcacagcccggaccctgagccctgtgctggagagcccccgggacctgcagttcagcgagatccgggagaccagcgccaaggtgaactggatgcccccacccagcagagctgacagcttcaaggtgtcctaccagctggctgatggaggagagccccagagcgtgcaggtggatggccaggcccggacccagaagctgcagggcctcatccctggggcccgctatgaggtgacagtggtgtctgtgcggggctttgaggagagcgagcccctgaccggcttcctgaccaccgtgcctgatggccccacccagctgcgggccctgaacctgacagagggctttgctgtgctgcactggaagccaccccagaaccctgtggacacctatgacatccaggtgacagcccctggggccccacccctgcaggccgagaccccaggcagcgctgtggactaccccctgcatgacctggtgctgcacaccaactacacagccaccgtgcggggcctgcggggccccaacctgaccagccctgccagcatcaccttcaccaccggcctggaggccccccgggacctggaggccaaggaggtgacccccaggacagccctgctgacctggacagagccccctgtgcggcctgctggctacctgctgtccttccacacccctgggggccagacccaggagatcctgctgcccggcggcatcaccagccaccagctgctgggcctcttccccagcaccagctacaatgcccggctgcaggccatgtggggccagagcctgctgccccctgtgtccaccagcttcaccactggaggcctgcgcatccccttcccccgggactgtggggaggagatgcagaatggagctggggccagcaggaccagcaccatcttcctgaatggaaaccgggagcggcccctgattgtgttctgtgacatggagacagatggcggcggctggctggtgttccagaggaggatggatggccagacagacttctggagggactgggaggactatgcccacggctttggaaacatctctggagagttctggctgggcaatgaggccctgcacagcctgacccaggccggggactacagcatgagggtggacctgcgggctggagatgaggccgtgtttgcccagtatgacagcttccacgtggacagcgctgctgagtactaccgcctgcacctggagggctaccatggaacagctggggacagcatgagctaccacagcggcagcgtcttcagcgcccgggaccgggaccccaacagcctgctgatcagctgtgctgtgtcctacagaggagcctggtggtacagaaactgccactacgccaacctgaatggcctgtatggcagcacagtggaccaccagggcgtgtcctggtaccactggaagggctttgagttctctgtgcccttcacagagatgaagctgcggcccaggaacttccgcagccctgctgggggcggctag

SEQ ID NO: 172935 - DNA, 12729 bp, synthetic construct
  misc_feature 1..12729: note = Description of Artificial Sequence: Synthetic coding sequence
  source 1..12729: mol_type = other DNA
atgatgcctgcccagtatgccctgaccagcagcctggtgctgctggtgctgctgagcacagcccgggccggccccttcagcagccgcagcaatgtgaccctgcctgccccccggcccccaccccagcccggcggccacacagtgggcgctggggtgggcagccccagcagccagctgtatgagcacacagtggagggcggggagaagcaggtggtgttcacccaccgcatcaacctgccccccagcacaggctgcggctgccccccaggcacagagccccctgtgctggccagcgaggtgcaggccctgcgggtgcggctggagatcctggaggagctggtgaagggcctgaaggagcagtgcaccggcggctgctgcccagccagcgcccaggccggcaccggccagacagatgtgaggaccctgtgcagcctgcacggcgtgtttgacctgagccgctgcacctgcagctgtgagcccggctggggcggccccacctgcagcgaccccacagatgctgagatcccccccagcagcccccccagcgccagcggcagctgcccagatgactgcaatgaccagggccgctgtgtgcggggccgctgtgtgtgcttccctggctacacaggccccagctgtggctggcccagctgccctggggactgccagggccggggccgctgtgtgcagggcgtgtgtgtgtgcagagctggcttcagcggccctgactgcagccagaggagctgcccccggggctgcagccagaggggccgctgtgagggcggccgctgtgtgtgtgaccccggctacacaggagatgactgtggcatgaggagctgcccccggggctgcagccagaggggccgctgtgaaaatggccgctgtgtgtgcaaccctggctacgccggggaggactgtggggtgcgcagctgcccccggggctgcagccagaggggccgctgcaaggatggccgctgtgtgtgtgaccccggctacacaggagaggactgtggcaccaggagctgcccctgggactgtggggagggcggccgctgtgtggatggccgctgtgtgtgctggccaggctacaccggggaggactgcagcaccaggacctgcccccgggactgccggggccggggccgctgtgaagatggagagtgcatctgtgacaccggctacagcggagatgactgtggggtgcgcagctgccctggggactgcaaccagaggggccgctgtgaagatggccgctgtgtgtgctggccaggctacacaggaacagactgtggcagccgggcctgcccccgggactgccggggccggggccgctgtgaaaatggagtgtgtgtgtgcaatgccggctacagcggggaggactgtggggtgcgcagctgccctggggactgccggggccggggccgctgtgagagcggccgctgcatgtgctggccaggctacacaggccgggactgtggcacccgggcctgccctggggactgccggggccggggccgctgtgtggatggccgctgtgtgtgcaaccctggcttcaccggggaggactgtggcagccgccgctgccctggggactgccggggccacggcctgtgtgaagatggagtgtgtgtgtgtgatgctggctacagcggggaggactgcagcaccaggagctgccctgggggctgccggggccggggccagtgcctggatggccgctgtgtgtgtgaagatggctacagcggggaggactgtggggtgcggcagtgccccaatgactgcagccagcacggcgtgtgccaggatggagtgtgcatctgctgggagggctacgtgtctgaggactgcagcatccgcacctgccccagcaactgccacggccggggccgctgtgaggagggccgctgcctgtgtgaccccggctacacaggccccacctgtgccaccaggatgtgcccagctgactgccggggccggggccgctgtgtgcagggcgtgtgcctgtgccacgtgggctatggaggagaggactgtggccaggaggagcccccagccagcgcctgccctgggggctgcggcccccgggagctgtgccgggccggccagtgtgtgtgtgtggagggcttccggggccctgactgtgccatccagacctgccctggggactgccggggccgcggggagtgccatgatggcagctgtgtgtgcaaggatggctatgctggggaggactgtggggaggaggtgcccaccatcgagggcatgaggatgcacctgctggaggagaccaccgtgaggacagagtggaccccagcccctggccctgtggatgcctatgagatccagttcatccccaccacagaaggagccagcccccccttcaccgcccgggtgcccagcagcgccagcgcctatgaccagaggggcctggcccctggccaggagtaccaggtgacagtgcgggccctgcggggcacctcctggggcctgcctgccagcaagaccatcaccaccatgattgatggcccccaggacctgcgggtggtggccgtgacccccaccaccctggagctgggctggctgcggccccaggccgaggtggacagatttgtggtgtcctatgtgtctgctggcaaccagagggtgcggctggaggtgcccccagaggctgatggcaccctgctgacagacctgatgcctggggtggagtatgtggtgacagtgacagctgagcggggccgggctgtgtcctacccagcctctgtgcgggccaacacaggcagcagccccctgggcctgctgggcaccacagatgagcccccaccttctggccccagcaccacccagggcgcccaggcccccctgctgcagcagaggccccaggagctgggggagctgcgggtgctgggcagagatgagaccggccgcctgcgggtggtgtggacagcccagcctgacacctttgcctacttccagctgaggatgagggtgcctgagggccctggggcccacgaggaggtgctgcctggagatgtgcggcaggccctggtgcccccacctcctcctggcaccccctatgagctgagcctgcatggagtgcccccaggcggcaagcccagcgaccccatcatctaccagggcatcatggacaaggatgaggagaagccaggcaagagcagcggccccccccggctgggggagctgactgtgacagacaggaccagtgacagcctgctgctgcgctggacagtgcctgagggggagtttgacagctttgtgatccagtacaaggacagagatggccagccccaggtggtgcctgtggagggcccccagaggtctgctgtgatcaccagcctggaccccggcaggaagtacaagtttgtgctgtatggctttgtgggcaagaagagacatggccccctggtggccgaggccaagatcctgccccagagcgaccccagccctggcaccccaccccacctgggcaacctgtgggtgacagaccccaccccagacagcctgcacctgtcctggacagtgcctgagggccagtttgacaccttcatggtgcagtacagagacagagatggccggccccaggtggtgcctgtggagggccctgagaggagctttgtggtgagcagcctggaccctgaccacaagtaccgcttcaccctgtttggcatcgccaacaagaagagatatggccccctgacagcagatggcaccacagcccctgagaggaaggaggagccccccaggcctgagttcctggagcagcccctgctgggggagctgactgtgactggagtgaccccagacagcctgcggctgtcctggacagtggcccagggcccctttgacagcttcatggtgcagtacaaggatgcccagggccagccccaggccgtgcctgtggccggagatgaaaatgaggtgacagtgcccggcctggaccctgacaggaagtacaagatgaacctgtatggcctgcggggccggcagagggtgggccctgagagcgtggtggccaagacagccccccaggaggatgtggatgagacccccagccccacagagctgggcacagaggcccctgagagccctgaggagcccctgctgggggagctgactgtgacaggcagcagcccagacagcctgagcctcttctggacagtgccccagggcagctttgacagcttcaccgtgcagtacaaggacagagatggccggcccagggctgtgcgggtgggcggcaaggagagcgaggtgacagtgggcggcctggagcccggccacaagtacaagatgcacctgtatggcctgcacgagggccagagggtgggccctgtgtctgctgtgggcgtgacagccccccagcaggaggagaccccaccagccacagagagccccctggagccccggctgggggagctgactgtgacagatgtgacccccaacagcgtgggcctgtcctggacagtgcctgagggccagtttgacagcttcatcgtgcagtacaaggacaaggatggccagccccaggtggtgcctgtggccgctgaccagcgggaggtgacagtgtacaacctggagcctgagaggaagtacaagatgaacatgtatggcctgcatgatggccagaggatgggccccctgtctgtggtgattgtgacagcccccctgcccccagccccagccacagaggccagcaagccacccctggagccccggctgggggagctgactgtgacagacatcaccccagacagcgtgggcctgtcctggacagtgcctgagggggagtttgacagctttgtggtgcagtacaaggacagagatggccagccccaggtggtgcctgtggccgctgaccagcgggaggtgaccatcccagacctggagcccagcaggaagtacaagttcctgctgtttggcatccaggacggcaagagaagaagccctgtgtctgtggaggccaagacagtggcccggggagatgccagccctggggccccaccccggctgggggagctgtgggtgacagaccccaccccagacagcctgcggctgtcctggacagtgcctgagggccagtttgacagctttgtggtgcagttcaaggacaaggatggcccccaggtggtgcctgtggagggccacgagaggtctgtgacagtgacccccctggatgctggcaggaagtaccgcttcctgctgtatggcctgctgggcaagaagagacatggccccctgacagcagatggcaccacagaggcccggagcgccatggatgacaccggcaccaagaggcctcccaagccccggctgggggaggagctgcaggtgaccaccgtgacccagaacagcgtgggcctgtcctggacagtgcctgagggccagtttgacagctttgtggtgcagtacaaggacagagatggccagccccaggtggtgcctgtggagggcagcctgcgggaggtgtctgtgcccggcctggaccctgcccaccgctacaagctgctgctgtatggcctgcaccacggcaagagggtgggccccatctctgctgtggccatcacagctggccgggaggagacagaaacagagaccacagcccccaccccaccagcccctgagccccacctgggggagctgactgtggaggaggccaccagccacaccctgcacctgtcctggatggtgacagaaggagaatttgacagctttgagatccagtacacagacagagatggccagctgcagatggtgagaattggaggagacagaaatgacatcaccctgagcggcctggagagtgaccaccgctacctggtgaccctgtatggcttcagtgatggcaagcacgtgggccctgtgcacgtggaggccctgactgtgcctgaggaggagaagcccagcgagcccccaacagccaccccagagccccccatcaagccccggctgggggagctgactgtgacagatgccaccccagacagcctgagcctgtcctggacagtgcctgagggccagtttgaccacttcctggtgcagtacagaaatggagatggccagcccaaggctgtgcgggtgcccggccacgaggagggcgtgaccatcagcggcctggagccagaccacaagtacaagatgaacctgtatggcttccatggaggccagaggatgggccctgtgtctgtggtgggcgtgacagctgctgaggaggagacccccagccccacagagcccagcatggaggcccctgagcctgctgaggagcccctgctgggggagctgactgtgacaggcagcagcccagacagcctgagcctgtcctggacagtgccccagggccgctttgacagcttcaccgtgcagtacaaggacagagatggccggccccaggtggtgcgggtgggcggggaggagagcgaggtgacagtgggcggcctggagcccggcaggaagtacaagatgcacctgtatggcctgcacgagggccggcgggtgggccctgtgtctgctgtgggcgtgacagcccctgaggaggagagcccagatgcccccctggccaagctgcggctgggccagatgacagtgcgggacatcaccagtgacagcctgagcctgtcctggacagtgcctgagggccagtttgaccacttcctggtgcagttcaagaatggagatggccagcccaaggctgtgcgggtgcccggccatgaagatggagtgaccatcagcggcctggagccagaccacaagtacaagatgaacctgtatggcttccacggcggccagagggtgggccctgtgtctgctgtgggcctgacagcccctgggaaggatgaggagatggccccagccagcacagagccccccaccccagagccccccatcaagccccggctggaggagctgactgtgacagatgccaccccagacagcctgagcctgtcctggacagtgcctgagggccagtttgaccacttcctggtgcagtacaagaatggagatggccagcccaaggccaccagggtgcccggccatgaagatagagtgaccatcagcggcctggagccagacaacaagtacaagatgaacctgtatggcttccatggaggccagagggtgggccctgtgtctgccatcggcgtgacagctgctgaggaggagacccccagccccacagagcccagcatggaggcccctgagcccccagaggagcccctgctgggggagctgactgtgacaggcagcagcccagacagcctgagcctgtcctggacagtgccccagggccgctttgacagcttcaccgtgcagtacaaggacagagatggccggccccaggtggtgcgggtgggcggggaggagagcgaggtgacagtgggcggcctggagcccggcaggaagtacaagatgcacctgtatggcctgcacgagggccggcgggtgggccctgtgtccacagtgggcgtgacagccccccaggaggatgtggatgagacccccagccccacagagcccggcacagaggcccctgagcccccagaggagcccctgctgggggagctgactgtgacaggcagcagcccagacagcctgagcctgtcctggacagtgccccagggccgctttgacagcttcaccgtgcagtacaaggacagagatggccggccccaggccgtgcgggtgggcggccaggagagcaaggtgacagtgcggggcctggagcccggcaggaagtacaagatgcacctgtatggcctgcacgagggccgccgcctgggccctgtgtctgctgtgggcgtgacagaagatgaggccgagaccacccaggccgtgcccaccatgaccccagagccccccatcaagccccggctgggggagctgaccatgacagatgccaccccagacagcctgagcctgtcctggacagtgcctgagggccagtttgaccacttcctggtgcagtacagaaatggagatggccagcccaaggctgtgcgggtgcccggccatgaagatggagtgaccatcagcggcctggagccagaccacaagtacaagatgaacctgtatggcttccacggcggccagagggtgggccccatctctgtgattggagtgacagctgctgaggaggagacccccagccccacagagctgagcacagaggcccctgagcccccagaggagcccctgctgggggagctgactgtgacaggcagcagcccagacagcctgagcctgtcctggaccatcccccagggccactttgacagcttcaccgtgcagtacaaggacagagatggccggccccaggtgatgagggtgcggggggaggagagcgaggtgacagtgggcggcctggagcccggcaggaagtacaagatgcacctgtatggcctgcacgagggcagaagagtgggccctgtgtccacagtgggcgtgacagaagatgaggccgagaccacccaggccgtgcccaccaccaccccagagccccccaacaagccccggctgggggagctgactgtgacagatgccaccccagacagcctgagcctgtcctggatggtgcctgagggccagtttgaccacttcctggtgcagtacagaaatggagatggccagcccaaggtggtgcgggtgcccggccatgaagatggagtgaccatcagcggcctggagccagaccacaagtacaagatgaacctgtatggcttccacggcggccagagggtgggccccatctctgtgattggagtgacagctgctgaggaggagaccccagcccccacagagcccagcacagaggcccctgagcccccagaggagcccctgctgggggagctgactgtgacaggcagcagcccagacagcctgagcctgtcctggaccatcccccagggccgctttgacagcttcaccgtgcagtacaaggacagagatggccggccccaggtggtgcgggtgcggggggaggagagcgaggtgacagtgggcggcctggagcccggctgcaagtacaagatgcacctgtatggcctgcacgagggccagagggtgggccctgtgtctgctgtgggcgtgacagcccccaaggatgaggccgagaccacccaggccgtgcccaccatgaccccagagccccccatcaagccccggctgggggagctgactgtgacagatgccaccccagacagcctgagcctgtcctggatggtgcctgagggccagtttgaccacttcctggtgcagtacagaaatggagatggccagcccaaggctgtgcgggtgcccggccatgaagatggagtgaccatcagcggcctggagccagaccacaagtacaagatgaacctgtatggcttccacggcggccagagggtgggccctgtgtctgccatcggcgtgacagaggaggagacccccagccccacagagcccagcacagaggcccctgaggcccctgaggagcccctgctgggggagctgactgtgacaggcagcagcccagacagcctgagcctgtcctggacagtgccccagggccgctttgacagcttcaccgtgcagtacaaggacagagatggccagccccaggtggtgcgggtgcggggggaggagagcgaggtgacagtgggcggcctggagcccggcaggaagtacaagatgcacctgtatggcctgcacgagggccagagggtgggccctgtgtccacagtgggcatcacagcccccctgcccacccccctgcctgtggagccccggctgggggagctggccgtggccgctgtgaccagtgacagcgtgggcctgtcctggacagtggcccagggcccctttgacagcttcctggtgcagtacagagatgcccagggccagccccaggccgtgcctgtgtctggggacctgcgggctgtggccgtgtctggcctggaccctgccaggaagtacaagttcctgctgtttggcctgcagaatggcaagagacatggccctgtgcctgtggaggccaggacagccccagacaccaagcccagcccccggctgggggagctgactgtgacagatgccaccccagacagcgtgggcctgtcctggacagtgcctgagggggagtttgacagctttgtggtgcagtacaaggacaaggatggccgcctgcaggtggtgcctgtggccgccaaccagcgggaggtgacagtgcagggcctggagcccagcaggaagtaccgcttcctgctgtatggcctgagcggcaggaagaggctgggccccatctctgctgacagcaccacagcccccctggagaaggagctgcccccccacctgggggagctgactgtggccgaggagaccagcagcagcctgcggctgtcctggacagtggcccagggcccctttgacagctttgtggtgcagtacagagacacagatggccagcccagggctgtgcctgtggccgctgaccagaggacagtgacagtggaggacctggagcccgggaagaagtacaagttcctgctgtatggcctgctgggcggcaagaggctgggccctgtgtctgccctgggcatgacagcccctgaggaggacaccccagcccctgagctggcccctgaggcccctgagcccccagaggagccccggctgggcgtgctgactgtgacagacaccaccccagacagcatgaggctgtcctggagcgtggcccagggcccctttgacagctttgtggtgcagtatgaggacaccaacggccagccccaggccctgctggtggatggagaccagagcaagatcctgatcagcggcctggagcccagcaccccctaccgcttcctgctgtatggcctgcacgagggcaagaggctgggccccctgtctgctgagggcaccaccggcctggccccagctggccagaccagcgaggagagccggccccggctgagccagctgtctgtgacagatgtgaccaccagcagcctgcggctgaactgggaggcccctcctggggcctttgacagcttcctgctgcgctttggagtgcccagccccagcaccctggagccccacccccggcccctgctgcagcgggagctgatggtgcccggcaccaggcacagcgctgtgctgcgggacctgcggagcggcaccctgtacagcctgaccctgtatggcctgcggggcccccacaaggctgacagcatccagggcacagcccggaccctgagccctgtgctggagagcccccgggacctgcagttcagcgagatccgggagaccagcgccaaggtgaactggatgcccccacccagcagagctgacagcttcaaggtgtcctaccagctggctgatggaggagagccccagagcgtgcaggtggatggccaggcccggacccagaagctgcagggcctcatccctggggcccgctatgaggtgacagtggtgtctgtgcggggctttgaggagagcgagcccctgaccggcttcctgaccaccgtgcctgatggccccacccagctgcgggccctgaacctgacagagggctttgctgtgctgcactggaagccaccccagaaccctgtggacacctatgatgtgcaggtgacagcccctggggccccacccctgcaggccgagaccccaggcagcgctgtggactaccccctgcatgacctggtgctgcacaccaactacacagccaccgtgcggggcctgcggggccccaacctgaccagccctgccagcatcaccttcaccaccggcctggaggccccccgggacctggaggccaaggaggtgacccccaggacagccctgctgacctggacagagccccctgtgcggcctgctggctacctgctgtccttccacacccctgggggccagaaccaggagatcctgctgcccggcggcatcaccagccaccagctgctgggcctcttccccagcaccagctacaatgcccggctgcaggccatgtggggccagagcctgctgccccctgtgtccaccagcttcaccactggaggcctgcgcatccccttcccccgggactgtggggaggagatgcagaatggagctggggccagcaggaccagcaccatcttcctgaatggaaaccgggagcggcccctgaatgtgttctgtgacatggagacagatggcggcggctggctggtgttccagaggaggatggatggccagacagacttctggagggactgggaggactatgcccacggctttggaaacatctctggagagttctggctgggcaatgaggccctgcacagcctgacccaggccggggactacagcatgagggtggacctgcgggctggagatgaggccgtgtttgcccagtatgacagcttccacgtggacagcgctgctgagtactaccgcctgcacctggagggctaccatggaacagctggggacagcatgagctaccacagcggcagcgtcttcagcgcccgggaccgggaccccaacagcctgctgatcagctgtgctgtgtcctacagaggagcctggtggtacagaaactgccactacgccaacctgaatggcctgtatggcagcacagtggaccaccagggcgtgtcctggtaccactggaagggctttgagttctctgtgcccttcacagagatgaagctgcggcccaggaacttccgcagccctgctgggggcggctag

SEQ ID NO: 172936 - DNA, 843 bp, synthetic construct
  misc_feature 1..843: note = Description of Artificial Sequence: Synthetic coding sequence
  source 1..843: mol_type = other DNA
atggtgacagaaggagaatttgacagctttgagatccagtacacagacagagatggccagctgcagatggtgcgcatcggcggggacagaaatgacatcaccctgagcggcctggagagtgaccaccgctacctggtgaccctgtatggcttcagtgatggcaagcacgtgggccctgtgcacgtggaggccctgactgtgcctgaggaggagaagcccagcgagcccccaacagccaccccagagccccccatcaagccccggctgggggagctgactgtgacagatgccaccccagacagcctgagcctgtcctggacagtgcctgagggccagtttgaccacttcctggtgcagtacagaaatggagatggccagcccaaggctgtgcgggtgcccggccacgaggagggcgtgaccatcagcggcctggagccagaccacaagtacaagatgaacctgtatggcttccacggcggccagaggatgggccctgtgtctgtggtgggcgtgacagctgctgaggaggagacccccagccccacagagcccagcatggaggcccctgagcctgctgaggagcccctgctgggggagctgactgtgacaggcagcagcccagacagcctgagcctgtcctggacagtgccccagggccgctttgacagcttcaccgtgcagtacaaggacagagatggccggccccaggtggtgcgggtgggcggggaggagagcgaggtgacagtgggcggcctggagcccggcaggaagtacaagatgcacctgtatggcctgcacgagggcagaagagtgggccctgtgtctgctgtgggcgtgacctag

SEQ ID NO: 172937 - DNA, 12729 bp, synthetic construct
  misc_feature 1..12729: note = Description of Artificial Sequence: Synthetic coding sequence
  source 1..12729: mol_type = other DNA
atgatgcctgcccagtatgccctgaccagcagcctggtgctgctggtgctgctgagcacagcccgggccggccccttcagcagccgcagcaatgtgaccctgcctgccccccggcccccaccccagcccggcggccacacagtgggcgctggggtgggcagccccagcagccagctgtatgagcacacagtggagggcggggagaagcaggtggtgttcacccaccgcatcaacctgccccccagcacaggctgcggctgccccccaggcacagagccccctgtgctggccagcgaggtgcaggccctgcgggtgcggctggagatcctggaggagctggtgaagggcctgaaggagcagtgcaccggcggctgctgcccagccagcgcccaggccggcaccggccagacagatgtgaggaccctgtgcagcctgcacggcgtgtttgacctgagccgctgcacctgcagctgtgagcccggctggggcggccccacctgcagcgaccccacagatgctgagatcccccccagcagcccccccagcgccagcggcagctgcccagatgactgcaatgaccagggccgctgtgtgcggggccgctgtgtgtgcttccctggctacacaggccccagctgtggctggcccagctgccctggggactgccagggccggggccgctgtgtgcagggcgtgtgtgtgtgcagagctggcttcagcggccctgactgcagccagaggagctgcccccggggctgcagccagaggggccgctgtgagggcggccgctgtgtgtgtgaccccggctacacaggagatgactgtggcatgaggagctgcccccggggctgcagccagaggggccgctgtgaaaatggccgctgtgtgtgcaaccctggctacaccggggaggactgtggggtgcgcagctgcccccggggctgcagccagaggggccgctgcaaggatggccgctgtgtgtgtgaccccggctacacaggagaggactgtggcaccaggagctgcccctgggactgtggggagggcggccgctgtgtggatggccgctgtgtgtgctggccaggctacaccggggaggactgcagcaccaggacctgcccccgggactgccggggccggggccgctgtgaagatggagagtgcatctgtgacaccggctacagcggagatgactgtggggtgcgcagctgccctggggactgcaaccagaggggccgctgtgaagatggccgctgtgtgtgctggccaggctacacaggaacagactgtggcagccgggcctgcccccgggactgccggggccggggccgctgtgaaaatggagtgtgtgtgtgcaatgccggctacagcggggaggactgtggggtgcgcagctgccctggggactgccggggccggggccgctgtgagagcggccgctgcatgtgctggccaggctacacaggccgggactgtggcacccgggcctgccctggggactgccggggccggggccgctgtgtggatggccgctgtgtgtgcaaccctggcttcaccggggaggactgtggcagccgccgctgccctggggactgccggggccacggcctgtgtgaagatggagtgtgtgtgtgtgatgctggctacagcggggaggactgcagcaccaggagctgccctgggggctgccggggccggggccagtgcctggatggccgctgtgtgtgtgaagatggctacagcggggaggactgtggggtgcggcagtgccccaatgactgcagccagcacggcgtgtgccaggatggagtgtgcatctgctgggagggctacgtgtctgaggactgcagcatccgcacctgccccagcaactgccacggccggggccgctgtgaggagggccgctgcctgtgtgaccccggctacacaggccccacctgtgccaccaggatgtgcccagctgactgccggggccggggccgctgtgtgcagggcgtgtgcctgtgccacgtgggctatggaggagaggactgtggccaggaggagcccccagccagcgcctgccctgggggctgcggcccccgggagctgtgccgggccggccagtgtgtgtgtgtggagggcttccggggccctgactgtgccatccagacctgccctggggactgccggggccgcggggagtgccatgatggcagctgtgtgtgcaaggatggctatgctggggaggactgtggggaggaggtgcccaccatcgagggcatgaggatgcacctgctggaggagaccaccgtgaggacagagtggaccccagcccctggccctgtggatgcctatgagatccagttcatccccaccacagaaggagccagcccccccttcaccgcccgggtgcccagcagcgccagcgcctatgaccagaggggcctggcccctggccaggagtaccaggtgacagtgcgggccctgcggggcacctcctggggcctgcctgccagcaagaccatcaccaccatgattgatggcccccaggacctgcgggtggtggccgtgacccccaccaccctggagctgggctggctgcggccccaggccgaggtggacagatttgtggtgtcctatgtgtctgctggcaaccagagggtgcggctggaggtgcccccagaggctgatggcaccctgctgacagacctgatgcctggggtggagtatgtggtgacagtgacagctgagcggggccgggctgtgtcctacccagcctctgtgcgggccaacacaggcagcagccccctgggcctgctgggcaccacagatgagcccccaccttctggccccagcaccacccagggcgcccaggcccccctgctgcagcagaggccccaggagctgggggagctgcgggtgctgggcagagatgagaccggccgcctgcgggtggtgtggacagcccagcctgacacctttgcctacttccagctgaggatgagggtgcctgagggccctggggcccacgaggaggtgctgcctggagatgtgcggcaggccctggtgcccccacctcctcctggcaccccctatgagctgagcctgcatggagtgcccccaggcggcaagcccagcgaccccatcatctaccagggcatcatggacaaggatgaggagaagccaggcaagagcagcggccccccccggctgggggagctgactgtgacagacaggaccagtgacagcctgctgctgcgctggacagtgcctgagggggagtttgacagctttgtgatccagtacaaggacagagatggccagccccaggtggtgcctgtggagggcccccagaggtctgctgtgatcaccagcctggaccccggcaggaagtacaagtttgtgctgtatggctttgtgggcaagaagagacatggccccctggtggccgaggccaagatcctgccccagagcgaccccagccctggcaccccaccccggctgggcaacctgtgggtgacagaccccaccccagacagcctgcacctgtcctggacagtgcctgagggccagtttgacaccttcatggtgcagtacagagacagagatggccggccccaggtggtgcctgtggagggccctgagaggagctttgtggtgagcagcctggaccctgaccacaagtaccgcttcaccctgtttggcatcgccaacaagaagagatatggccccctgacagcagatggcaccacagcccctgagaggaaggaggagcccccccaccctgagttcctggagcagcccctgctgggggagctgactgtgactggagtgaccccagacagcctgcggctgtcctggacagtggcccagggcccctttgacagcttcatggtgcagtacaaggatgcccagggccagccccaggccgtgcctgtggccggagatgaaaatgaggtgacagtgcccggcctggaccctgacaggaagtacaagatgaacctgtatggcctgcggggccggcagagggtgggccctgagagcgtggtggccaagacagccccccaggaggatgtggatgagacccccagccccacagagctgggcacagaggcccctgagagccctgaggagcccctgctgggggagctgactgtgacaggcagcagcccagacagcctgagcctcttctggacagtgccccagggcagctttgacagcttcaccgtgcagtacaaggacagagatggccggcccagggctgtgcgggtgggcggcaaggagagcgaggtgacagtgggcggcctggagcccggccacaagtacaagatgcacctgtatggcctgcacgagggccagagggtgggccctgtgtctgctgtgggcgtgacagccccccagcaggaggagaccccaccagccacagagagccccctggagccccggctgggggagctgactgtgacagatgtgacccccaacagcgtgggcctgtcctggacagtgcctgagggccagtttgacagcttcatcgtgcagtacaaggacaaggatggccagccccaggtggtgcctgtggccgctgaccagcgggaggtgacagtgtacaacctggagcctgagaggaagtacaagatgaacatgtatggcctgcatgatggccagaggatgggccccctgtctgtggtgattgtgacagcccccctgcccccagccccagccacagaggccagcaagccacccctggagccccggctgggggagctgactgtgacagacatcaccccagacagcgtgggcctgtcctggacagtgcctgagggggagtttgacagctttgtggtgcagtacaaggacagagatggccagccccaggtggtgcctgtggccgctgaccagcgggaggtgaccatcccagacctggagcccagcaggaagtacaagttcctgctgtttggcatccaggacggcaagagaagaagccctgtgtctgtggaggccaagacagtggcccggggagatgccagccctggggccccaccccggctgggggagctgtgggtgacagaccccaccccagacagcctgcggctgtcctggacagtgcctgagggccagtttgacagctttgtggtgcagttcaaggacaaggatggcccccaggtggtgcctgtggagggccacgagaggtctgtgacagtgacccccctggatgctggcaggaagtaccgcttcctgctgtatggcctgctgggcaagaagagacatggccccctgacagcagatggcaccacagaggcccggagcgccatggatgacaccggcaccaagaggcctcccaagccccggctgggggaggagctgcaggtgaccaccgtgacccagaacagcgtgggcctgtcctggacagtgcctgagggccagtttgacagctttgtggtgcagtacaaggacagagatggccagccccaggtggtgcctgtggagggcagcctgcgggaggtgtctgtgcccggcctggaccctgcccaccgctacaagctgctgctgtatggcctgcaccacggcaagagggtgggccccatctctgctgtggccatcacagctggccgggaggagacagaaacagagaccacagcccccaccccaccagcccctgagccccacctgggggagctgactgtggaggaggccaccagccacaccctgcacctgtcctggatggtgacagaaggagaatttgacagctttgagatccagtacacagacagagatggccagctgcagatggtgagaattggaggagacagaaatgacatcaccctgagcggcctggagagtgaccaccgctacctggtgaccctgtatggcttcagtgatggcaagcacgtgggccctgtgcacgtggaggccctgactgtgcctgaggaggagaagcccagcgagcccccaacagccaccccagagccccccatcaagccccggctgggggagctgactgtgacagatgccaccccagacagcctgagcctgtcctggacagtgcctgagggccagtttgaccacttcctggtgcagtacagaaatggagatggccagcccaaggctgtgcgggtgcccggccacgaggagggcgtgaccatcagcggcctggagccagaccacaagtacaagatgaacctgtatggcttccatggaggccagaggatgggccctgtgtctgtggtgggcgtgacagctgctgaggaggagacccccagccccacagagcccagcatggaggcccctgagcctgctgaggagcccctgctgggggagctgactgtgacaggcagcagcccagacagcctgagcctgtcctggacagtgccccagggccgctttgacagcttcaccgtgcagtacaaggacagagatggccggccccaggtggtgcgggtgggcggggaggagagcgaggtgacagtgggcggcctggagcccggcaggaagtacaagatgcacctgtatggcctgcacgagggccggcgggtgggccctgtgtctgctgtgggcgtgacagcccctgaggaggagagcccagatgcccccctggccaagctgcggctgggccagatgacagtgcgggacatcaccagtgacagcctgagcctgtcctggacagtgcctgagggccagtttgaccacttcctggtgcagttcaagaatggagatggccagcccaaggctgtgcgggtgcccggccatgaagatggagtgaccatcagcggcctggagccagaccacaagtacaagatgaacctgtatggcttccacggcggccagagggtgggccctgtgtctgctgtgggcctgacagcccctgggaaggatgaggagatggccccagccagcacagagccccccaccccagagccccccatcaagccccggctggaggagctgactgtgacagatgccaccccagacagcctgagcctgtcctggacagtgcctgagggccagtttgaccacttcctggtgcagtacaagaatggagatggccagcccaaggccaccagggtgcccggccatgaagatagagtgaccatcagcggcctggagccagacaacaagtacaagatgaacctgtatggcttccatggaggccagagggtgggccctgtgtctgccatcggcgtgacagctgctgaggaggagacccccagccccacagagcccagcatggaggcccctgagcccccagaggagcccctgctgggggagctgactgtgacaggcagcagcccagacagcctgagcctgtcctggacagtgccccagggccgctttgacagcttcaccgtgcagtacaaggacagagatggccggccccaggtggtgcgggtgggcggggaggagagcgaggtgacagtgggcggcctggagcccggcaggaagtacaagatgcacctgtatggcctgcacgagggccggcgggtgggccctgtgtccacagtgggcgtgacagccccccaggaggatgtggatgagacccccagccccacagagcccggcacagaggcccctgagcccccagaggagcccctgctgggggagctgactgtgacaggcagcagcccagacagcctgagcctgtcctggacagtgccccagggccgctttgacagcttcaccgtgcagtacaaggacagagatggccggccccaggccgtgcgggtgggcggccaggagagcaaggtgacagtgcggggcctggagcccggcaggaagtacaagatgcacctgtatggcctgcacgagggccgccgcctgggccctgtgtctgctgtgggcgtgacagaagatgaggccgagaccacccaggccgtgcccaccatgaccccagagccccccatcaagccccggctgggggagctgaccatgacagatgccaccccagacagcctgagcctgtcctggacagtgcctgagggccagtttgaccacttcctggtgcagtacagaaatggagatggccagcccaaggctgtgcgggtgcccggccatgaagatggagtgaccatcagcggcctggagccagaccacaagtacaagatgaacctgtatggcttccacggcggccagagggtgggccccatctctgtgattggagtgacagctgctgaggaggagacccccagccccacagagctgagcacagaggcccctgagcccccagaggagcccctgctgggggagctgactgtgacaggcagcagcccagacagcctgagcctgtcctggaccatcccccagggccactttgacagcttcaccgtgcagtacaaggacagagatggccggccccaggtgatgagggtgcggggggaggagagcgaggtgacagtgggcggcctggagcccggcaggaagtacaagatgcacctgtatggcctgcacgagggcagaagagtgggccctgtgtccacagtgggcgtgacagaagatgaggccgagaccacccaggccgtgcccaccaccaccccagagccccccaacaagccccggctgggggagctgactgtgacagatgccaccccagacagcctgagcctgtcctggatggtgcctgagggccagtttgaccacttcctggtgcagtacagaaatggagatggccagcccaaggtggtgcgggtgcccggccatgaagatggagtgaccatcagcggcctggagccagaccacaagtacaagatgaacctgtatggcttccacggcggccagagggtgggccccatctctgtgattggagtgacagctgctgaggaggagaccccagcccccacagagcccagcacagaggcccctgagcccccagaggagcccctgctgggggagctgactgtgacaggcagcagcccagacagcctgagcctgtcctggaccatcccccagggccgctttgacagcttcaccgtgcagtacaaggacagagatggccggccccaggtggtgcgggtgcggggggaggagagcgaggtgacagtgggcggcctggagcccggctgcaagtacaagatgcacctgtatggcctgcacgagggccagagggtgggccctgtgtctgctgtgggcgtgacagcccccaaggatgaggccgagaccacccaggccgtgcccaccatgaccccagagccccccatcaagccccggctgggggagctgactgtgacagatgccaccccagacagcctgagcctgtcctggatggtgcctgagggccagtttgaccacttcctggtgcagtacagaaatggagatggccagcccaaggctgtgcgggtgcccggccatgaagatggagtgaccatcagcggcctggagccagaccacaagtacaagatgaacctgtatggcttccacggcggccagagggtgggccctgtgtctgccatcggcgtgacagaggaggagacccccagccccacagagcccagcacagaggcccctgaggcccctgaggagcccctgctgggggagctgactgtgacaggcagcagcccagacagcctgagcctgtcctggaccatcccccagggccgctttgacagcttcaccgtgcagtacaaggacagagatggccagccccaggtggtgcgggtgcggggggaggagagcgaggtgacagtgggcggcctggagcccggcaggaagtacaagatgcacctgtatggcctgcacgagggccagagggtgggccctgtgtccacagtgggcatcacagcccccctgcccacccccctgcctgtggagccccggctgggggagctggccgtggccgctgtgaccagtgacagcgtgggcctgtcctggacagtggcccagggcccctttgacagcttcctggtgcagtacagagatgcccagggccagccccaggccgtgcctgtgtctggggacctgcgggctgtggccgtgtctggcctggaccctgccaggaagtacaagttcctgctgtttggcctgcagaatggcaagagacatggccctgtgcctgtggaggccaggacagccccagacaccaagcccagcccccggctgggggagctgactgtgacagatgccaccccagacagcgtgggcctgtcctggacagtgcctgagggggagtttgacagctttgtggtgcagtacaaggacaaggatggccgcctgcaggtggtgcctgtggccgccaaccagcgggaggtgacagtgcagggcctggagcccagcaggaagtaccgcttcctgctgtatggcctgagcggcaggaagaggctgggccccatctctgctgacagcaccacagcccccctggagaaggagctgcccccccacctgggggagctgactgtggccgaggagaccagcagcagcctgcggctgtcctggacagtggcccagggcccctttgacagctttgtggtgcagtacagagacacagatggccagcccagggctgtgcctgtggccgctgaccagaggacagtgacagtggaggacctggagcccgggaagaagtacaagttcctgctgtatggcctgctgggcggcaagaggctgggccctgtgtctgccctgggcatgacagcccctgaggaggacaccccagcccctgagctggcccctgaggcccctgagcccccagaggagccccggctgggcgtgctgactgtgacagacaccaccccagacagcatgaggctgtcctggagcgtggcccagggcccctttgacagctttgtggtgcagtatgaggacaccaacggccagccccaggccctgctggtggatggagaccagagcaagatcctgatcagcggcctggagcccagcaccccctaccgcttcctgctgtatggcctgcacgagggcaagaggctgggccccctgtctgctgagggcaccaccggcctggccccagctggccagaccagcgaggagagccggccccggctgagccagctgtctgtgacagatgtgaccaccagcagcctgcggctgaactgggaggcccctcctggggcctttgacagcttcctgctgcgctttggagtgcccagccccagcaccctggagccccacccccggcccctgctgcagcgggagctgatggtgcccggcaccaggcacagcgctgtgctgcgggacctgcggagcggcaccctgtacagcctgaccctgtatggcctgcggggcccccacaaggctgacagcatccagggcacagcccggaccctgagccctgtgctggagagcccccgggacctgcagttcagcgagatccgggagaccagcgccaaggtgaactggatgcccccacccagcagagctgacagcttcaaggtgtcctaccagctggctgatggaggagagccccagagcgtgcaggtggatggccaggcccggacccagaagctgcagggcctcatccctggggcccgctatgaggtgacagtggtgtctgtgcggggctttgaggagagcgagcccctgaccggcttcctgaccaccgtgcctgatggccccacccagctgcgggccctgaacctgacagagggctttgctgtgctgcactggaagccaccccagaaccctgtggacacctatgacatccaggtgacagcccctggggccccacccctgcaggccgagaccccaggcagcgctgtggactaccccctgcatgacctggtgctgcacaccaactacacagccaccgtgcggggcctgcggggccccaacctgaccagccctgccagcatcaccttcaccaccggcctggaggccccccgggacctggaggccaaggaggtgacccccaggacagccctgctgacctggacagagccccctgtgcggcctgctggctacctgctgtccttccacacccctgggggccagacccaggagatcctgctgcccggcggcatcaccagccaccagctgctgggcctcttccccagcaccagctacaatgcccggctgcaggccacctggggccagagcctgctgccccctgtgtccaccagcttcaccactggaggcctgcgcatccccttcccccgggactgtggggaggagatgcagaatggagctggggccagcaggaccagcaccatcttcctgaatggaaaccgggagcggcccctgaatgtgttctgtgacatggagacagatggcggcggctggctggtgttccagaggaggatggatggccagacagacttctggagggactgggaggactatgcccacggctttggaaacatctctggagagttctggctgggcaatgaggccctgcacagcctgacccaggccggggactacagcatgagggtggacctgcgggctggagatgaggccgtgtttgcccagtatgacagcttccacgtggacagcgctgctgagtactaccgcctgcacctggagggctaccatggaacagctggggacagcatgagctaccacagcggcagcgtcttcagcgcccgggaccgggaccccaacagcctgctgatcagctgtgctgtgtcctacagaggagcctggtggtacagaaactgccactacgccaacctgaatggcctgtatggcagcacagtggaccaccagggcgtgtcctggtaccactggaagggctttgagttctctgtgcccttcacagagatgaagctgcggcccaggaacttccgcagccctgctgggggcggctag

SEQ ID NO: 172938 - DNA, 2022 bp, synthetic construct
  misc_feature 1..2022: note = Description of Artificial Sequence: Synthetic coding sequence
  source 1..2022: mol_type = other DNA
atgaggctgtcctggagcgtggcccagggcccctttgacagctttgtggtgcagtatgaggacaccaacggccagccccaggccctgctggtggatggagaccagagcaagatcctgatcagcggcctggagcccagcaccccctaccgcttcctgctgtatggcctgcacgagggcaagaggctgggccccctgtctgctgagggcaccaccggcctggccccagctggccagaccagcgaggagagccggccccggctgagccagctgtctgtgacagatgtgaccaccagcagcctgcggctgaactgggaggcccctcctggggcctttgacagcttcctgctgcgcttcggcgtgcccagccccagcaccctggagccccacccccggcccctgctgcagcgggagctgatggtgcccggcaccaggcacagcgctgtgctgcgggacctgcggagcggcaccctgtacagcctgaccctgtatggcctgcggggcccccacaaggctgacagcatccagggcacagcccggaccctgagccctgtgctggagagcccccgggacctgcagttcagcgagatccgggagaccagcgccaaggtgaactggatgcccccacccagcagagctgacagcttcaaggtgtcctaccagctggctgatggaggagagccccagagcgtgcaggtggatggccaggcccggacccagaagctgcagggcctcatccctggggcccgctatgaggtgacagtggtgtctgtgcggggctttgaggagagcgagcccctgaccggcttcctgaccaccgtgcctgatggccccacccagctgcgggccctgaacctgacagagggctttgctgtgctgcactggaagccaccccagaaccctgtggacacctatgatgtgcaggtgacagcccctggggccccacccctgcaggccgagaccccaggcagcgctgtggactaccccctgcatgacctggtgctgcacaccaactacacagccaccgtgcggggcctgcggggccccaacctgaccagccctgccagcatcaccttcaccaccggcctggaggccccccgggacctggaggccaaggaggtgacccccaggacagccctgctgacctggacagagccccctgtgcggcctgctggctacctgctgtccttccacaccccaggcggccagaaccaggagatcctgctgcccggcggcatcaccagccaccagctgctgggcctcttccccagcaccagctacaatgcccggctgcaggccatgtggggccagagcctgctgccccctgtgtccaccagcttcaccaccggcggcctgcgcatccccttcccccgggactgtggggaggagatgcagaatggagctggggccagcaggaccagcaccatcttcctgaatggaaaccgggagcggcccctgaatgtgttctgtgacatggagacagatggcggcggctggctggtgttccagaggaggatggatggccagacagacttctggagggactgggaggactatgcccacggcttcggcaacatcagcggggagttctggctgggcaatgaggccctgcacagcctgacccaggccggggactacagcatgagggtggacctgcgggctggagatgaagctgtgtttgcccagtatgacagcttccacgtggacagcgctgctgagtactaccgcctgcacctggagggctaccacggcacagctggggacagcatgagctaccacagcggctctgtgttcagcgcccgggaccgggaccccaacagcctgctgatcagctgtgctgtgtcctacagaggagcctggtggtacagaaactgccactacgccaacctgaatggcctgtatggcagcacagtggaccaccagggcgtgtcctggtaccactggaagggctttgagttctctgtgcccttcacagagatgaagctgcggcccaggaacttccgcagccctgctgggggcggctag

SEQ ID NO: 172939 - DNA, 654 bp, synthetic construct; identical to SEQ ID NO: 172933
  misc_feature 1..654: note = Description of Artificial Sequence: Synthetic coding sequence
  source 1..654: mol_type = other DNA

SEQ ID NO: 172940 - DNA, 942 bp, synthetic construct
  misc_feature 1..942: note = Description of Artificial Sequence: Synthetic coding sequence
  source 1..942: mol_type = other DNA
acagagcctggaacagaggcccctggccccccagaggagcccctgctgggggagctgactgtgacaggcagcagcccagacagcctgagcctgtcctggacagtgccccagggccgctttgacagcttcaccgtgcagtacaaggacagagatggccggccccaggccgtgcgggtgggcggccaggagagcaaggtgacagtgcggggcctggagcccggcaggaagtacaagatgcacctgtatggcctgcacgagggccggcggctgggccctgtgtctgctgtgggcgtgacagaagatgaagctgagaccacccaggccgtgcccaccatgaccccagagccccccatcaagccccggctgggggagctgaccatgacagatgccaccccagacagcctgagcctgtcctggacagtgcctgagggccagtttgaccacttcctggtgcagtacagaaatggagatggccagcccaaggctgtgcgggtgcccggccatgaagatggagtgaccatcagcggcctggagccagaccacaagtacaagatgaacctgtatggcttccatggaggccagagggtgggccccatcagcgtcatcggcgtgacagctgctgaggaggagacccccagccccacagagctgagcacagaggcccctgagcccccagaggagcccctgctgggggagctgactgtgacaggcagcagcccagacagcctgagcctgtcctggaccatcccccagggccactttgacagcttcaccgtgcagtacaaggacagagatggccggccccaggtgatgagggtgcggggggaggagagcgaggtgacagtgggcggcctggagcccggcaggaagtacaagatgcacctgtatggcctgcacgagggccggcgggtgggccctgtgtccacagtgggcgtgacctag

SEQ ID NO: 172941 - DNA, 942 bp, synthetic construct
  misc_feature 1..942: note = Description of Artificial Sequence: Synthetic coding sequence
  source 1..942: mol_type = other DNA
atgaccccagagccccccatcaagccccggctgggggagctgaccatgacagatgccaccccagacagcctgagcctgtcctggacagtgcctgagggccagtttgaccacttcctggtgcagtacagaaatggagatggccagcccaaggctgtgcgggtgcccggccatgaagatggagtgaccatcagcggcctggagccagaccacaagtacaagatgaacctgtatggcttccacggcggccagagggtgggccccatctctgtgactggagtgacagctgctgaggaggagacccccagccccacagagctgagcacagaggcccctgagcccccagaggagcccctgctgggggagctgactgtgacaggcagcagcccagacagcctgagcctgtcctggaccatcccccagggccactttgacagcttcaccgtgcagtacaaggacagagatggccggccccaggtgatgagggtgcggggggaggagagcgaggtgacagtgggcggcctggagcccggcaggaagtacaagatgcacctgtatggcctgcacgagggcagaagagtgggccctgtgtccacagtgggcgtgacagccccagaagatgaggaggaggagaccccagcccccacagagcccagcacagaggcccctgagcccccagaggagcccctgctgggggagctgactgtgacaggcagcagcccagacagcctgagcctgtcctggaccatcccccagggccgctttgacagcttcaccgtgcagtacaaggacagagatggccggccccaggtggtgcgggtgcggggggaggagagcgaggtgacagtgggcggcctggagcccggctgcaagtacaagatgcacctgtatggcctgcacgagggccagagggtgggccctgtgtctgctgtgggcgtgacctag

SEQ ID NO: 172942 - DNA, 1281 bp, synthetic construct
  misc_feature 1..1281: note = Description of Artificial Sequence: Synthetic coding sequence
  source 1..1281: mol_type = other DNA
gctggggaggactgtggggaggaggtgcccaccatcgagggcatgaggatgcacctgctggaggagaccaccgtgaggacagagtggaccccagcccctggccctgtggatgcctatgagatccagttcatccccaccacagaaggagccagcccccccttcaccgcccgggtgcccagcagcgccagcgcctatgaccagaggggcctggcccctggccaggagtaccaggtgacagtgcgggccctgcggggcacctcctggggcctgcctgccagcaagaccatcaccaccatgattgatggcccccaggacctgcgggtggtggccgtgacccccaccaccctggagctgggctggctgcggccccaggccgaggtggacagatttgtggtgtcctatgtgtctgctggcaaccagagggtgcggctggaggtgcccccagaggctgatggcaccctgctgacagacctgatgcctggggtggagtatgtggtgacagtgacagctgagcggggccgggctgtgtcctacccagcctctgtgcgggccaacacaggcagcagccccctgggcctgctgggcaccacagatgagcccccaccttctggccccagcaccacccagggcgcccaggcccccctgctgcagcagaggccccaggagctgggggagctgcgggtgctgggcagagatgagaccggccgcctgcgggtggtgtggacagcccagcctgacacctttgcctacttccagctgaggatgagggtgcctgagggccctggggcccacgaggaggtgctgcctggagatgtgcggcaggccctggtgcccccacctcctcctggcaccccctatgagctgagcctgcatggagtgcccccaggcggcaagcccagcgaccccatcatctaccagggcatcatggacaaggatgaggagaagccaggcaagagcagcggccccccccggctgggggagctgactgtgacagacaggaccagtgacagcctgctgctgcgctggacagtgcctgagggggagtttgacagctttgtgatccagtacaaggacagagatggccagccccaggtggtgcctgtggagggcccccagaggtctgctgtgatcaccagcctggaccccggcaggaagtacaagtttgtgctgtatggctttgtgggcaagaagagacatggccccctggtggccgaggccaagatcctgccccagagcgaccccagccctggcaccccaccccacctgggcaacctgtggtag

SEQ ID NO: 172943 - DNA, 2598 bp, synthetic construct
  misc_feature 1..2598: note = Description of Artificial Sequence: Synthetic coding sequence
  source 1..2598: mol_type = other DNA
ctctatggcctgcggggccggcagagggtgggccctgagagcgtggtggccaagacagccccccaggaggatgtggatgagacccccagccccacagagctgggcacagaggcccctgagagccctgaggagcccctgctgggggagctgactgtgacaggcagcagcccagacagcctgagcctcttctggacagtgccccagggcagctttgacagcttcaccgtgcagtacaaggacagagatggccggcccagggctgtgcgggtgggcggcaaggagagcgaggtgacagtgggcggcctggagcccggccacaagtacaagatgcacctgtatggcctgcacgagggccagagggtgggccctgtgtctgctgtgggcgtgacagccccccagcaggaggagaccccaccagccacagagagccccctggagccccggctgggggagctgactgtgacagatgtgacccccaacagcgtgggcctgtcctggacagtgcctgagggccagtttgacagcttcatcgtgcagtacaaggacaaggatggccagccccaggtggtgcctgtggccgctgaccagcgggaggtgacagtgtacaacctggagcctgagaggaagtacaagatgaacatgtatggcctgcatgatggccagaggatgggccccctgtctgtggtgattgtgacagcccccctgcccccagccccagccacagaggccagcaagccacccctggagccccggctgggggagctgactgtgacagacatcaccccagacagcgtgggcctgtcctggacagtgcctgagggggagtttgacagctttgtggtgcagtacaaggacagagatggccagccccaggtggtgcctgtggccgctgaccagcgggaggtgaccatcccagacctggagcccagcaggaagtacaagttcctgctgtttggcatccaggacggcaagagaagaagccctgtgtctgtggaggccaagacagtggcccggggagatgccagccctggggccccaccccggctgggggagctgtgggtgacagaccccaccccagacagcctgcggctgtcctggacagtgcctgagggccagtttgacagctttgtggtgcagttcaaggacaaggatggcccccaggtggtgcctgtggagggccacgagaggtctgtgacagtgacccccctggatgctggcaggaagtaccgcttcctgctgtatggcctgctgggcaagaagagacatggccccctgacagcagatggcaccacagaggcccggagcgccatggatgacaccggcaccaagaggcctcccaagccccggctgggggaggagctgcaggtgaccaccgtgacccagaacagcgtgggcctgtcctggacagtgcctgagggccagtttgacagctttgtggtgcagtacaaggacagagatggccagccccaggtggtgcctgtggagggcagcctgcgggaggtgtctgtgcccggcctggaccctgcccaccgctacaagctgctgctgtatggcctgcaccacggcaagagggtgggccccatctctgctgtggccatcacagctggccgggaggagacagaaacagagaccacagcccccaccccaccagcccctgagccccacctgggggagctgactgtggaggaggccaccagccacaccctgcacctgtcctggatggtgacagaaggagaatttgacagctttgagatccagtacacagacagagatggccagctgcagatggtgagaattggaggagacagaaatgacatcaccctgagcggcctggagagtgaccaccgctacctggtgaccctgtatggcttcagtgatggcaagcacgtgggccctgtgcacgtggaggccctgactgtgcctgaggaggagaagcccagcgagcccccaacagccaccccagagccccccatcaagccccggctgggggagctgactgtgacagatgccaccccagacagcctgagcctgtcctggacagtgcctgagggccagtttgaccacttcctggtgcagtacagaaatggagatggccagcccaaggctgtgcgggtgcccggccacgaggagggcgtgaccatcagcggcctggagccagaccacaagtacaagatgaacctgtatggcttccatggaggccagaggatgggccctgtgtctgtggtgggcgtgacagctgctgaggaggagacccccagccccacagagcccagcatggaggcccctgagcctgctgaggagcccctgctgggggagctgactgtgacaggcagcagcccagacagcctgagcctgtcctggacagtgccccagggccgctttgacagcttcaccgtgcagtacaaggacagagatggccggccccaggtggtgcgggtgggcggggaggagagcgaggtgacagtgggcggcctggagcccggcaggaagtacaagatgcacctgtatggcctgcacgagggccggcgggtgggccctgtgtctgctgtgggcgtgacagcccctgaggaggagagcccagatgcccccctggcctag

SEQ ID NO: 172944 - DNA, 5208 bp, synthetic construct
  misc_feature 1..5208: note = Description of Artificial Sequence: Synthetic coding sequence
  source 1..5208: mol_type = other DNA
atgtctgtgtccaggaccatggaggacagctgtgagctggacctggtgtatgtgacagagcgcatcatcgctgtgtccttccccagcacagccaatgaggagaacttccgcagcaacctgcgggaggtggcccagatgctgaagagcaagcatggaggcaactacctgctcttcaacctgtctgaaagaagaccagacatcaccaagctgcacgccaaggtgctggagtttggctggccagacctgcacaccccagccctggagaagatctgcagcatctgcaaggccatggacacctggctgaatgctgacccccacaacgtggtggtgctgcacaacaagggcaacagaggccgcatcggcgtggtgattgctgcctacatgcactacagcaacatcagcgccagcgctgaccaggccctggacagatttgccatgaagcgcttctatgaggacaagatcgtgcccatcggccagcccagccagaggagatatgtgcactacttcagcggcctgctgagcggcagcatcaagatgaacaacaagcccctcttcctgcaccacgtgatcatgcacggcatccccaactttgagagcaagggcggctgccggcccttcctgcgcatctaccaggccatgcagcctgtgtacaccagcggcatctacaacatccctggggacagccagacctctgtgtgcatcaccatcgagcccggcctgctgctgaagggggacatcctgctgaagtgctaccacaagaagttccgcagccctgccagagatgtgatcttccgggtgcagttccacacctgtgccatccatgacctgggcgtggtgtttgggaaggaggacctggatgatgccttcaaggatgaccgcttcccagaatatggcaaggtggagtttgtgttctcctatggccctgagaagatccagggcatggagcacctggagaatggccccagcgtgtctgtggactacaacaccagtgaccccctcatccgctgggacagctatgacaacttcagcggccacagagatgatggcatggaggaggtggtgggccacacccagggccccctggatggcagcctgtatgccaaggtgaagaagaaggacagcctgcacggcagcactggagctgtgaatgccacccggcccaccctgagcgccacccccaaccacgtggagcacaccctgtctgtgtccagtgacagcggcaacagcacagccagcaccaagacagacaagacagatgagcctgtgcctggggccagcagcgccacagctgccctgagcccccaggagaagcgggagctggaccggctgctgagcggcttcggcctggagcgggagaagcagggcgccatgtaccacacccagcacctgcggagcaggcctgctgggggcagcgctgtgcccagcagcggcagacatgtggtgcctgcccaggtgcacgtgaatggaggagccctggccagcgagcgggagacagacatcctggatgatgagctgcccaaccaggacggccacagcgctggctccatgggcaccctgagcagcctggatggagtgaccaacaccagcgagggcggctacccagaggccctgagccccctgaccaacggcctggacaagagctaccccatggagcccatggtgaatggaggcggctacccctatgaaagtgccagcagagctggccctgcccacgccggccacacagcccccatgaggcccagctacagcgcccaggagggcctggccggctaccagcgggagggcccccacccagcctggccccagcctgtgaccaccagccactacgcccatgaccccagcggcatgttccgcagccagagcttcagcgaggccgagccccagctgcccccagcccctgtgcggggcggcagcagccgggaggccgtgcagaggggcctgaacagctggcagcagcagcagcagcagcagcagcagccccggcccccaccccggcagcaggagcgggcccacctggagagcctggtggccagccggcccagcccccagcccctggccgagacccccatccccagcctgcctgagttccccagggctgccagccagcaggagattgagcagagcattgagaccctgaacatgctgatgctggacctggagcccgccagcgctgctgcccccctgcacaagagccagagcgtgcctggggcctggccaggggccagccccctgagcagccagcccctgagcggcagcagccggcagagccaccccctgacccagagccgcagcggctacatccccagcggccacagcctgggcaccccagagcccgccccccgggccagcctggagagcgtgcccccaggccgcagctacagcccctatgactaccagccctgcctggccggccccaaccaggacttccacagcaagagccctgccagcagcagcctgcctgccttcctgcccaccacccacagccccccaggcccccagcagcccccagccagcctgcccggcctgacagcccagcccctgctgagccccaaggaggccaccagtgaccccagcaggaccccagaggaggagcccctgaacctggagggcctggtggcccaccgggtggccggcgtgcaggcccgggagaagcagcctgctgagcccccagcccccctgcggaggagagctgccagtgatggccagtatgagaaccagagccctgaggccaccagccccaggagccctggggtgcgcagccctgtgcagtgtgtgtccccagagctggccctgaccatcgccctgaaccctgggggccggcccaaggagccccacctgcacagctacaaggaggcctttgaggagatggagggcaccagccccagcagccccccaccttctggagtgcgcagccccccaggcctggccaagacccccctgagcgccctgggcctgaagccccacaacccagctgacatcctgctgcaccccaccggggtgacccggcggcgcatccagccagaagaagatgagggcaaggtggtggtgcggctgtctgaggagcccaggagctatgtggagagcgtggccaggacagctgtggccggcccccgggcccaggacagcgagcccaagagcttcagcgccccagccacccaggcctacggccacgagatccccctgagaaatggcaccctgggcggcagctttgtgagccccagccccctgagcaccagcagccccatcctgtctgctgacagcacctctgtgggcagcttccccagcggggagagcagtgaccagggccccaggacccccacccagcccctgctggagagcggcttccgcagcggcagcctgggccagcccagccccagcgcccagaggaactaccagagcagcagccccctgcccaccgtgggcagcagctacagcagcccagactacagcctgcagcacttcagcagcagccctgagagccaggcccgggcccagttctctgtggccggcgtgcacacagtgcccggcagcccccaggcccggcacaggacagtgggcaccaacaccccacccagccctggcttcggctggagggccatcaaccccagcatggccgcccccagcagccccagcctgagccaccaccagatgatgggccccccaggcaccggcttccacggcagcacagtgagcagcccccagagcagcgctgccaccaccccaggcagccccagcctgtgccgccaccctgctggggtgtaccaggtgtctggcctgcacaacaaggtggccaccaccccaggcagccccagcctgggccgccaccctggggcccaccagggcaacctggccagcggcctgcacagcaatgccatcgccagccctggcagccccagcctgggccgccacctgggcggcagcggctctgtggtgcccggcagcccctgcctggacagacatgtggcctatggaggctacagcaccccagaggaccggcggcccaccctgagccggcagagcagcgccagcggctaccaggcccccagcacccccagcttccctgtgtccccagcctactacccaggcctgagcagccctgccaccagccccagcccagacagcgctgccttccggcagggcagccccaccccagccctgcctgagaagaggaggatgtctgtgggggaccgggccggcagcctgcccaactatgccaccatcaacgggaaggtgagcagccctgtggccagcggcatgagcagccccagcggcggcagcacagtgtccttcagccacaccctgcctgacttcagcaagtacagcatgccagacaacagccctgagacccgggccaaggtgaagtttgtgcaggacaccagcaagtactggtacaagccagagatcagccgggagcaggccatcgccctgctgaaggaccaggagcccggggccttcatcatccgggacagccacagcttccggggggcctacggcctggccatgaaggtgagcagccccccacccaccatcatgcagcagaacaagaagggggacatgacccatgagctggtgcgccacttcctgattgaaacaggcccccggggcgtgaagctgaagggctgccccaatgagcccaactttggcagcctgagcgccctggtgtaccagcacagcatcatccccctggccctgccctgcaagctggtgatccccaacagagaccccacagatgagagcaaggacagcagcggccctgccaacagcacagctgacctgctgaagcagggcgccgcctgcaatgtgctgtttgtgaacagcgtggacatggagagcctgaccggcccccaggccatcagcaaggccaccagcgagaccctggccgctgaccccaccccagctgccaccatcgtgcacttcaaggtgtctgcccagggcatcaccctgacagacaaccagaggaagctgttcttccgccgccactaccccctgaacacagtgaccttctgtgacctggacccccaggagaggaagtggatgaagacagaaggaggagccccagccaagctgtttggatttgtggccaggaagcagggcagcaccacagacaatgcctgccacctgtttgctgagctggaccccaaccagcctgccagcgccatcgtgaactttgtgtccaaggtgatgctgaatgccggccagaagaggtag

SEQ ID NO: 172945 - DNA, 1251 bp, synthetic construct
  misc_feature 1..1251: note = Description of Artificial Sequence: Synthetic coding sequence
  source 1..1251: mol_type = other DNA
atggtgcccttccagcagaggaaggactgtgtgctggagggcagcaccagggtgaccccatctgtgcagccccacctgcagcccatccggaacatgtctgtgtccaggaccatggaggacagctgtgagctggacctggtgtatgtgacagagcgcatcatcgctgtgtccttccccagcacagccaatgaggagaacttccgcagcaacctgcgggaggtggcccagatgctgaagagcaagcacggcggcaactacctgctcttcaacctgtctgagcggcggccagacatcaccaagctgcacgccaaggtgctggagtttggctggccagacctgcacaccccagccctggagaagatctgcagcatctgcaaggccatggacacctggctgaatgctgacccccacaacgtggtggtgctgcacaacaagggcaacagaggaagaattggagtggtgattgctgcctacatgcactacagcaacatcagcgccagcgctgaccaggccctggacagatttgccatgaagcgcttctatgaggacaagatcgtgcccatcggccagcccagccagaggcgctacgtgcactacttcagcggcctgctgagcggcagcatcaagatgaacaacaagcccctcttcctgcaccacgtgatcatgcacggcatccccaactttgagagcaaaggaggctgccggcccttcctgcgcatctaccaggccatgcagcctgtgtacaccagcggcatctacaacatccctggggacagccagacctctgtgtgcatcaccatcgagcccggcctgctgctgaagggggacatcctgctgaagtgctaccacaagaagttccgcagccctgccagagatgtgatcttccgggtgcagttccacacctgtgccatccatgacctgggcgtggtgtttgggaaggaggacctggatgatgccttcaaggatgaccgcttcccagaatatggcaaggtggagtttgtgttctcctatggccctgagaagatccagggcatggagcacctggagaatggccccagcgtgtctgtggactacaacaccagtgaccccctcatccgctgggacagctatgacaacttcagcggccacagagatgatggcatggaggatggcaacaagcagaacaccaacagccagagcatcggcagcatcagcggcggcctggaggaccagtacacctggccagacacccactggcccagccagagctag

SEQ ID NO: 172946 - DNA, 312 bp, synthetic construct
  misc_feature 1..312: note = Description of Artificial Sequence: Synthetic coding sequence
  source 1..312: mol_type = other DNA
atgtctgtgtccaggaccatggaggacagctgtgagctggacctggtgtatgtgacagagcgcatcatcgctgtgtccttccccagcacagccaatgaggagaacttccgcagcaacctgcgggaggtggcccagatgctgaagagcaagcatggaggcaactacctgctcttcaacctgtctgaaagaagaccagacatcaccaagctgcacgccaaggtgctggagtttggctggccagacctgcacaccccagccctggagaagatctgcagcatctgcaaggccatggacacctggctgaatgcctag

SEQ ID NO: 172947 - DNA, 5145 bp, synthetic construct
  misc_feature 1..5145: note = Description of Artificial Sequence: Synthetic coding sequence
  source 1..5145: mol_type = other DNA
atgtctgtgtccaggaccatggaggacagctgtgagctggacctggtgtatgtgacagagcgcatcatcgctgtgtccttccccagcacagccaatgaggagaacttccgcagcaacctgcgggaggtggcccagatgctgaagagcaagcatggaggcaactacctgctcttcaacctgtctgaaagaagaccagacatcaccaagctgcacgccaaggtgctggagtttggctggccagacctgcacaccccagccctggagaagatctgcagcatctgcaaggccatggacacctggctgaatgctgacccccacaacgtggtggtgctgcacaacaagggcaacagaggccgcatcggcgtggtgattgctgcctacatgcactacagcaacatcagcgccagcgctgaccaggccctggacagatttgccatgaagcgcttctatgaggacaagatcgtgcccatcggccagcccagccagaggagatatgtgcactacttcagcggcctgctgagcggcagcatcaagatgaacaacaagcccctcttcctgcaccacgtgatcatgcacggcatccccaactttgagagcaagggcggctgccggcccttcctgcgcatctaccaggccatgcagcctgtgtacaccagcggcatctacaacatccctggggacagccagacctctgtgtgcatcaccatcgagcccggcctgctgctgaagggggacatcctgctgaagtgctaccacaagaagttccgcagccctgccagagatgtgatcttccgggtgcagttccacacctgtgccatccatgacctgggcgtggtgtttgggaaggaggacctggatgatgccttcaaggatgaccgcttcccagaatatggcaaggtggagtttgtgttctcctatggccctgagaagatccagggcatggagcacctggagaatggccccagcgtgtctgtggactacaacaccagtgaccccctcatccgctgggacagctatgacaacttcagcggccacagagatgatggcatggaggaggtggtgggccacacccagggccccctggatggcagcctgtatgccaaggtgaagaagaaggacagcctgcacggcagcactggagctgtgaatgccacccggcccaccctgagcgccacccccaaccacgtggagcacaccctgtctgtgtccagtgacagcggcaacagcacagccagcaccaagacagacaagacagatgagcctgtgcctggggccagcagcgccacagctgccctgagcccccaggagaagcgggagctggaccggctgctgagcggcttcggcctggagcgggagaagcagggcgccatgtaccacacccagcacctgcggagcaggcctgctgggggcagcgctgtgcccagcagcggcagacatgtggtgcctgcccaggtgcacgtgaatggaggagccctggccagcgagcgggagacagacatcctggatgatgagctgcccaaccaggacggccacagcgctggctccatgggcaccctgagcagcctggatggagtgaccaacaccagcgagggcggctacccagaggccctgagccccctgaccaacggcctggacaagagctaccccatggagcccatggtgaatggaggcggctacccctatgaaagtgccagcagagctggccctgcccacgccggccacacagcccccatgaggcccagctacagcgcccaggagggcctggccggctaccagcgggagggcccccacccagcctggccccagcctgtgaccaccagccactacgcccatgaccccagcggcatgttccgcagccagagcttcagcgaggccgagccccagctgcccccagcccctgtgcggggcggcagcagccgggaggccgtgcagaggggcctgaacagctggcagcagcagcagcagcagcagcagcagccccggcccccaccccggcagcaggagcgggcccacctggagagcctggtggccagccggcccagcccccagcccctggccgagacccccatccccagcctgcctgagttccccagggctgccagccagcaggagattgagcagagcattgagaccctgaacatgctgatgctggacctggagcccgccagcgctgctgcccccctgcacaagagccagagcgtgcctggggcctggccaggggccagccccctgagcagccagcccctgagcggcagcagccggcagagccaccccctgacccagagccgcagcggctacatccccagcggccacagcctgggcaccccagagcccgccccccgggccagcctggagagcgtgcccccaggccgcagctacagcccctatgactaccagccctgcctggccggccccaaccaggacttccacagcaagagccctgccagcagcagcctgcctgccttcctgcccaccacccacagccccccaggcccccagcagcccccagccagcctgcccggcctgacagcccagcccctgctgagccccaaggaggccaccagtgaccccagcaggaccccagaggaggagcccctgaacctggagggcctggtggcccaccgggtggccggcgtgcaggcccgggagaagcagcctgctgagcccccagcccccctgcggaggagagctgccagtgatggccagtatgagaaccagagccctgaggccaccagccccaggagccctggggtgcgcagccctgtgcagtgtgtgtccccagagctggccctgaccatcgccctgaaccctgggggccggcccaaggagccccacctgcacagctacaaggaggcctttgaggagatggagggcaccagccccagcagccccccaccttctggagtgcgcagccccccaggcctggccaagacccccctgagcgccctgggcctgaagccccacaacccagctgacatcctgctgcaccccaccggggagcccaggagctatgtggagagcgtggccaggacagctgtggccggcccccgggcccaggacagcgagcccaagagcttcagcgccccagccacccaggcctacggccacgagatccccctgagaaatggcaccctgggcggcagctttgtgagccccagccccctgagcaccagcagccccatcctgtctgctgacagcacctctgtgggcagcttccccagcggggagagcagtgaccagggccccaggacccccacccagcccctgctggagagcggcttccgcagcggcagcctgggccagcccagccccagcgcccagaggaactaccagagcagcagccccctgcccaccgtgggcagcagctacagcagcccagactacagcctgcagcacttcagcagcagccctgagagccaggcccgggcccagttctctgtggccggcgtgcacacagtgcccggcagcccccaggcccggcacaggacagtgggcaccaacaccccacccagccctggcttcggctggagggccatcaaccccagcatggccgcccccagcagccccagcctgagccaccaccagatgatgggccccccaggcaccggcttccacggcagcacagtgagcagcccccagagcagcgctgccaccaccccaggcagccccagcctgtgccgccaccctgctggggtgtaccaggtgtctggcctgcacaacaaggtggccaccaccccaggcagccccagcctgggccgccaccctggggcccaccagggcaacctggccagcggcctgcacagcaatgccatcgccagccctggcagccccagcctgggccgccacctgggcggcagcggctctgtggtgcccggcagcccctgcctggacagacatgtggcctacggcggctacagcaccccagaagatagaagacccaccctgagccggcagagcagcgccagcggctaccaggcccccagcacccccagcttccctgtgtccccagcctactacccaggcctgagcagccctgccaccagccccagcccagattctgctgccttccggcagggcagccccaccccagccctgcctgagaagaggaggatgtctgtgggggacagagctggcagcctgcccaactatgccaccatcaatggcaaggtgagcagccctgtggccagcggcatgagcagccccagcggcggcagcacagtgtccttcagccacaccctgcctgacttcagcaagtacagcatgccagacaacagccctgagacccgggccaaggtgaagtttgtgcaggacaccagcaagtactggtacaagccagagatcagccgggagcaggccatcgccctgctgaaggaccaggagcccggggccttcatcatccgggacagccacagcttccggggggcctacggcctggccatgaaggtgagcagccccccacccaccatcatgcagcagaacaagaagggggacatgacccatgagctggtgcgccacttcctgattgagaccggcccccggggcgtgaagctgaagggctgccccaatgagcccaactttggcagcctgagcgccctggtgtaccagcacagcatcatccccctggccctgccctgcaagctggtgatccccaacagagaccccacagatgagagcaaggacagcagcggccctgccaacagcacagctgacctgctgaagcagggcgccgcctgcaatgtgctgtttgtgaacagcgtggacatggagagcctgaccggcccccaggccatcagcaaggccaccagcgagaccctggccgctgaccccaccccagctgccaccatcgtgcacttcaaggtgtctgcccagggcatcaccctgacagacaaccagaggaagctgttcttcagaagacactaccccctgaacacagtgaccttctgtgacctggacccccaggagaggaagtggatgaagacagagggcggggccccagccaagctgtttggatttgtggccaggaagcagggcagcaccacagacaatgcctgccacctgtttgctgagctggaccccaaccagcctgccagcgccatcgtgaactttgtgtccaaggtgatgctgaatgccggccagaagaggtag

SEQ ID NO: 172948 - DNA, 186 bp, synthetic construct
  misc_feature 1..186: note = Description of Artificial Sequence: Synthetic coding sequence
  source 1..186: mol_type = other DNA
atgtctgtgtccaggaccatggaggacagctgtgagctggacctggtgtatgtgacagagcgcatcatcgctgtgtccttccccagcacagccaatgaggagaacttccgcagcaacctgcgggaggtggcccagatgctgaagagcaagcatggaggcaactacctgctcttcaacctgtcctag

SEQ ID NO: 172949 - DNA, 75 bp, synthetic construct
  misc_feature 1..75: note = Description of Artificial Sequence: Synthetic coding sequence
  source 1..75: mol_type = other DNA
atgtctgtgtccaggaccatggaggacagctgtgagctggacctggtgtatgtgacagagcgcatcatcgcctag

SEQ ID NO: 172950 - DNA, 4338 bp, synthetic construct
  misc_feature 1..4338: note = Description of Artificial Sequence: Synthetic coding sequence
  source 1..4338: mol_type = other DNA
atggaggagggccacggcctggacctgacctacatcacagagcgcatcatcgctgtgtccttccctgctggctgcagcgaggagagctacctgcacaacctgcaggaggtgaccaggatgctgaagagcaagcatggagacaactacctggtgctgaacctgtctgagaagagatatgacctgaccaagctgaaccccaagatcatggatgtgggctggccagagctgcacgccccacccctggacaagatgtgcaccatctgcaaggcccaggagagctggctgaacagcaacctgcagcacgtggtggtgatccactgccggggcggcaagggccgcatcggcgtggtgatcagcagctacatgcacttcaccaacgtgtctgccagcgctgaccaggccctggacagatttgccatgaagaagttctatgatgacaaggtgtctgccctgatgcagcccagccagaagagatatgtgcagttcctgagcggcctgctgagcggctctgtgaagatgaatgccagccccctcttcctgcacttcgtcatcctgcacggcacccccaactttgacacaggaggagtgtgccggcccttcctgaagctgtaccaggccatgcagcctgtgtacaccagcggcatctacaacgtgggccctgagaaccccagccgcatctgcatcgtcatcgagcccgcccagctgctgaagggagatgtgatggtgaagtgctaccacaagaagtacagaagtgccaccagagatgtgatcttccggctgcagttccacactggagctgtgcagggctacggcctggtgtttgggaaggaggacctggacaatgccagcaaggatgaccgcttcccagactatggcaaggtggagctggtgttttctgccaccccagagaagatccagggcagcgagcacctgtacaatgaccatggagtcatcgtggactacaacaccacagaccccctcatccgctgggacagctatgagaacctgtctgcagatggagaggtgctgcacacccagggccctgtggatggcagcctgtatgccaaggtgaggaagaagagcagcagtgaccccggcatccctgggggcccccaggccatcccagccaccaacagcccagaccacagcgaccacaccctgtctgtgtccagtgacagcggccacagcacagccagcgccaggacagacaagacagaggagcggctggcccctggcacccggcggggcctgagcgcccaggagaaggccgagctggaccagctgctgagcggcttcggcctggaggaccccggcagcagcctgaaggagatgacagatgcccggagcaagtacagcggcaccaggcatgtggtgcctgcccaggtgcacgtgaatggagatgctgccctgaaggaccgggagacagacatcctggatgatgagatgccccaccacgacctgcacagcgtggacagcctgggcaccctgagcagcagcgagggcccccagagcgcccacctgggccccttcacctgccacaagagcagccagaacagcctgctgagtgatggcttcggcagcaatgtgggggaggacccccagggcaccctggtgcctgacctgggcctgggcatggatggcccctatgagcgggagaggaccttcggcagccgggagcccaagcagccccagcccctgctgaggaagcccagcgtgtctgcccagatgcaggcctacggccagagcagctacagcacccagacctgggtgcggcagcagcagatggtggtggcccaccagtacagctttgccccagatggagaggcccggctggtgagccgctgcccagctgacaaccctggcctggtgcaggcccagccccgggtgcccctgacccccacccggggcaccagcagccgggtggccgtgcagaggggcgtgggcagcggcccccaccccccagacacccagcagcccagccccagcaaggccttcaagccccgcttccctggggaccaggtggtgaatggagctggccctgagctgagcacaggccccagccctggcagccccaccctggacatcgaccagagcattgagcagctgaacagactcatcctggagctggaccccacctttgagcccatccccacccacatgaatgccctgggcagccaggccaacggctctgtgtccccagattctgtgggcggcggcctgcgggccagcagccggctgcctgacacaggagagggccccagccgggccaccggccggcagggcagcagcgctgagcagcccctgggcggccgcctgaggaagctgagcctgggccagtatgacaatgatgctgggggccagctgcccttcagcaaatgtgcctggggcaaggccggcgtggactatgcccccaacctgccccccttccccagccctgcagatgtgaaggagaccatgaccccaggctacccccaggacctggacatcattgatggccgcatcctgagcagcaaggagagcatgtgcagcaccccagccttccctgtgtccccagagaccccctacgtgaagacagccctgcggcacccccccttcagccccccagagccccccctgagcagccctgccagccagcacaagggcggccgggagcccaggagctgcccagagaccctgacccatgctgtgggcatgtctgagagccccatcggccccaagagcaccatgctgcgggcagatgccagcagcacccccagcttccagcaggcctttgccagcagctgcaccatcagcagcaatggacctggccagaggcgggagagcagcagcagcgctgagcggcagtgggtggagagcagccccaagcccatggtgtccctgctgggcagcggccggcccaccggcagccccctgtctgctgagttcagcggcaccaggaaggacagccctgtgctgagctgcttccccccatctgagctgcaggcccccttccacagccatgagctgagcctggccgagcccccagacagcctggccccacccagcagccaggccttcctgggcttcggcacagcccctgtgggcagcggcctgcccccagaggaggacctgggcgccctgctggccaacagccatggagccagccccacccccagcatccccctgacagccaccggggctgctgacaatggcttcctgagccacaacttcctgactgtggcccctggccacagcagccaccacagccctggcctgcagggccagggcgtgaccctgcccggccagccccccctgcctgagaagaagagggccagcgagggggacaggagcctgggctctgtgagccccagcagcagcggcttcagcagcccccacagcggcagcaccatcagcatccccttccccaacgtgctgcctgacttcagcaaggccagcgaggccgccagccccctgcctgacagccctggggacaagctggtgattgtgaagtttgtgcaggacaccagcaagttctggtacaaggctgacatcagccgggagcaggccatcgccatgctgaaggacaaggagcccggcagcttcatcgtgcgggacagccacagcttccggggggcctacggcctggccatgaaggtggccaccccaccacccagcgtgctgcagctgaacaagaaggccggggacctggccaatgagctggtgcgccacttcctgattgagtgcacccccaagggcgtgcggctgaagggctgcagcaatgagccctacttcggcagcctgacagccctggtgtgccagcacagcatcacccccctggccctgccctgcaagctgctgatccctgagcgggaccccctggaggagattgctgagagcagcccccagacagctgccaacagcgctgctgagctgctgaagcagggcgccgcctgcaatgtgtggtacctgaacagcgtggagatggagagcctgaccggccaccaggccatccagaaggccctgagcatcaccctggtgcaggagcccccacctgtgtccacagtggtgcacttcaaggtgtctgcccagggcatcaccctgacagacaaccagaggaagctgttcttccgccgccactaccctgtgaacagcgtcatcttctgtgccctggacccccaggacaggaagtggatcaaggatggccccagcagcaaggtgtttggatttgtggccaggaagcagggcagcgccacagacaacgtgtgccacctgtttgctgagcatgaccctgagcagcctgccagcgccatcgtgaactttgtgtccaaggtgatgattggcagccccaagaaggtgtag

SEQ ID NO: 172951 - DNA, 3618 bp, synthetic construct
  misc_feature 1..3618: note = Description of Artificial Sequence: Synthetic coding sequence
  source 1..3618: mol_type = other DNA
atggaggagggccacggcctggacctgacctacatcacagagcgcatcatcgctgtgtccttccctgctggctgcagcgaggagagctacctgcacaacctgcaggaggtgaccaggatgctgaagagcaagcatggagacaactacctggtgctgaacctgtctgagaagagatatgacctgaccaagctgaaccccaagatcatggatgtgggctggccagagctgcacgccccacccctggacaagatgtgcaccatctgcaaggcccaggagagctggctgaacagcaacctgcagcacgtggtggtgatccactgccggggcggcaagggccgcatcggcgtggtgatcagcagctacatgcacttcaccaacgtgtctgccagcgctgaccaggccctggacagatttgccatgaagaagttctatgatgacaaggtgtctgccctgatgcagcccagccagaagagatatgtgcagttcctgagcggcctgctgagcggctctgtgaagatgaatgccagccccctcttcctgcacttcgtcatcctgcacggcacccccaactttgacacaggaggagtgtgccggcccttcctgaagctgtaccaggccatgcagcctgtgtacaccagcggcatctacaacgtgggccctgagaaccccagccgcatctgcatcgtcatcgagcccgcccagctgctgaagggagatgtgatgatgccccaccacgacctgcacagcgtggacagcctgggcaccctgagcagcagcgagggcccccagagcgcccacctgggccccttcacctgccacaagagcagccagaacagcctgctgagtgatggcttcggcagcaatgtgggggaggacccccagggcaccctggtgcctgacctgggcctgggcatggatggcccctatgagcgggagaggaccttcggcagccgggagcccaagcagccccagcccctgctgaggaagcccagcgtgtctgcccagatgcaggcctacggccagagcagctacagcacccagacctgggtgcggcagcagcagatggtggtggcccaccagtacagctttgccccagatggagaggcccggctggtgagccgctgcccagctgacaaccctggcctggtgcaggcccagccccgggtgcccctgacccccacccggggcaccagcagccgggtggccgtgcagaggggcgtgggcagcggcccccaccccccagacacccagcagcccagccccagcaaggccttcaagccccgcttccctggggaccaggtggtgaatggagctggccctgagctgagcacaggccccagccctggcagccccaccctggacatcgaccagagcattgagcagctgaacagactcatcctggagctggaccccacctttgagcccatccccacccacatgaatgccctgggcagccaggccaacggctctgtgtccccagattctgtgggcggcggcctgcgggccagcagccggctgcctgacacaggagagggccccagccgggccaccggccggcagggcagcagcgctgagcagcccctgggcggccgcctgaggaagctgagcctgggccagtatgacaatgatgctgggggccagctgcccttcagcaaatgtgcctggggcaaggccggcgtggactatgcccccaacctgccccccttccccagccctgcagatgtgaaggagaccatgaccccaggctacccccaggacctggacatcattgatggccgcatcctgagcagcaaggagagcatgtgcagcaccccagccttccctgtgtccccagagaccccctacgtgaagacagccctgcggcacccccccttcagccccccagagccccccctgagcagccctgccagccagcacaagggcggccgggagcccaggagctgcccagagaccctgacccatgctgtgggcatgtctgagagccccatcggccccaagagcaccatgctgcgggcagatgccagcagcacccccagcttccagcaggcctttgccagcagctgcaccatcagcagcaatggacctggccagaggcgggagagcagcagcagcgctgagcggcagtgggtggagagcagccccaagcccatggtgtccctgctgggcagcggccggcccaccggcagccccctgtctgctgagttcagcggcaccaggaaggacagccctgtgctgagctgcttccccccatctgagctgcaggcccccttccacagccatgagctgagcctggccgagcccccagacagcctggccccacccagcagccaggccttcctgggcttcggcacagcccctgtgggcagcggcctgcccccagaggaggacctgggcgccctgctggccaacagccatggagccagccccacccccagcatccccctgacagccaccggggctgctgacaatggcttcctgagccacaacttcctgactgtggcccctggccacagcagccaccacagccctggcctgcagggccagggcgtgaccctgcccggccagccccccctgcctgagaagaagagggccagcgagggggacaggagcctgggctctgtgagccccagcagcagcggcttcagcagcccccacagcggcagcaccatcagcatccccttccccaacgtgctgcctgacttcagcaaggccagcgaggccgccagccccctgcctgacagccctggggacaagctggtgattgtgaagtttgtgcaggacaccagcaagttctggtacaaggctgacatcagccgggagcaggccatcgccatgctgaaggacaaggagcccggcagcttcatcgtgcgggacagccacagcttccggggggcctacggcctggccatgaaggtggccaccccaccacccagcgtgctgcagctgaacaagaaggccggggacctggccaatgagctggtgcgccacttcctgattgagtgcacccccaagggcgtgcggctgaagggctgcagcaatgagccctacttcggcagcctgacagccctggtgtgccagcacagcatcacccccctggccctgccctgcaagctgctgatccctgagcgggaccccctggaggagattgctgagagcagcccccagacagctgccaacagcgctgctgagctgctgaagcagggcgccgcctgcaatgtgtggtacctgaacagcgtggagatggagagcctgaccggccaccaggccatccagaaggccctgagcatcaccctggtgcaggagcccccacctgtgtccacagtggtgcacttcaaggtgtctgcccagggcatcaccctgacagacaaccagaggaagctgttcttccgccgccactaccctgtgaacagcgtcatcttctgtgccctggacccccaggacaggaagtggatcaaggatggccccagcagcaaggtgtttggatttgtggccaggaagcagggcagcgccacagacaacgtgtgccacctgtttgctgagcatgaccctgagcagcctgccagcgccatcgtgaactttgtgtccaaggtgatgattggcagccccaagaaggtgtag

SEQ ID NO: 172952 - DNA, 4338 bp, synthetic construct; identical to SEQ ID NO: 172950
  misc_feature 1..4338: note = Description of Artificial Sequence: Synthetic coding sequence
  source 1..4338: mol_type = other DNA

SEQ ID NO: 172953 - DNA, 327 bp, synthetic construct
  misc_feature 1..327: note = Description of Artificial Sequence: Synthetic coding sequence
  source 1..327: mol_type = other DNA
atggaggagggccacggcctggacctgacctacatcacagagcgcatcatcgctgtgtccttccctgctggctgcagcgaggagagctacctgcacaacctgcaggaggtgaccaggatgctgaagagcaagcatggagacaactacctggtgctgaacctgtctgagaagagatatgacctgaccaagctgaaccccaagatcatggatgtgggctggccagagctgcacgccccacccctggacaagatgtgcaccatctgcaaggcccaggagagctggctgaacagcaacctgcagcacgtggtggtgatccactgcaggtag

SEQ ID NO: 172954 - DNA, 417 bp, synthetic construct
  misc_feature 1..417: note = Description of Artificial Sequence: Synthetic coding sequence
  source 1..417: mol_type = other DNA
atggaggagggccacggcctggacctgacctacatcacagagcgcatcatcgctgtgtccttccctgctggctgcagcgaggagagctacctgcacaacctgcaggaggtgaccaggatgctgaagagcaagcatggagacaactacctggtgctgaacctgtctgagaagagatatgacctgaccaagctgaaccccaagatcatggatgtgggctggccagagctgcacgccccacccctggacaagatgtgcaccatctgcaaggcccaggagagctggctgaacagcaacctgcagcacgtggtggtgatccactgccggggcggcaagggccgcatcggcgtggtgatcagcagctacatgcacttcaccaacgtgtctgccagcgctgaccaggccctggaccgcttctag

SEQ ID NO: 172955 - DNA, 753 bp, synthetic construct
  misc_feature 1..753: note = Description of Artificial Sequence: Synthetic coding sequence
  source 1..753: mol_type = other DNA
atggaggagggccacggcctggacctgacctacatcacagagcgcatcatcgctgtgtccttccctgctggctgcagcgaggagagctacctgcacaacctgcaggaggtgaccaggatgctgaagagcaagcatggagacaactacctggtgctgaacctgtctgagaagagatatgacctgaccaagctgaaccccaagatcatggatgtgggctggccagagctgcacgccccacccctggacaagatgtgcaccatctgcaaggcccaggagagctggctgaacagcaacctgcagcacgtggtggtgatccactgccggggcggcaagggccgcatcggcgtggtgatcagcagctacatgcacttcaccaacgtgtctgccagcgctgaccaggccctggacagatttgccatgaagaagttctatgatgacaaggtgtctgccctgatgcagcccagccagaagagatatgtgcagttcctgagcggcctgctgagcggctctgtgaagatgaatgccagccccctcttcctgcacttcgtcatcctgcacggcacccccaactttgacacaggaggagtgtgccggcccttcctgaagctgtaccaggccatgcagcctgtgtacaccagcggcatctacaacgtgggccctgagaaccccagccgcatctgcatcgtcatcgagcccgcccagctgctgaagggagatgtgatggtgatgaactacaacatcgccaacatctag

SEQ ID NO: 172956 - DNA, 753 bp, synthetic construct; identical to SEQ ID NO: 172955
  misc_feature 1..753: note = Description of Artificial Sequence: Synthetic coding sequence
  source 1..753: mol_type = other DNA

SEQ ID NO: 172957 - DNA, 3816 bp, synthetic construct
  misc_feature 1..3816: note = Description of Artificial Sequence: Synthetic coding sequence
  source 1..3816: mol_type = other DNA
agccaggccctgaatgaaagaatgaactggctgtgcaggaaccaggaccccaaccccccaccccagcctgaggagctgaccagcagcctgcacgccttcaagaacaaggccttcaagaagagcaaggtgtgtggggtgtgcaagcagatcattgatggccagggcatcagctgccgggcctgcaagtacagctgccacaagaagtgtgaggccaaggtggtgatcccctgtggggtgcaggtgcggctggagcaggcccctggcagcagcaccctgagcagcagcctgtgccgggacaagcccctgcggcctgtgatcctgagccccaccatggaggagggccacggcctggacctgacctacatcacagagcgcatcatcgctgtgtccttccctgctggctgcagcgaggagagctacctgcacaacctgcaggaggtgaccaggatgctgaagagcaagcatggagacaactacctggtgctgaacctgtctgagaagagatatgacctgaccaagctgaaccccaagatcatggatgtgggctggccagagctgcacgccccacccctggacaagatgtgcaccatctgcaaggcccaggagagctggctgaacagcaacctgcagcacgtggtggtgatccactgccggggcggcaagggccgcatcggcgtggtgatcagcagctacatgcacttcaccaacgtgtctgccagcgctgaccaggccctggacagatttgccatgaagaagttctatgatgacaaggtgtctgccctgatgcagcccagccagaagagatatgtgcagttcctgagcggcctgctgagcggctctgtgaagatgaatgccagccccctcttcctgcacttcgtcatcctgcacggcacccccaactttgacacaggaggagtgtgccggcccttcctgaagctgtaccaggccatgcagcctgtgtacaccagcggcatctacaacgtgggccctgagaaccccagccgcatctgcatcgtcatcgagcccgcccagctgctgaagggagatgtgatggtgaagtgctaccacaagaagtacagaagtgccaccagagatgtgatcttccggctgcagttccacactggagctgtgcagggctacggcctggtgtttgggaaggaggacctggacaatgccagcaaggatgaccgcttcccagactatggcaaggtggagctggtgttttctgccaccccagagaagatccagggcagcgagcacctgtacaatgaccatggagtcatcgtggactacaacaccacagaccccctcatccgctgggacagctatgagaacctgtctgcagatggagaggtgctgcacacccagggccctgtggatggcagcctgtatgccaaggtgaggaagaagagcagcagtgaccccggcatccctgggggcccccaggccatcccagccaccaacagcccagaccacagcgaccacaccctgtctgtgtccagtgacagcggccacagcacagccagcgccaggacagacaagacagaggagcggctggcccctggcacccggcggggcctgagcgcccaggagaaggccgagctggaccagctgctgagcggcttcggcctggaggaccccggcagcagcctgaaggagatgacagatgcccggagcaagtacagcggcaccaggcatgtggtgcctgcccaggtgcacgtgaatggagatgctgccctgaaggaccgggagacagacatcctggatgatgagatgccccaccacgacctgcacagcgtggacagcctgggcaccctgagcagcagcgagggcccccagagcgcccacctgggccccttcacctgccacaagagcagccagaacagcctgctgagtgatggcttcggcagcaatgtgggggaggacccccagggcaccctggtgcctgacctgggcctgggcatggatggcccctatgagcgggagaggaccttcggcagccgggagcccaagcagccccagcccctgctgaggaagcccagcgtgtctgcccagatgcaggcctacggccagagcagctacagcacccagacctgggtgcggcagcagcagatggtggtggcccaccagtacagctttgccccagatggagaggcccggctggtgagccgctgcccagctgacaaccctggcctggtgcaggcccagccccgggtgcccctgacccccacccggggcaccagcagccgggtggccgtgcagaggggcgtgggcagcggcccccaccccccagacacccagcagcccagccccagcaaggccttcaagccccgcttccctggggaccaggtggtgaatggagctggccctgagctgagcacaggccccagccctggcagccccaccctggacatcgaccagagcattgagcagctgaacagactcatcctggagctggaccccacctttgagcccatccccacccacatgaatgccctgggcagccaggccaacggctctgtgtccccagattctgtgggcggcggcctgcgggccagcagccggctgcctgacacaggagagggccccagccgggccaccggccggcagggcagcagcgctgagcagcccctgggcggccgcctgaggaagctgagcctgggccagtatgacaatgatgctgggggccagctgcccttcagcaaatgtgcctggggcaaggccggcgtggactatgcccccaacctgccccccttccccagccctgcagatgtgaaggagaccatgaccccaggctacccccaggacctggacatcattgatggccgcatcctgagcagcaaggagagcatgtgcagcaccccagccttccctgtgtccccagagaccccctacgtgaagacagccctgcggcacccccccttcagccccccagagccccccctgagcagccctgccagccagcacaagggcggccgggagcccaggagctgcccagagaccctgacccatgctgtgggcatgtctgagagccccatcggccccaagagcaccatgctgcgggcagatgccagcagcacccccagcttccagcaggcctttgccagcagctgcaccatcagcagcaatggacctggccagaggcgggagagcagcagcagcgctgagcggcagtgggtggagagcagccccaagcccatggtgtccctgctgggcagcggccggcccaccggcagccccctgtctgctgagttcagcggcaccaggaaggacagccctgtgctgagctgcttccccccatctgagctgcaggcccccttccacagccatgagctgagcctggccgagcccccagacagcctggccccacccagcagccaggccttcctgggcttcggcacagcccctgtgggcagcggcctgcccccagaggaggacctgggcgccctgctggccaacagccatggagccagccccacccccagcatccccctgacagccaccggggctgctgacaatggcttcctgagccacaacttcctgactgtggcccctggccacagcagccaccacagccctggcctgcagggccagggcgtgaccctgcccggccagccccccctgcctgagaagaagagggccagcgagggggacaggagcctgggctctgtgagccccagcagcagcggcttcagcagcccccacagcggcagcaccatcagcatccccttccccaacgtgctgcctgacttcagcaaggccagcgaggcccccaccttctaccagaccagcaagccagacatccctggcccctag

SEQ ID NO: 172958 - DNA, 2760 bp, synthetic construct
  misc_feature 1..2760: note = Description of Artificial Sequence: Synthetic coding sequence
  source 1..2760: mol_type = other DNA
atggatggcccctatgagcgggagaggaccttcggcagccgggagcccaagcagccccagcccctgctgaggaagcccagcgtgtctgcccagatgcaggcctacggccagagcagctacagcacccagacctgggtgcggcagcagcagatggtggtggcccaccagtacagctttgccccagatggagaggcccggctggtgagccgctgcccagctgacaaccctggcctggtgcaggcccagccccgggtgcccctgacccccacccggggcaccagcagccgggtggccgtgcagaggggcgtgggcagcggcccccaccccccagacacccagcagcccagccccagcaaggccttcaagccccgcttccctggggaccaggtggtgaatggagctggccctgagctgagcacaggccccagccctggcagccccaccctggacatcgaccagagcattgagcagctgaacagactcatcctggagctggaccccacctttgagcccatccccacccacatgaatgccctgggcagccaggccaacggctctgtgtccccagattctgtgggcggcggcctgcgggccagcagccggctgcctgacacaggagagggccccagccgggccaccggccggcagggcagcagcgctgagcagcccctgggcggccgcctgaggaagctgagcctgggccagtatgacaatgatgctgggggccagctgcccttcagcaaatgtgcctggggcaaggccggcgtggactatgcccccaacctgccccccttccccagccctgcagatgtgaaggagaccatgaccccaggctacccccaggacctggacatcattgatggccgcatcctgagcagcaaggagagcatgtgcagcaccccagccttccctgtgtccccagagaccccctacgtgaagacagccctgcggcacccccccttcagccccccagagccccccctgagcagccctgccagccagcacaagggcggccgggagcccaggagctgcccagagaccctgacccatgctgtgggcatgtctgagagccccatcggccccaagagcaccatgctgcgggcagatgccagcagcacccccagcttccagcaggcctttgccagcagctgcaccatcagcagcaatggacctggccagaggcgggagagcagcagcagcgctgagcggcagtgggtggagagcagccccaagcccatggtgtccctgctgggcagcggccggcccaccggcagccccctgtctgctgagttcagcggcaccaggaaggacagccctgtgctgagctgcttccccccatctgagctgcaggcccccttccacagccatgagctgagcctggccgagcccccagacagcctggccccacccagcagccaggccttcctgggcttcggcacagcccctgtgggcagcggcctgcccccagaggaggacctgggcgccctgctggccaacagccatggagccagccccacccccagcatccccctgacagccaccggggctgctgacaatggcttcctgagccacaacttcctgactgtggcccctggccacagcagccaccacagccctggcctgcagggccagggcgtgaccctgcccggccagccccccctgcctgagaagaagagggccagcgagggggacaggagcctgggctctgtgagccccagcagcagcggcttcagcagcccccacagcggcagcaccatcagcatccccttccccaacgtgctgcctgacttcagcaaggccagcgaggccgccagccccctgcctgacagccctggggacaagctggtgattgtgaagtttgtgcaggacaccagcaagttctggtacaaggctgacatcagccgggagcaggccatcgccatgctgaaggacaaggagcccggcagcttcatcgtgcgggacagccacagcttccggggggcctacggcctggccatgaaggtggccaccccaccacccagcgtgctgcagctgaacaagaaggccggggacctggccaatgagctggtgcgccacttcctgattgagtgcacccccaagggcgtgcggctgaagggctgcagcaatgagccctacttcggcagcctgacagccctggtgtgccagcacagcatcacccccctggccctgccctgcaagctgctgatccctgagcgggaccccctggaggagattgctgagagcagcccccagacagctgccaacagcgctgctgagctgctgaagcagggcgccgcctgcaatgtgtggtacctgaacagcgtggagatggagagcctgaccggccaccaggccatccagaaggccctgagcatcaccctggtgcaggagcccccacctgtgtccacagtggtgcacttcaaggtgtctgcccagggcatcaccctgacagacaaccagaggaagctgttcttccgccgccactaccctgtgaacagcgtcatcttctgtgccctggacccccaggacaggaagtggatcaaggatggccccagcagcaaggtgtttggatttgtggccaggaagcagggcagcgccacagacaacgtgtgccacctgtttgctgagcatgaccctgagcagcctgcccgggagagccagaggcacagaggagccagagatggcccccatgaggccatgccccggcggcacagcggcagccctgccaacgtgctgtttgagctgattggccaggtgtag

SEQ ID NO: 172959 - DNA, 2148 bp, synthetic construct
  misc_feature 1..2148: note = Description of Artificial Sequence: Synthetic coding sequence
  source 1..2148: mol_type = other DNA
atgagccaggtgatgagcagccccctgctggccggcggccatgctgtgtccctggccccctgtgatgagcccaggaggaccctgcacccagcccccagccccagcctgcccccccagtgcagctactacaccacagagggctggggcgcccaggccctgatggcccctgtgccctgcatgggccccccaggccgcctgcagcaggccccccaggtggaggccaaggccacctgcttcctgcccagccctggagagaaggccctgggcaccccagaggacctggacagctacatcgacttcagcctggagagcctgaaccagatgatcctggagctggaccccaccttccagctgctgcccccaggcactggaggcagccaggccgagctggcccagagcaccatgtccatgaggaagaaggaggagagcgaggccctggacatcaagtacatcgaggtgaccagcgcccggagccgctgccatgatggcccccagcactgcagcagccccagcgtgaccccacccttcggcagcctgcggagcggcggcctgctgctgagcagagatgtgccccgggagaccaggagcagcagcgagagcctcatcttcagcggcaaccagggccggggccaccagaggcccctgccccccagcgagggcctgagccccaggcctcccaacagccccagcatcagcatcccctgcatgggcagcaaggccagcagcccccacggcctgggcagccccctggtggccagcccccggctggagaagaggctgggcggcctggccccccagaggggcagccgcatctctgtgctgagcgccagccctgtgtctgatgtgtcctacatgtttggcagcagccagagcctgctgcacagcagcaacagcagccaccagagcagcagccgcagcctggagagccctgccaacagcagcagcagcctgcacagcctgggctctgtgtccctgtgcacccggcccagcgacttccaggcccccaggaaccccaccctgaccatgggccagcccaggaccccccacagcccccccctggccaaggagcacgccagcagctgcccccccagcatcaccaacagcatggtggacatccccatcgtgctgatcaatggctgcccagagcccggcagcagccccccccagaggaccccaggccaccagaacagcgtgcagcccggggccgccagccccagcaacccctgcccagccaccaggagcaacagccagaccctgagtgatgcccccttcaccacctgcccagagggccctgcccgggacatgcagcccaccatgaagtttgtgatggacaccagcaagtactggttcaagcccaacatcacccgggagcaggccatcgagctgctgaggaaggaggagcccggggcctttgtgatccgggacagcagcagctaccggggcagctttggcctggccctgaaggtgcaggaggtgcctgccagcgcccagagcaggcctggagaggacagcaatgacctgatccgccacttcctgattgagagcagcgccaagggcgtgcacctgaagggagcagatgaggagccctacttcggcagcctgagcgcctttgtgtgccagcacagcatcatggccctggccctgccctgcaagctgaccatcccccagcgggagctgggcggcgcagatggagccagtgacagcacagacagccctgccagctgccagaagaagtctgctggctgccacaccctgtacctgagctctgtgtctgtggagaccctgaccggggccctggccgtgcagaaggccatcagcaccacctttgagcgggacatcctgcccacccccaccgtggtgcacttcaaggtgacagagcagggcatcaccctgacagatgtgcagaggaaggtgttcttcagaagacactaccccctgaccaccctgcgcttctgtggcatggaccctgagcagaggaagtggcagaagtactgcaagcccagctggatctttggatttgtggccaagagccagacagagccccaggagaatgtgtgccacctgtttgctgaatatgacatggtgcagcctgccagccaggtgattggcctggtgacagccctgctgcaggatgctgagaggatgtag

SEQ ID NO: 172960 - DNA, 2148 bp, synthetic construct; identical to SEQ ID NO: 172959
  misc_feature 1..2148: note = Description of Artificial Sequence: Synthetic coding sequence
  source 1..2148: mol_type = other DNA

SEQ ID NO: 172961 - DNA, 387 bp, synthetic construct
  misc_feature 1..387: note = Description of Artificial Sequence: Synthetic coding sequence
  source 1..387: mol_type = other DNA
atgaggcctgtgcctgtgcggggcgtgcacagcctgcacccccggccctttggaggccctgtgtccctgccctggctgaggacaggccgctgccgctggggcctgggcctgtaccggcagcccagcctgctgcctgaggagatctgtggggtcttcttccgccgccactaccccctgaccaccctgcgcttctgtggcatggaccctgagcagaggaagtggcagaagtactgcaagcccagctggatcttcggctttgtggccaagagccagacagagccccaggagaatgtgtgccacctgtttgctgaatatgacatggtgcagcctgccagccaggtgattggcctggtgacagccctgctgcaggatgctgagaggatgtag

SEQ ID NO: 172962 - DNA, 4230 bp, synthetic construct
  misc_feature 1..4230: note = Description of Artificial Sequence: Synthetic coding sequence
  source 1..4230: mol_type = other DNA
atgaagagcagcggccctgtggagcggctgctgcgggccctgggccggcgggacagcagccgggccgccagccggcccaggaaggccgagccccacagcttccgggagaaggtgttcaggaagaagccccctgtgtgtgctgtgtgcaaggtgaccattgatggcaccggggtgtcctgccgggtgtgcaaggtggccacccacaggaaatgtgaggccaaggtgaccagcgcctgccaggccctgccccctgtggagctgcggaggaacacagcccctgtgagaagaattgagcacctgggcagcaccaagagcctgaaccacagcaagcagaggagcaccctgcccaggagcttcagcctggaccccctgatggagcggcgctgggacctggacctgacctacgtgacagagcgcatcctggccgccgccttccctgcccggccagatgagcagaggcaccggggccacctgcgggagctggcccacgtgctgcagagcaagcaccgggacaagtacctgctcttcaacctgtctgagaagagacatgacctgacccggctgaaccccaaggtgcaggactttggctggccagagctgcacgccccacccctggacaagctgtgcagcatctgcaaggccatggagacctggctgtctgctgacccccagcacgtggtggtgctgtactgcaagggcaacaagggcaagctgggcgtgattgtgtctgcctacatgcactacagcaagatctctgctggagctgaccaggccctggccaccctgaccatgaggaagttctgtgaggacaaggtggccacagagctgcagcccagccagaggcgctacatctcctacttcagcggcctgctgagcggcagcatccgcatgaacagcagccccctcttcctgcactacgtgctgatccccatgctgcctgcctttgagcccggcaccggcttccagcccttcctgaagatctaccagagcatgcagctggtgtacaccagcggcgtgtaccacatcgccggccctggcccccagcagctgtgcatcagcctggagcccgccctgctgctgaagggagatgtgatggtgacctgctaccacaagggcggccggggcacagacaggaccctggtgttccgggtgcagttccacacctgcaccatccacggcccccagctgaccttccccaaggaccagctggatgaggcctggacagatgagcgcttccccttccaggcctctgtggagtttgtgttcagcagcagccctgagaagatcaagggcagcaccccaagaaatgaccccagcgtgtctgtggactacaacaccacagagcctgctgtgcgctgggacagctatgagaacttcaaccagcaccacgaggacagcgtggatggcagcctgacccacacccggggccccctggatggcagcccctatgcccaggtgcagaggcctccccggcagaccccaccagcccccagccctgagcccccacctccacccatgctgtctgtgtccagtgacagcggccacagcagcaccctgaccacagagcctgctgctgagagccctggccggcccccacccacagctgctgagcggcaggagctggaccggctgctgggcggctgcggcgtggccagcggcggcagaggagctggccgggagacagccatcctggatgatgaggagcagcccaccgtgggcggcggcccccacctgggcgtgtacccaggccaccggcccggcctgagccgccactgcagctgccggcagggctaccgggagccctgtggggtgcccaacggcggctactacagacctgagggcaccctggagcggcggcggctggcctatggaggctatgagggcagcccccagggctacgccgaggcctccatggagaagaggcggctgtgccgcagcctgtctgagggcctgtacccctacccacctgagatgggcaagccagccactggagactttggctaccgggcccctggctaccgggaggtggtgatcctggaggaccccggcctgcctgccctgtacccctgcccagcctgtgaggagaagctggccctgcccacagctgccctgtatggcctgcggctggagcgggaggccggggagggctgggccagcgaggccggcaagcccctgctgcaccctgtgcggcccggccaccccctgcccctgctgctgcctgcctgtggccaccaccacgcccccatgccagactacagctgcctgaagccacccaaggccggggaggagggccacgagggctgcagctacaccatgtgcccagagggccgctatggccaccctggctacccagccctggtgacctacagctatggaggagctgtgcccagctactgcccagcctacggccgggtgccccacagctgtggcagccctggagagggccggggctaccccagccctggggcccacagcccccgggccggcagcatcagccctggcagccccccctacccccagagcaggaagctgtcctatgagatccccacagaggagggcggggaccgctaccccctgcccggccacctggccagcgctggccccctggccagcgctgagagcctggagcctgtgtcctggagggagggccccagcggccacagcaccctgcccaggagccccagagatgccccctgcagcgccagcagcgagctgagcggccccagcacccccctgcacaccagcagccctgtgcagggcaaggagagcacccggcggcaggacaccaggagccccaccagcgcccccacccagaggctgagccctggagaggccctgccccctgtgtcccaggccggcaccgggaaggcccctgagctgcccagcggcagcggccctgagcccctggcccccagccctgtgagccccaccttcccccccagcagccccagcgactggccccaggagaggagccctgggggccacagtgatggagccagccccaggagccctgtgcccaccaccctgcccggcctgcggcatgccccctggcagggcccccggggccccccagacagcccagatggcagccccctgacccctgtgcccagccagatgccctggctggtggccagccctgagcccccccagagcagccccaccccagccttccccctggccgccagctatgacaccaacggcctgagccagccccccctgcctgagaagaggcacctgcccggccctggccagcagcccggcccctggggccctgagcaggccagcagccctgcccggggcatcagccaccacgtgacctttgcccccctgctgagtgacaacgtgccccagaccccagagccccccacccaggagagccagagcaatgtgaagtttgtgcaggacaccagcaagttctggtacaagccccacctgagccgggaccaggccatcgccctgctgaaggacaaggaccccggggccttcctgatccgggacagccacagcttccagggcgcctacggcctggccctgaaggtggccaccccaccacccagcgcccagccctggaagggggaccctgtggagcagctggtgcgccacttcctgattgagaccggccccaagggcgtgaagatcaagggctgccccagcgagccctacttcggcagcctgagcgccctggtgtcccagcacagcatcagccccatcagcctgccctgctgcctgcgcatccccagcaaggaccccctggaggagaccccagaggcccctgtgcccaccaacatgagcacagctgctgacctgctgcggcagggcgccgcctgcagcgtgctgtacctgacctctgtggagacagagagcctgaccggcccccaggccgtggcccgggccagcagcgctgccctgagctgcagcccccggcccaccccagctgtggtgcacttcaaggtgtctgcccagggcatcaccctgacagacaaccagaggaagctgttcttcagaagacactaccctgtgaacagcatcaccttcagcagcacagacccccaggaccggcgctggaccaacccagatggcaccaccagcaagatcttcggctttgtggccaagaagccaggcagcccctgggagaatgtgtgccacctgtttgctgagctggaccctgaccagcctgctggggccatcgtgaccttcatcaccaaggtgctgctgggccagaggaagtag

SEQ ID NO: 172963 - DNA, 4260 bp, synthetic construct
  misc_feature 1..4260: note = Description of Artificial Sequence: Synthetic coding sequence
  source 1..4260: mol_type = other DNA
atggatggcggcggcgtgtgtgtgggccgcggggacctgctgagcagcccccaggccctgggccagctgctgaggaaggagagccggccccggcgggccatgaagcccaggaaggccgagccccacagcttccgggagaaggtgttcaggaagaagccccctgtgtgtgctgtgtgcaaggtgaccattgatggcaccggggtgtcctgccgggtgtgcaaggtggccacccacaggaaatgtgaggccaaggtgaccagcgcctgccaggccctgccccctgtggagctgcggaggaacacagcccctgtgagaagaattgagcacctgggcagcaccaagagcctgaaccacagcaagcagaggagcaccctgcccaggagcttcagcctggaccccctgatggagcggcgctgggacctggacctgacctacgtgacagagcgcatcctggccgccgccttccctgcccggccagatgagcagaggcaccggggccacctgcgggagctggcccacgtgctgcagagcaagcaccgggacaagtacctgctcttcaacctgtctgagaagagacatgacctgacccggctgaaccccaaggtgcaggactttggctggccagagctgcacgccccacccctggacaagctgtgcagcatctgcaaggccatggagacctggctgtctgctgacccccagcacgtggtggtgctgtactgcaagggcaacaagggcaagctgggcgtgattgtgtctgcctacatgcactacagcaagatctctgctggagctgaccaggccctggccaccctgaccatgaggaagttctgtgaggacaaggtggccacagagctgcagcccagccagaggcgctacatctcctacttcagcggcctgctgagcggcagcatccgcatgaacagcagccccctcttcctgcactacgtgctgatccccatgctgcctgcctttgagcccggcaccggcttccagcccttcctgaagatctaccagagcatgcagctggtgtacaccagcggcgtgtaccacatcgccggccctggcccccagcagctgtgcatcagcctggagcccgccctgctgctgaagggagatgtgatggtgacctgctaccacaagggcggccggggcacagacaggaccctggtgttccgggtgcagttccacacctgcaccatccacggcccccagctgaccttccccaaggaccagctggatgaggcctggacagatgagcgcttccccttccaggcctctgtggagtttgtgttcagcagcagccctgagaagatcaagggcagcaccccaagaaatgaccccagcgtgtctgtggactacaacaccacagagcctgctgtgcgctgggacagctatgagaacttcaaccagcaccacgaggacagcgtggatggcagcctgacccacacccggggccccctggatggcagcccctatgcccaggtgcagaggcctccccggcagaccccaccagcccccagccctgagcccccacctccacccatgctgtctgtgtccagtgacagcggccacagcagcaccctgaccacagagcctgctgctgagagccctggccggcccccacccacagctgctgagcggcaggagctggaccggctgctgggcggctgcggcgtggccagcggcggcagaggagctggccgggagacagccatcctggatgatgaggagcagcccaccgtgggcggcggcccccacctgggcgtgtacccaggccaccggcccggcctgagccgccactgcagctgccggcagggctaccgggagccctgtggggtgcccaacggcggctactacagacctgagggcaccctggagcggcggcggctggcctatggaggctatgagggcagcccccagggctacgccgaggcctccatggagaagaggcggctgtgccgcagcctgtctgagggcctgtacccctacccacctgagatgggcaagccagccactggagactttggctaccgggcccctggctaccgggaggtggtgatcctggaggaccccggcctgcctgccctgtacccctgcccagcctgtgaggagaagctggccctgcccacagctgccctgtatggcctgcggctggagcgggaggccggggagggctgggccagcgaggccggcaagcccctgctgcaccctgtgcggcccggccaccccctgcccctgctgctgcctgcctgtggccaccaccacgcccccatgccagactacagctgcctgaagccacccaaggccggggaggagggccacgagggctgcagctacaccatgtgcccagagggccgctatggccaccctggctacccagccctggtgacctacagctatggaggagctgtgcccagctactgcccagcctacggccgggtgccccacagctgtggcagccctggagagggccggggctaccccagccctggggcccacagcccccgggccggcagcatcagccctggcagccccccctacccccagagcaggaagctgtcctatgagatccccacagaggagggcggggaccgctaccccctgcccggccacctggccagcgctggccccctggccagcgctgagagcctggagcctgtgtcctggagggagggccccagcggccacagcaccctgcccaggagccccagagatgccccctgcagcgccagcagcgagctgagcggccccagcacccccctgcacaccagcagccctgtgcagggcaaggagagcacccggcggcaggacaccaggagccccaccagcgcccccacccagaggctgagccctggagaggccctgccccctgtgtcccaggccggcaccgggaaggcccctgagctgcccagcggcagcggccctgagcccctggcccccagccctgtgagccccaccttcccccccagcagccccagcgactggccccaggagaggagccctgggggccacagtgatggagccagccccaggagccctgtgcccaccaccctgcccggcctgcggcatgccccctggcagggcccccggggccccccagacagcccagatggcagccccctgacccctgtgcccagccagatgccctggctggtggccagccctgagcccccccagagcagccccaccccagccttccccctggccgccagctatgacaccaacggcctgagccagccccccctgcctgagaagaggcacctgcccggccctggccagcagcccggcccctggggccctgagcaggccagcagccctgcccggggcatcagccaccacgtgacctttgcccccctgctgagtgacaacgtgccccagaccccagagccccccacccaggagagccagagcaatgtgaagtttgtgcaggacaccagcaagttctggtacaagccccacctgagccgggaccaggccatcgccctgctgaaggacaaggaccccggggccttcctgatccgggacagccacagcttccagggcgcctacggcctggccctgaaggtggccaccccaccacccagcgcccagccctggaagggggaccctgtggagcagctggtgcgccacttcctgattgagaccggccccaagggcgtgaagatcaagggctgccccagcgagccctacttcggcagcctgagcgccctggtgtcccagcacagcatcagccccatcagcctgccctgctgcctgcgcatccccagcaaggaccccctggaggagaccccagaggcccctgtgcccaccaacatgagcacagctgctgacctgctgcggcagggcgccgcctgcagcgtgctgtacctgacctctgtggagacagagagcctgaccggcccccaggccgtggcccgggccagcagcgctgccctgagctgcagcccccggcccaccccagctgtggtgcacttcaaggtgtctgcccagggcatcaccctgacagacaaccagaggaagctgttcttcagaagacactaccctgtgaacagcatcaccttcagcagcacagacccccaggaccggcgctggaccaacccagatggcaccaccagcaagatcttcggctttgtggccaagaagccaggcagcccctgggagaatgtgtgccacctgtttgctgagctggaccctgaccagcctgctggggccatcgtgaccttcatcaccaaggtgctgctgggccagaggaagtag

SEQ ID NO: 172964 - DNA, 3858 bp, synthetic construct
  misc_feature 1..3858: note = Description of Artificial Sequence: Synthetic coding sequence
  source 1..3858: mol_type = other DNA
atggagcggcgctgggacctggacctgacctacgtgacagagcgcatcctggccgccgccttccctgcccggccagatgagcagaggcaccggggccacctgcgggagctggcccacgtgctgcagagcaagcaccgggacaagtacctgctcttcaacctgtctgagaagagacatgacctgacccggctgaaccccaaggtgcaggactttggctggccagagctgcacgccccacccctggacaagctgtgcagcatctgcaaggccatggagacctggctgtctgctgacccccagcacgtggtggtgctgtactgcaagggcaacaagggcaagctgggcgtgattgtgtctgcctacatgcactacagcaagatctctgctggagctgaccaggccctggccaccctgaccatgaggaagttctgtgaggacaaggtggccacagagctgcagcccagccagaggcgctacatctcctacttcagcggcctgctgagcggcagcatccgcatgaacagcagccccctcttcctgcactacgtgctgatccccatgctgcctgcctttgagcccggcaccggcttccagcccttcctgaagatctaccagagcatgcagctggtgtacaccagcggcgtgtaccacatcgccggccctggcccccagcagctgtgcatcagcctggagcccgccctgctgctgaagggagatgtgatggtgacctgctaccacaagggcggccggggcacagacaggaccctggtgttccgggtgcagttccacacctgcaccatccacggcccccagctgaccttccccaaggaccagctggatgaggcctggacagatgagcgcttccccttccaggcctctgtggagtttgtgttcagcagcagccctgagaagatcaagggcagcaccccaagaaatgaccccagcgtgtctgtggactacaacaccacagagcctgctgtgcgctgggacagctatgagaacttcaaccagcaccacgaggacagcgtggatggcagcctgacccacacccggggccccctggatggcagcccctatgcccaggtgcagaggcctccccggcagaccccaccagcccccagccctgagcccccacctccacccatgctgtctgtgtccagtgacagcggccacagcagcaccctgaccacagagcctgctgctgagagccctggccggcccccacccacagctgctgagcggcaggagctggaccggctgctgggcggctgcggcgtggccagcggcggcagaggagctggccgggagacagccatcctggatgatgaggagcagcccaccgtgggcggcggcccccacctgggcgtgtacccaggccaccggcccggcctgagccgccactgcagctgccggcagggctaccgggagccctgtggggtgcccaacggcggctactacagacctgagggcaccctggagcggcggcggctggcctatggaggctatgagggcagcccccagggctacgccgaggcctccatggagaagaggcggctgtgccgcagcctgtctgagggcctgtacccctacccacctgagatgggcaagccagccactggagactttggctaccgggcccctggctaccgggaggtggtgatcctggaggaccccggcctgcctgccctgtacccctgcccagcctgtgaggagaagctggccctgcccacagctgccctgtatggcctgcggctggagcgggaggccggggagggctgggccagcgaggccggcaagcccctgctgcaccctgtgcggcccggccaccccctgcccctgctgctgcctgcctgtggccaccaccacgcccccatgccagactacagctgcctgaagccacccaaggccggggaggagggccacgagggctgcagctacaccatgtgcccagagggccgctatggccaccctggctacccagccctggtgacctacagctatggaggagctgtgcccagctactgcccagcctacggccgggtgccccacagctgtggcagccctggagagggccggggctaccccagccctggggcccacagcccccgggccggcagcatcagccctggcagccccccctacccccagagcaggaagctgtcctatgagatccccacagaggagggcggggaccgctaccccctgcccggccacctggccagcgctggccccctggccagcgctgagagcctggagcctgtgtcctggagggagggccccagcggccacagcaccctgcccaggagccccagagatgccccctgcagcgccagcagcgagctgagcggccccagcacccccctgcacaccagcagccctgtgcagggcaaggagagcacccggcggcaggacaccaggagccccaccagcgcccccacccagaggctgagccctggagaggccctgccccctgtgtcccaggccggcaccgggaaggcccctgagctgcccagcggcagcggccctgagcccctggcccccagccctgtgagccccaccttcccccccagcagccccagcgactggccccaggagaggagccctgggggccacagtgatggagccagccccaggagccctgtgcccaccaccctgcccggcctgcggcatgccccctggcagggcccccggggccccccagacagcccagatggcagccccctgacccctgtgcccagccagatgccctggctggtggccagccctgagcccccccagagcagccccaccccagccttccccctggccgccagctatgacaccaacggcctgagccagccccccctgcctgagaagaggcacctgcccggccctggccagcagcccggcccctggggccctgagcaggccagcagccctgcccggggcatcagccaccacgtgacctttgcccccctgctgagtgacaacgtgccccagaccccagagccccccacccaggagagccagagcaatgtgaagtttgtgcaggacaccagcaagttctggtacaagccccacctgagccgggaccaggccatcgccctgctgaaggacaaggaccccggggccttcctgatccgggacagccacagcttccagggcgcctacggcctggccctgaaggtggccaccccaccacccagcgcccagccctggaagggggaccctgtggagcagctggtgcgccacttcctgattgagaccggccccaagggcgtgaagatcaagggctgccccagcgagccctacttcggcagcctgagcgccctggtgtcccagcacagcatcagccccatcagcctgccctgctgcctgcgcatccccagcaaggaccccctggaggagaccccagaggcccctgtgcccaccaacatgagcacagctgctgacctgctgcggcagggcgccgcctgcagcgtgctgtacctgacctctgtggagacagagagcctgaccggcccccaggccgtggcccgggccagcagcgctgccctgagctgcagcccccggcccaccccagctgtggtgcacttcaaggtgtctgcccagggcatcaccctgacagacaaccagaggaagctgttcttcagaagacactaccctgtgaacagcatcaccttcagcagcacagacccccaggaccggcgctggaccaacccagatggcaccaccagcaagatcttcggctttgtggccaagaagccaggcagcccctgggagaatgtgtgccacctgtttgctgagctggaccctgaccagcctgctggggccatcgtgaccttcatcaccaaggtgctgctgggccagaggaagtag

SEQ ID NO: 172965 - DNA, 2346 bp, synthetic construct
  misc_feature 1..2346: note = Description of Artificial Sequence: Synthetic coding sequence
  source 1..2346: mol_type = other DNA
atgaagagcagcggccctgtggagcggctgctgcgggccctgggccggcgggacagcagccgggccgccagccggcccaggaaggccgagccccacagcttccgggagaaggtgttcaggaagaagccccctgtgtgtgctgtgtgcaaggtgaccattgatggcaccggggtgtcctgccgggtgtgcaaggtggccacccacaggaaatgtgaggccaaggtgaccagcgcctgccaggccctgccccctgtggagctgcggaggaacacagcccctgtgagaagaattgagcacctgggcagcaccaagagcctgaaccacagcaagcagaggagcaccctgcccaggagcttcagcctggaccccctgatggagcggcgctgggacctggacctgacctacgtgacagagcgcatcctggccgccgccttccctgcccggccagatgagcagaggcaccggggccacctgcgggagctggcccacgtgctgcagagcaagcaccgggacaagtacctgctcttcaacctgtctgagaagagacatgacctgacccggctgaaccccaaggtgcaggactttggctggccagagctgcacgccccacccctggacaagctgtgcagcatctgcaaggccatggagacctggctgtctgctgacccccagcacgtggtggtgctgtactgcaagggcaacaagggcaagctgggcgtgattgtgtctgcctacatgcactacagcaagatctctgctggagctgaccaggccctggccaccctgaccatgaggaagttctgtgaggacaaggtggccacagagctgcagcccagccagaggcgctacatctcctacttcagcggcctgctgagcggcagcatccgcatgaacagcagccccctcttcctgcactacgtgctgatccccatgctgcctgcctttgagcccggcaccggcttccagcccttcctgaagatctaccagagcatgcagctggtgtacaccagcggcgtgtaccacatcgccggccctggcccccagcagctgtgcatcagcctggagcccgccctgctgctgaagggagatgtgatggtgacctgctaccacaagggcggccggggcacagacaggaccctggtgttccgggtgcagttccacacctgcaccatccacggcccccagctgaccttccccaaggaccagctggatgaggcctggacagatgagcgcttccccttccaggcctctgtggagtttgtgttcagcagcagccctgagaagatcaagggcagcaccccaagaaatgaccccagcgtgtctgtggactacaacaccacagagcctgctgtgcgctgggacagctatgagaacttcaaccagcaccacgaggacagcgtggatggcagcctgacccacacccggggccccctggatggcagcccctatgcccaggtgcagaggcctccccggcagaccccaccagcccccagccctgagcccccacctccacccatgctgtctgtgtccagtgacagcggccacagcagcaccctgaccacagagcctgctgctgagagccctggccggcccccacccacagctgctgagcggcaggagctggaccggctgctgggcggctgcggcgtggccagcggcggcagaggagctggccgggagacagccatcctggatgatgaggagcagcccaccgtgggcggcggcccccacctgggcgtgtacccaggccaccggcccggcctgagccgccactgcagctgccggcagggctaccgggagccctgtggggtgcccaacggcggctactacagacctgagggcaccctggagcggcggcggctggcctatggaggctatgagggcagcccccagggctacgccgaggcctccatggagaagaggcggctgtgccgcagcctgtctgagggcctgtacccctacccacctgagatgggcaagccagccactggagactttggctaccgggccagcagcgctgccctgagctgcagcccccggcccaccccagctgtggtgcacttcaaggtgtctgcccagggcatcaccctgacagacaaccagaggaagctgttcttcagaagacactaccctgtgaacagcatcaccttcagcagcacagacccccaggaccggcgctggaccaacccagatggcaccaccagcaagatcttcggctttgtggccaagaagccaggcagcccctgggagaatgtgtgccacctgtttgctgagctggaccctgaccagcctgctggggccatcgtgaccttcatcaccaaggtgctgctgggccagaggaagtag

SEQ ID NO: 172966 - DNA, 4200 bp, synthetic construct
  misc_feature 1..4200: note = Description of Artificial Sequence: Synthetic coding sequence
  source 1..4200: mol_type = other DNA
atgaagagcagcggccctgtggagcggctgctgcgggccctgggccggcgggacagcagccgggccgccagccggcccaggaaggccgagccccacagcttccgggagaaggtgttcaggaagaagccccctgtgtgtgctgtgtgcaaggtgaccattgatggcaccggggtgtcctgccgggtgtgcaaggtggccacccacaggaaatgtgaggccaaggtgaccagcgcctgccaggccctgccccctgtggagctgcggaggaacacagcccctgtgagaagaattgagcacctgggcagcaccaagagcctgaaccacagcaagcagaggagcaccctgcccaggagcttcagcctggaccccctgatggagcggcgctgggacctggacctgacctacgtgacagagcgcatcctggccgccgccttccctgcccggccagatgagcagaggcaccggggccacctgcgggagctggcccacgtgctgcagagcaagcaccgggacaagtacctgctcttcaacctgtctgagaagagacatgacctgacccggctgaaccccaaggtgcaggactttggctggccagagctgcacgccccacccctggacaagctgtgcagcatctgcaaggccatggagacctggctgtctgctgacccccagcacgtggtggtgctgtactgcaagggcaacaagggcaagctgggcgtgattgtgtctgcctacatgcactacagcaagatctctgctggagctgaccaggccctggccaccctgaccatgaggaagttctgtgaggacaaggtggccacagagctgcagcccagccagaggcgctacatctcctacttcagcggcctgctgagcggcagcatccgcatgaacagcagccccctcttcctgcactacgtgctgatccccatgctgcctgcctttgagcccggcaccggcttccagcccttcctgaagatctaccagagcatgcagctggtgtacaccagcggcgtgtaccacatcgccggccctggcccccagcagctgtgcatcagcctggagcccgccctgctgctgaagggagatgtgatggtgacctgctaccacaagggcggccggggcacagacaggaccctggtgttccgggtgcagttccacacctgcaccatccacggcccccagctgaccttccccaaggaccagctggatgaggcctggacagatgagcgcttccccttccaggcctctgtggagtttgtgttcagcagcagccctgagaagatcaagggcagcaccccaagaaatgaccccagcgtgtctgtggactacaacaccacagagcctgctgtgcgctgggacagctatgagaacttcaaccagcaccacgaggacagcgtggatggcagcctgacccacacccggggccccctggatggcagcccctatgcccaggtgcagaggcctccccggcagaccccaccagcccccagccctgagcccccacctccacccatgctgtctgtgtccagtgacagcggccacagcagcaccctgaccacagagcctgctgctgagagccctggccggcccccacccacagctgctgagcggcaggagctggaccggctgctgggcggctgcggcgtggccagcggcggcagaggagctggccgggagacagccatcctggatgatgaggagcagcccaccgtgggcggcggcccccacctgggcgtgtacccaggccaccggcccggcctgagccgccactgcagctgccggcagggctaccgggagccctgtggggtgcccaacggcggctactacagacctgagggcaccctggagcggcggcggctggcctatggaggctatgagggcagcccccagggctacgccgaggcctccatggagaagaggcggctgtgccgcagcctgtctgagggcctgtacccctacccacctgagatgggcaagccagccactggagactttggctaccgggcccctggctaccgggaggtggtgatcctggaggaccccggcctgcctgccctgtacccctgcccagccagcctgtatggcctgcggctggagcgggaggccggggagggctgggccagcgaggccggcaagcccctgctgcaccctgtgcggcccggccaccccctgcccctgctgctgcctgcctgtggccaccaccacgcccccatgccagactacagctgcctgaagccacccaaggccggggaggagggccacgagggctgcagctacaccatgtgcccagagggccgctatggccaccctggctacccagccctggtgacctacagctatggaggagctgtgcccagctactgcccagcctacggccgggtgccccacagctgtggcagccctggagagggccggggctaccccagccctggggcccacagcccccgggccggcagcatcagccctggcagccccccctacccccagagcaggaagctgtcctatgagatccccacagaggagggcggggaccgctaccccctgcccggccacctggccagcgctggccccctggccagcgctgagagcctggagcctgtgtcctggagggagggccccagcggccacagcaccctgcccaggagccccagagatgccccctgcagcgccagcagcgagctgagcggccccagcacccccctgcacaccagcagccctgtgcagggcaaggagagcacccggcggcaggacaccaggagccccaccagcgcccccacccagaggctgagccctggagaggccctgccccctgtgtcccaggccggcaccgggaaggcccctgagctgcccagcggcagcggccctgagcccctggcccccagccctgtgagccccaccttcccccccagcagccccagcgactggccccaggagaggagccctgggggccacagtgatggagccagccccaggagccctgtgcccaccaccctgcccggcctgcggcatgccccctggcagggcccccggggccccccagacagcccagatggcagccccctgacccctgtgcccagccagatgccctggctggtggccagccctgagcccccccagagcagccccaccccagccttccccctggccgccagctatgacaccaacggcctgagccagccccccctgcctgagaagaggcacctgcccggccctggccagcagcccggcccctggggccctgagcaggccagcagccctgcccggggcatcagccaccacgtgacctttgcccccctgctgagtgacaacgtgccccagaccccagagccccccacccaggagagccagagcaatgtgaagtttgtgcaggacaccagcaagttctggtacaagccccacctgagccgggaccaggccatcgccctgctgaaggacaaggaccccggggccttcctgatccgggacagccacagcttccagggcgcctacggcctggccctgaaggtggccaccccaccacccagcgcccagccctggaagggggaccctgtggagcagctggtgcgccacttcctgattgagaccggccccaagggcgtgaagatcaagggctgccccagcgagccctacttcggcagcctgagcgccctggtgtcccagcacagcatcagccccatcagcctgccctgctgcctgcgcatccccagcaaggaccccctggaggagaccccagaggcccctgtgcccaccaacatgagcacagctgctgacctgctgcggcagggcgccgcctgcagcgtgctgtacctgacctctgtggagacagagagcctgaccggcccccaggccgtggcccgggccagcagcgctgccctgagctgcagcccccggcccaccccagctgtggtgcacttcaaggtgtctgcccagggcatcaccctgacagacaaccagaggaagctgttcttcagaagacactaccctgtgaacagcatcaccttcagcagcacagacccccaggaccggcgctggaccaacccagatggcaccaccagcaagatcttcggctttgtggccaagaagccaggcagcccctgggagaatgtgtgccacctgtttgctgagctggaccctgaccagcctgctggggccatcgtgaccttcatcaccaaggtgctgctgggccagaggaagtag

SEQ ID NO: 172967 - DNA, 567 bp, synthetic construct
  misc_feature 1..567: note = Description of Artificial Sequence: Synthetic coding sequence
  source 1..567: mol_type = other DNA
atggactgcaggaagatggcccgcttctcctacagcgtcatctggatcatggccatcagcaaggtgtttgagctgggcctggtggccggcctgggccaccaggagtttgcccggcccagccggggctacctggccttcagagatgacagcatctggccccaggaggagcccgccatccggcccaggagcagccagagggtgccccccatgggcatccagcacagcaaggagctgaacagaacctgctgcctgaatggaggcacctgcatgctgggcagcttctgtgcctgcccccccagcttctacggcaggaactgtgaacatgatgtgaggaaagaaaactgtggctctgtgccccatgacacctggctgcccaagaagtgcagcctgtgcaagtgctggcacggccagctgcgctgcttcccccaggccttcctgcccggctgtgatggcctggtgatggatgagcacctggtggccagcaggaccccagagctgcccccatctgcccggaccaccaccttcatgctggtgggcatctgcctgagcatccagagctactactag

SEQ ID NO: 172968 - DNA, 519 bp, synthetic construct
  misc_feature 1..519: note = Description of Artificial Sequence: Synthetic coding sequence
  source 1..519: mol_type = other DNA
atggccatcagcaaggtgtttgagctgggcctggtggccggcctgggccaccaggagtttgcccggcccagccggggctacctggccttcagagatgacagcatctggccccaggaggagcccgccatccggcccaggagcagccagagggtgccccccatgggcatccagcacagcaaggagctgaacagaacctgctgcctgaatggaggcacctgcatgctgggcagcttctgtgcctgcccccccagcttctacggcaggaactgtgaacatgatgtgaggaaagaaaactgtggctctgtgccccatgacacctggctgcccaagaagtgcagcctgtgcaagtgctggcacggccagctgcgctgcttcccccaggccttcctgcccggctgtgatggcctggtgatggatgagcacctggtggccagcaggaccccagagctgcccccatctgcccggaccaccaccttcatgctggtgggcatctgcctgagcatccagagctactactag

SEQ ID NO: 172969 - DNA, 645 bp, synthetic construct
  misc_feature 1..645: note = Description of Artificial Sequence: Synthetic coding sequence
  source 1..645: mol_type = other DNA
atgggcgccgcccacagcgccagcgaggaggtgcgggagctggagggcaagacaggcttcagcagtgaccagatcgagcagctgcaccggcgcttcaagcagctgagcggggaccagcccaccatcagaaaagaaaacttcaacaacgtgcctgacctggagctgaaccccatccgcagcaagatcgtgcgggccttctttgacaacagaaacctgaggaagggccccagcggcctggctgatgagatcaactttgaggacttcctgaccatcatgagctacttccggcccatcgacaccaccatggatgaggagcaggtggagctgagcaggaaggagaagctgcgcttcctgttccacatgtatgacagcgacagtgatggccgcatcaccctggaggagtacagaaatgtggtggaggagctgctgagcggcaacccccacatcgagaaggagagcgcccggagcattgctgatggagccatgatggaggccgcctctgtgtgcatgggccagatggagccagaccaggtgtatgagggcatcacctttgaggacttcctgaagatctggcagggcatcgacatcgagaccaagatgcacgtgcgcttcctgaacatggagaccatggccctgtgccactag

SEQ ID NO: 172970 - DNA, 804 bp, synthetic construct
  misc_feature 1..804: note = Description of Artificial Sequence: Synthetic coding sequence
  source 1..804: mol_type = other DNA
atgaggcccaggagcggccccaccaggaacccccggctgcgggcctttgctggggtgcccacccggggccgcacccggggccagagccgccgctgtgccgctgaggccagcgctggccctgagagagatgcccggcctggggccccagctgctggcaccatgggcgccgcccacagcgccagcgaggaggtgcgggagctggagggcaagacaggcttcagcagtgaccagatcgagcagctgcaccggcgcttcaagcagctgagcggggaccagcccaccatcaggaaggagaacttcaacaacgtgcctgacctggagctgaaccccatccgcagcaagatcgtgcgggccttctttgacaacagaaacctgaggaagggccccagcggcctggctgatgagatcaactttgaggacttcctgaccatcatgagctacttccggcccatcgacaccaccatggatgaggagcaggtggagctgagcaggaaggagaagctgcgcttcctgttccacatgtatgacagcgacagtgatggccgcatcaccctggaggagtacagaaatgtggtggaggagctgctgagcggcaacccccacatcgagaaggagagcgcccggagcattgctgatggagccatgatggaggccgcctctgtgtgcatgggccagatggagccagaccaggtgtatgagggcatcacctttgaggacttcctgaagatctggcagggcattgatattgagaccaagatgcacgtgcgcttcctgaacatggagaccatggccctgtgccactag

SEQ ID NO: 172971 - DNA, 564 bp, synthetic construct
  misc_feature 1..564: note = Description of Artificial Sequence: Synthetic coding sequence
  source 1..564: mol_type = other DNA
atgggcgccgcccacagcgccagcgaggaggtgcgggagctggagggcaagacaggcttcagcagtgaccagatcgagcagctgcaccggcgcttcaagcagctgagcggggaccagcccaccatccggaacctgaggaagggccccagcggcctggctgatgagatcaactttgaggacttcctgaccatcatgagctacttccggcccatcgacaccaccatggatgaggagcaggtggagctgagcaggaaggagaagctgcgcttcctgttccacatgtatgacagcgacagtgatggccgcatcaccctggaggagtacagaaatgtggtggaggagctgctgagcggcaacccccacatcgagaaggagagcgcccggagcattgctgatggagccatgatggaggccgcctctgtgtgcatgggccagatggagccagaccaggtgtatgagggcatcacctttgaggacttcctgaagatctggcagggcattgatattgagaccaagatgcacgtgcgcttcctgaacatggagaccatggccctgtgccactag

SEQ ID NO: 172972 - DNA, 1266 bp, synthetic construct
  misc_feature 1..1266: note = Description of Artificial Sequence: Synthetic coding sequence
  source 1..1266: mol_type = other DNA
ctcaacctggaggtgaagttcaagaagatgggcctgggccacgagcagggctttggagccccctgcctgaagtgcaaggagaagtgtgagggctttgagctgcacttctggaggaagatctgcaggaactgcaagtgtggccaggaggagcatgatgtgctgctgagcaatgaggaggacaggaaggtgggcaagctgtttgaggacaccaagtacaccaccctcatcgccaagctgaagagtgatggcatccccatgtacaagagaaatgtgatgatcctgaccaaccctgtggccgccaagaagaatgtgtccatcaacacagtgacctatgagtgggcccctcctgtgcagaaccaggccctggcccggcagtacatgcagatgctgcccaaggagaagcagcctgtggccggcagcgagggcgcccagtacaggaagaagcagctggccaagcagctgcctgcccatgaccaggaccccagcaaatgtcatgagctgagcccccgggaggtgaaggagatggagcagtttgtgaagaagtacaagtctgaggccctgggcgtgggagatgtgaagctgccctgtgagatggatgcccagggccccaagcagatgaacatccctggaggagacaggagcaccccagctgctgtgggcgccatggaggacaagtctgctgagcacaagaggacccagtacagctgctactgctgcaagctgtccatgaaggagggggaccctgccatctatgcagagagagctggctatgacaagctgtggcacccagcctgctttgtgtgcagcacctgccacgagctgctggtggacatgatctacttctggaagaatgagaagctgtactgcggccgccactactgtgacagcgagaagccccgctgtgccggctgtgatgagctgatcttcagcaatgagtacacccaggccgagaaccagaactggcacctgaagcacttctgctgctttgactgtgacagcatcctggccggggagatctacgtgatggtgaatgacaagcctgtgtgcaagccctgctacgtgaagaaccacgctgtggtgtgccagggctgccacaatgccatcgaccctgaggtgcagagggtgacctacaacaacttctcctggcacgccagcacagagtgcttcctgtgcagctgctgcagcaagtgcctgattggccagaagttcatgcctgtggagggcatggtgttctgcagcgtggagtgcaagaagaggatgtcctag

SEQ ID NO: 172973 - DNA, 1266 bp, synthetic construct
  misc_feature 1..1266: note = Description of Artificial Sequence: Synthetic coding sequence
  source 1..1266: mol_type = other DNA
atggacctggagaacaaggtgaagaagatgggcctgggccacgagcagggctttggagccccctgcctgaagtgcaaggagaagtgtgagggctttgagctgcacttctggaggaagatctgcaggaactgcaagtgtggccaggaggagcatgatgtgctgctgagcaatgaggaggacaggaaggtgggcaagctgtttgaggacaccaagtacaccaccctcatcgccaagctgaagagtgatggcatccccatgtacaagagaaatgtgatgatcctgaccaaccctgtggccgccaagaagaatgtgtccatcaacacagtgacctatgagtgggcccctcctgtgcagaaccaggccctggcccggcagtacatgcagatgctgcccaaggagaagcagcctgtggccggcagcgagggcgcccagtacaggaagaagcagctggccaagcagctgcctgcccatgaccaggaccccagcaaatgtcatgagctgagcccccgggaggtgaaggagatggagcagtttgtgaagaagtacaagtctgaggccctgggcgtgggagatgtgaagctgccctgtgagatggatgcccagggccccaagcagatgaacatccctggaggagacaggagcaccccagctgctgtgggcgccatggaggacaagtctgctgagcacaagaggacccagtacagctgctactgctgcaagctgtccatgaaggagggggaccctgccatctatgcagagagagctggctatgacaagctgtggcacccagcctgctttgtgtgcagcacctgccacgagctgctggtggacatgatctacttctggaagaatgagaagctgtactgcggccgccactactgtgacagcgagaagccccgctgtgccggctgtgatgagctgatcttcagcaatgagtacacccaggccgagaaccagaactggcacctgaagcacttctgctgctttgactgtgacagcatcctggccggggagatctacgtgatggtgaatgacaagcctgtgtgcaagccctgctacgtgaagaaccacgctgtggtgtgccagggctgccacaatgccatcgaccctgaggtgcagagggtgacctacaacaacttctcctggcacgccagcacagagtgcttcctgtgcagctgctgcagcaagtgcctgattggccagaagttcatgcctgtggagggcatggtgttctgcagcgtggagtgcaagaagaggatgtcctag

SEQ ID NO: 172974 - DNA, 1239 bp, synthetic construct
  misc_feature 1..1239: note = Description of Artificial Sequence: Synthetic coding sequence
  source 1..1239: mol_type = other DNA
atgggcctgggccacgagcagggctttggagccccctgcctgaagtgcaaggagaagtgtgagggctttgagctgcacttctggaggaagatctgcaggaactgcaagtgtggccaggaggagcatgatgtgctgctgagcaatgaggaggacaggaaggtgggcaagctgtttgaggacaccaagtacaccaccctgattgccaagctgaagagtgatggcatccccatgtacaagagaaatgtgatgatcctgaccaaccctgtggccgccaagaagaatgtgtccatcaacacagtgacctatgagtgggcccctcctgtgcagaaccaggccctggcccggcagtacatgcagatgctgcccaaggagaagcagcctgtggccggcagcgagggcgcccagtacaggaagaagcagctggccaagcagctgcctgcccatgaccaggaccccagcaagtgccacgagctgagcccccgggaggtgaaggagatggagcagtttgtgaagaagtacaagtctgaggccctgggcgtgggagatgtgaagctgccctgtgagatggatgcccagggccccaagcagatgaacatccctggaggagacaggagcaccccagctgctgtgggcgccatggaggacaagtctgctgagcacaagaggacccagtacagctgctactgctgcaagctgtccatgaaggagggggaccctgccatctatgcagagcgggccggctatgacaagctgtggcacccagcctgctttgtgtgcagcacctgccacgagctgctggtggacatgatctacttctggaagaatgagaagctgtactgcggccgccactactgtgacagcgagaagccccgctgtgccggctgtgatgagctgatcttcagcaatgagtacacccaggccgagaaccagaactggcacctgaagcacttctgctgctttgactgtgacagcatcctggccggggagatctacgtgatggtgaatgacaagcctgtgtgcaagccctgctacgtgaagaaccacgctgtggtgtgccagggctgccacaatgccattgatcctgaggtgcagagggtgacctacaacaacttctcctggcacgccagcacagagtgcttcctgtgcagctgctgcagcaaatgtctcatcggccagaagttcatgcctgtggagggcatggtgttctgcagcgtggagtgcaagaagaggatgtcctag

SEQ ID NO: 172975 - DNA, 540 bp, synthetic construct
  misc_feature 1..540: note = Description of Artificial Sequence: Synthetic coding sequence
  source 1..540: mol_type = other DNA
atgaaggagggggaccctgccatctatgcagagagagctggctatgacaagctgtggcacccagcctgctttgtgtgcagcacctgccacgagctgctggtggacatgatctacttctggaagaatgagaagctgtactgcggccgccactactgtgacagcgagaagccccgctgtgccggctgtgatgagctgatcttcagcaatgagtacacccaggccgagaaccagaactggcacctgaagcacttctgctgctttgactgtgacagcatcctggccggggagatctacgtgatggtgaatgacaagcctgtgtgcaagccctgctacgtgaagaaccacgctgtggtgtgccagggctgccacaatgccatcgaccctgaggtgcagagggtgacctacaacaacttctcctggcacgccagcacagagtgcttcctgtgcagctgctgcagcaagtgcctgattggccagaagttcatgcctgtggagggcatggtgttctgcagcgtggagtgcaagaagaggatgtcctag

SEQ ID NO: 172976 - DNA, 804 bp, synthetic construct
  misc_feature 1..804: note = Description of Artificial Sequence: Synthetic coding sequence
  source 1..804: mol_type = other DNA
atgggcgcccggcagatccagaccagcagcagccagaccagccctgaggaggccatgggcaccccccgcatccagcacctgctgatcctgctggtgctgggcgccagcctgctgaccagcggcctggagctgtactgccagaagggcctgtccatgacagtggaggccgaccctgccaacatgttcaactggaccacagaggaggtggagacctgtgacaagggggccctgtgccaggagaccatcctgatcatcaaggccggcacagaaacagccatcctggccaccaagggctgcatccctgagggggaggaggccatcaccatcgtgcagcacagcagccccccaggcctgattgtgaccagctacagcaactactgtgaggacagcttctgcaatgacaaggacagcctgagccagttctgggagttcagcgagaccacagccagcacagtgtccaccaccctgcactgccccacctgtgtggccctgggcacctgcttcagcgcccccagcctgccctgccccaacggcaccacccgctgctaccagggcaagctggagatcaccggcggcggcatcgagagctctgtggaggtgaagggctgcacagccatgattggctgccgcctgatgagcggcatcctggccgtgggccccatgtttgtgcgggaggcctgcccccaccagctgctgacccagcccaggaagacagaaaatggagccacctgcctgcccatccctgtgtggggcctgcagctgctgctgcccctgctgctgcccagcttcatccacttctcctag

SEQ ID NO: 172977 - DNA, 789 bp, synthetic construct
  misc_feature 1..789: note = Description of Artificial Sequence: Synthetic coding sequence
  source 1..789: mol_type = other DNA
atccagaccagcagcagccagaccagccctgaggaggccatgggcaccccccgcatccagcacctgctgatcctgctggtgctgggcgccagcctgctgaccagcggcctggagctgtactgccagaagggcctgtccatgacagtggaggccgaccctgccaacatgttcaactggaccacagaggaggtggagacctgtgacaagggggccctgtgccaggagaccatcctgatcatcaaggccggcacagaaacagccatcctggccaccaagggctgcatccctgagggggaggaggccatcaccatcgtgcagcacagcagccccccaggcctcatcgtgaccagctacagcaactactgtgaagattccttctgcaatgacaaggacagcctgagccagttctgggagttcagcgagaccacagccagcacagtgtccaccaccctgcactgccccacctgtgtggccctgggcacctgcttcagcgcccccagcctgccctgccccaacggcaccacccgctgctaccagggcaagctggagatcactggaggcggcatcgagagctctgtggaggtgaagggctgcacagccatgattggctgccgcctgatgagcggcatcctggccgtgggccccatgtttgtgcgggaggcctgcccccaccagctgctgacccagcccaggaagacagaaaatggagccacctgcctgcccatccctgtgtggggcctgcagctgctgctgcccctgctgctgcccagcttcatccacttctcctag

SEQ ID NO: 172978 - DNA, 750 bp, synthetic construct
  misc_feature 1..750: note = Description of Artificial Sequence: Synthetic coding sequence
  source 1..750: mol_type = other DNA
atgggcaccccccgcatccagcacctgctgatcctgctggtgctgggcgccagcctgctgaccagcggcctggagctgtactgccagaagggcctgtccatgacagtggaggccgaccctgccaacatgttcaactggaccacagaggaggtggagacctgtgacaagggggccctgtgccaggagaccatcctgatcatcaaggccggcacagaaacagccatcctggccaccaagggctgcatccctgagggggaggaggccatcaccatcgtgcagcacagcagccccccaggcctgattgtgaccagctacagcaactactgtgaggacagcttctgcaatgacaaggacagcctgagccagttctgggagttcagcgagaccacagccagcacagtgtccaccaccctgcactgccccacctgtgtggccctgggcacctgcttcagcgcccccagcctgccctgccccaacggcaccacccgctgctaccagggcaagctggagatcaccggcggcggcatcgagagctctgtggaggtgaagggctgcacagccatgattggctgccgcctgatgagcggcatcctggccgtgggccccatgtttgtgcgggaggcctgcccccaccagctgctgacccagcccaggaagacagaaaatggagccacctgcctgcccatccctgtgtggggcctgcagctgctgctgcccctgctgctgcccagcttcatccacttctcctag

SEQ ID NO: 172979 - DNA, 804 bp, synthetic construct; identical to SEQ ID NO: 172976
  misc_feature 1..804: note = Description of Artificial Sequence: Synthetic coding sequence
  source 1..804: mol_type = other DNA

SEQ ID NO: 172980 - DNA, 2823 bp, synthetic construct
  misc_feature 1..2823: note = Description of Artificial Sequence: Synthetic coding sequence
  source 1..2823: mol_type = other DNA
atgatcagcgcccactgcaacctgcggctgctgtgcagcagtgacagcagcgccagcgccagccaggtggccggcaccacagaggtggtggagaacctggtgaccaatgacaacagccccaacatccctgaggccatcgacaggctcttcagtgacatcgccaacatcaaccgggagagcatggccgagatcacagacatccagatcgaggagatggctgtgaacctgtggaactgggccctgaccatcggcggcggctggctggtgaatgaggagcagaagatccggctgcactacgtggcctgcaagctgctgtccatgtgtgaggccagctttgccagcgagcagagcatccagaggctcatcatgatgaacatgagaattggcaaggagtggctggatgctggcaacttcctgattgctgatgagtgcttccaggccgctgtggccagcctggagcagctgtatgtgaagctgatccagaggagcagccctgaggccgacctgaccatggagaagatcaccgtggagagtgaccacttccgggtgctgagctaccaggccgagagcgctgtggcccagggcgacttccagagggcctccatgtgtgtgctgcagtgcaaggacatgctgatgaggctgccccagatgaccagcagcctgcaccacctgtgctacaactttggagtggagacccagaagaacaacaagtatgaggagagcagcttctggctgagccagagctatgacatcggcaagatggacaagaagagcactggacctgagatgctggccaaggtgctgcggctgctggccaccaactacctggactgggatgacaccaagtactatgacaaggccctgaatgctgtgaacctggccaacaaggagcacctgagcagccctggcctcttcctgaagatgaagatcctgctgaagggggagaccagcaatgaggagctgctggaggccgtgatggagatcctgcacctggacatgcccctggacttctgcctgaacatcgccaagctgctgatggaccacgagcgggagagcgtgggcttccacttcctgaccatcatccacgagcgcttcaagagcagtgaaaatattggcaaggtgctgatcctgcacacagacatgctgctgcagaggaaggaggagctgctggccaaggagaagattgaggagatcttcctggcccaccagacaggccggcagctgacagctgagagcatgaactggctgcacaacatcctgtggaggcaggccgccagcagctttgaggtgcagaactacacagatgccctgcagtggtactactacagcctgcgcttctacagcacagatgagatggacctggacttcaccaagctgcagaggaacatggcctgctgctacctgaacctgcagcagctggacaaggccaaggaggccgtggccgaggccgagagacatgaccccagaaatgtgttcacccagttctacatcttcaagattgctgtgattgagggcaacagcgagcgggccctgcaggccatcatcaccctggagaacatcctgacagatgaggagagtgaagataatgacctggtggccgagcggggcagccccaccatgctgctgagcctggccgcccagtttgccctggagaatggccagcagatcgtggccgagaaggccctggagtacctggcccagcacagcgaggaccaggagcaggtgctgacagctgtgaagtgcctgctgcgcttcctgctgcccaagattgctgagatgcctgagagcgaggacaagaagaaggagatggaccggctgctgacctgcctgaacagagcctttgtgaagctgagccagccctttggagaggaggccctgagcctggagagccgggccaatgaggcccagtggttcaggaagacagcctggaacctggccgtgcagtgtgacaaggaccctgtgatgatgagggagttcttcatcctgagctacaagatgagccagttctgccccagcgaccaggtgatcctgattgccaggaagacctgcctgctgatggctgtggccgtggacctggagcagggcaggaaggccagcacagcctttgagcagaccatgttcctgagccgggccctggaggagatccagacctgcaatgacatccacaacttcctgaagcagacaggcaccttcagcaatgacagctgtgagaagctgctgctgctgtatgaatttgaggtgcgggccaagctgaatgaccccctgctggagagcttcctggagagcgtgtgggagctgccccacctggagaccaagacctttgagaccatcgccatcatcgccatggagaagccagcccactaccccctgattgccctgaaggccctgaagaaggccctgctgctgtacaagaaggaggagcccatcgacatcagccagtacagcaagtgcatgcacaacctggtgaacctgtctgtgcctgatggagccagcaatgtggagctgtgccccctggaggaggtgtggggctactttgaagatgccctgagccacatcagcaggaccaaggactacccagagatggagatcctgtggctgatggtgaagtcctggaacacaggagtgctgatgttcagccgcagcaaatatgccagcgctgagaagtggtgtggcctggccctgcgcttcctgaaccacctgaccagcttcaaggagagctatgagacccagatgaacatgctgtacagccagctggtggaggccctgagcaacaacaagggccctgtgttccatgaacatggctactggagcaagagtgactag

SEQ ID NO: 172981 - DNA, 1848 bp, synthetic construct
  misc_feature 1..1848: note = Description of Artificial Sequence: Synthetic coding sequence
  source 1..1848: mol_type = other DNA
atggagatcctgcacctggacatgcccctggacttctgcctgaacatcgccaagctgctgatggaccacgagcgggagagcgtgggcttccacttcctgaccatcatccacgagcgcttcaagagcagcgagaacatcggcaaggtgctgatcctgcacacagacatgctgctgcagaggaaggaggagctgctggccaaggagaagattgaggagatcttcctggcccaccagacaggccggcagctgacagctgagagcatgaactggctgcacaacatcctgtggaggcaggccgccagcagctttgaggtgcagaactacacagatgccctgcagtggtactactacagcctgcgcttctacagcacagatgagatggacctggacttcaccaagctgcagaggaacatggcctgctgctacctgaacctgcagcagctggacaaggccaaggaggccgtggccgaggccgagagacatgaccccagaaatgtgttcacccagttctacatcttcaagattgctgtgattgagggcaacagcgagcgggccctgcaggccatcatcaccctggagaacatcctgacagatgaggagagcgaggacaatgacctggtggccgagcggggcagccccaccatgctgctgagcctggccgcccagtttgccctggagaatggccagcagatcgtggccgagaaggccctggagtacctggcccagcacagcgaggaccaggagcaggtgctgacagctgtgaagtgcctgctgcgcttcctgctgcccaagattgctgagatgcctgagagcgaggacaagaagaaggagatggaccggctgctgacctgcctgaacagagcctttgtgaagctgagccagccctttggagaggaggccctgagcctggagagccgggccaatgaggcccagtggttcaggaagacagcctggaacctggccgtgcagtgtgacaaggaccctgtgatgatgagggagttcttcatcctgagctacaagatgagccagttctgccccagcgaccaggtgatcctgattgccaggaagacctgcctgctgatggctgtggccgtggacctggagcagggcaggaaggccagcacagcctttgagcagaccatgttcctgagccgggccctggaggagatccagacctgcaatgacatccacaacttcctgaagcagacaggcaccttcagcaatgacagctgtgagaagctgctgctgctgtatgaatttgaggtgcgggccaagctgaatgaccccctgctggagagcttcctggagagcgtgtgggagctgccccacctggagaccaagacctttgagaccatcgccatcatcgccatggagaagccagcccactaccccctcatcgccctgaaggccctgaagaaggccctgctgctgtacaagaaggaggagcccatcgacatcagccagtacagcaagtgcatgcacaacctggtgaacctgtctgtgcctgatggagccagcaatgtggagctgtgccccctggaggaggtgtggggctactttgaagatgccctgagccacatcagcaggaccaaggactacccagagatggagatcctgtggctgatggtgaagtcctggaacacaggagtgctgatgttcagccgcagcaaatatgccagcgctgagaagtggtgtggcctggccctgcgcttcctgaaccacctgaccagcttcaaggagagctatgagacccagatgaacatgctgtacagccagctggtggaggccctgagcaacaacaagggccctgtgttccacgagcacggctactggagcaagagtgactag

SEQ ID NO: 172982 - DNA, 2778 bp, synthetic construct
  misc_feature 1..2778: note = Description of Artificial Sequence: Synthetic coding sequence
  source 1..2778: mol_type = other DNA
atggacaatgatgacttcttctccatggacttcaaggaggtggtggagaacctggtgaccaatgacaacagccccaacatccctgaggccatcgacaggctcttcagtgacatcgccaacatcaaccgggagagcatggccgagatcacagacatccagatcgaggagatggctgtgaacctgtggaactgggccctgaccatcggcggcggctggctggtgaatgaggagcagaagatccggctgcactacgtggcctgcaagctgctgtccatgtgtgaggccagctttgccagcgagcagagcatccagaggctcatcatgatgaacatgagaattggcaaggagtggctggatgctggcaacttcctgattgctgatgagtgcttccaggccgctgtggccagcctggagcagctgtatgtgaagctgatccagaggagcagccctgaggccgacctgaccatggagaagatcaccgtggagagtgaccacttccgggtgctgagctaccaggccgagagcgctgtggcccagggcgacttccagagggcctccatgtgtgtgctgcagtgcaaggacatgctgatgaggctgccccagatgaccagcagcctgcaccacctgtgctacaactttggagtggagacccagaagaacaacaagtatgaggagagcagcttctggctgagccagagctatgacatcggcaagatggacaagaagagcacaggccctgagatgctggccaaggtgctgcggctgctggccaccaactacctggactgggatgacaccaagtactatgacaaggccctgaatgctgtgaacctggccaacaaggagcacctgagcagccctggcctcttcctgaagatgaagatcctgctgaagggggagaccagcaatgaggagctgctggaggccgtgatggagatcctgcacctggacatgcccctggacttctgcctgaacatcgccaagctgctgatggaccacgagcgggagagcgtgggcttccacttcctgaccatcatccacgagcgcttcaagagcagcgagaacatcggcaaggtgctgatcctgcacacagacatgctgctgcagaggaaggaggagctgctggccaaggagaagattgaggagatcttcctggcccaccagacaggccggcagctgacagctgagagcatgaactggctgcacaacatcctgtggaggcaggccgccagcagctttgaggtgcagaactacacagatgccctgcagtggtactactacagcctgcgcttctacagcacagatgagatggacctggacttcaccaagctgcagaggaacatggcctgctgctacctgaacctgcagcagctggacaaggccaaggaggccgtggccgaggccgagagacatgaccccagaaatgtgttcacccagttctacatcttcaagattgctgtgattgagggcaacagcgagcgggccctgcaggccatcatcaccctggagaacatcctgacagatgaggagagcgaggacaatgacctggtggccgagcggggcagccccaccatgctgctgagcctggccgcccagtttgccctggagaatggccagcagatcgtggccgagaaggccctggagtacctggcccagcacagcgaggaccaggagcaggtgctgacagctgtgaagtgcctgctgcgcttcctgctgcccaagattgctgagatgcctgagagcgaggacaagaagaaggagatggaccggctgctgacctgcctgaacagagcctttgtgaagctgagccagccctttggagaggaggccctgagcctggagagccgggccaatgaggcccagtggttcaggaagacagcctggaacctggccgtgcagtgtgacaaggaccctgtgatgatgagggagttcttcatcctgagctacaagatgagccagttctgccccagcgaccaggtgatcctgattgccaggaagacctgcctgctgatggctgtggccgtggacctggagcagggcaggaaggccagcacagcctttgagcagaccatgttcctgagccgggccctggaggagatccagacctgcaatgacatccacaacttcctgaagcagacaggcaccttcagcaatgacagctgtgagaagctgctgctgctgtatgaatttgaggtgcgggccaagctgaatgaccccctgctggagagcttcctggagagcgtgtgggagctgccccacctggagaccaagacctttgagaccatcgccatcatcgccatggagaagccagcccactaccccctcatcgccctgaaggccctgaagaaggccctgctgctgtacaagaaggaggagcccatcgacatcagccagtacagcaagtgcatgcacaacctggtgaacctgtctgtgcctgatggagccagcaatgtggagctgtgccccctggaggaggtgtggggctactttgaagatgccctgagccacatcagcaggaccaaggactacccagagatggagatcctgtggctgatggtgaagtcctggaacacaggagtgctgatgttcagccgcagcaaatatgccagcgctgagaagtggtgtggcctggccctgcgcttcctgaaccacctgaccagcttcaaggagagctatgagacccagatgaacatgctgtacagccagctggtggaggccctgagcaacaacaagggccctgtgttccacgagcacggctactggagcaagagtgactag

SEQ ID NO: 172983 - DNA, 2823 bp, synthetic construct; identical to SEQ ID NO: 172980
  misc_feature 1..2823: note = Description of Artificial Sequence: Synthetic coding sequence
  source 1..2823: mol_type = other DNA

SEQ ID NO: 172984 - DNA, 372 bp, synthetic construct
  misc_feature 1..372: note = Description of Artificial Sequence: Synthetic coding sequence
  source 1..372: mol_type = other DNA
atgatggccaaccacctggtgaagccagacaacagaaactgcaagaggccccgggagctggagagccctgtgcctgacagcccccagctgagcagcctgggcaagagtgacagcagcttcagcgagatcagcggcctcttctacaaggatgaggccctggagaaggacctgaatgatgtgtccaaggagatcaacctgatgctgagcacctacgccaagctgctgtctgaaagagctgctgtggatgccagctacattgatgaaattgatgagctgttcaaggaggccaatgccatcgagaacttcctgatccagaagcgggagttcctgcggcagcgcttcaccgtgattgccaacaccctgcacaggtag

SEQ ID NO: 172985 - DNA, 372 bp, synthetic construct; identical to SEQ ID NO: 172984
  misc_feature 1..372: note = Description of Artificial Sequence: Synthetic coding sequence
  source 1..372: mol_type = other DNA

SEQ ID NO: 172986 - DNA, 1059 bp, synthetic construct
  misc_feature 1..1059: note = Description of Artificial Sequence: Synthetic coding sequence
  source 1..1059: mol_type = other DNA
atggccctgcggcctgaggaccccagcagcggcttccgccacagcaatgtggtggccttcatcaatgagaagatggcccggcacaccaagggccctgagttctacctggagaacatcagcctgtcctgggagaaggtggaggacaagctgcgggccatcctggaggacagcgaggtgcccagcgaggtgaaggaggcctgcacctggggcagcctggccctgggcgtgcgctttgcccaccggcaggcccagctgcagaggcaccgggtgcgctggctgcacggctttgccaagctgcacaagtctgctgcccaggccctggccagtgacctgaagaagctgcgggagcagcaggagacagagaggaaggaggccgccagccggctgaggatggcccagaccagcctggtggaggtgcagaaggagcgggacaaggagctggtgagcccccatgagtgggagcagggcgccggctggccaggcctggccacagctggaggagtgtgcacagagggcgctgctgaggaggaggaggaggccgctgtggccgctgctggagctgctgggggcaaaggagctgaggaggagcagaggggctgctggaggctgtggctgcccctgtggaggccctggctgcccctgtggaggctgggcctgcccccctggaggcccagcagccccacctggaggcctggcctgcccccctggaggccccagaggtcctggagggagagcagctgcagcagcctggagatgctgatcaggaagagcacccccatcggcggcagaagaagagagatcagcggccgcagcaagcagccccacctgatcagcctggagcccaggaccccaggccctgagccccaccagaacctcttcctgagcagcagcctgccccacacccacacccacacccaggccctcttcccccccagccagacctaccccctgtaccccctgcacaagcagcagagccagcaccagttccggctgagctgcctgcccaccggccggcccctcatcctggcctgtggcctgatgggcggccccacagaatag

SEQ ID NO: 172987 - DNA, 1059 bp, synthetic construct; identical to SEQ ID NO: 172986
  misc_feature 1..1059: note = Description of Artificial Sequence: Synthetic coding sequence
  source 1..1059: mol_type = other DNA

SEQ ID NO: 172988 - DNA, 1230 bp, synthetic construct
  misc_feature 1..1230: note = Description of Artificial Sequence: Synthetic coding sequence
  source 1..1230: mol_type = other DNA
atggccctgcggcctgaggaccccagcagcggcttccgccacagcaatgtggtggccttcatcaatgagaagatggcccggcacaccaagggccctgagttctacctggagaacatcagcctgtcctgggagaaggtggaggacaagctgcgggccatcctggaggacagcgaggtgcccagcgaggtgaaggaggcctgcacctggggcagcctggccctgggcgtgcgctttgcccaccggcaggcccagctgcagaggcaccgggtgcgctggctgcacggctttgccaagctgcacaagtctgctgcccaggccctggccagtgacctgaagaagctgcgggagcagcaggagacagagaggaaggaggccgccagccggctgaggatggcccagaccagcctggtggaggtgcagaaggagcgggacaaggagctggtgagcccccatgagtgggagcagggcgccggctggccaggcctggccacagctggaggagtgtgcacagagggcgctgctgaggaggaggaggaggccgctgtggccgctgctggagctgctgggggcaaaggagctgaggaggagcagagagatgtggaggtggtggccgcccctgtggaggccatggcccctcctgtggaggccggggccgcccccatggagacccagttcccccacgtggaggcccgggccgcctccatggagaccacagagaagctggagcgcatcctgctgcagctgctgggagatgctgaccaggagaagtacacctactggggccagaaggagggggacctgcggtctgtggagacagccaccagctacttcagcggcaccaccaacccctggagccgggccagcagcgagcccctgcctgtgcagctgcctgccagctacagctacagctacagcagccccttcagcagcttcagtgacatccccaccatcagccccccccaggccaccgtgacagcccctgtgcccccccagctgcccagcgactgggaggcctttgacaccagcctgtggagcgatggcggcccccacagaattgaccaccaggagcacccccgggaccggcgctacagcgagccccaccagcagaggcctcctgtgtacagaagacctggggactgggactgcccctggtgcaatgctgtgaacttcagccggcgggacacctgctttgactgtgggaagggcatctggctgcagaagccccactag

SEQ ID NO: 172989 - DNA, 939 bp, synthetic construct
  misc_feature 1..939: note = Description of Artificial Sequence: Synthetic coding sequence
  source 1..939: mol_type = other DNA
atggccctgcggcctgaggaccccagcagcggcttccgccacggcaatgtggtggccttcatcatcgagaagatggcccggcacaccaagggccctgagttctactttgagaacatcagcctgtcctgggaggaggtggaggacaagctgcgggccatcctggaggacagcgaggtgcccagcgaggtgaaggaggcctgcacctggggcagcctggccctgggcgtgcgctttgcccaccggcagggccagctgcagaacagaagagtgcagtggctgcagggctttgccaagctgcacaggtctgctgccctggtgctggccagcaacctgacagagctgaaggagcagcaggagatggagtgcaatgaggccaccttccagctgcagctgacagagaccagcctggccgaggtgcagcgggagcgggacatgctgcgctggaagctgttccacgccgagctggccccaccccagggccagggccaggccaccgtcttccctggcctggccacagctggaggagactggacagagggcgctggggagcaggagaaggaggccgtggccgccgccggggctgctgggggcaagggggaggagagatatgcagaggccggccctgccccagctgaggtgctgcagggcctgggcggcggcttccggcagcccctgggcgccatcgtggccggcaagctgcacctgtgtggggctgagggggagaggagccaggtgtccaccaacagccacgtgtgcctgctgtgggcctgggtgcacagcctgaccggggccagcagctgcccagccccctacctgatccacatcctgatccccatgccctttgtgcggctgctgagccacacccagtacacccccttcaccagcaagggccacaggacaggcagcaacagtgatgccttccagctgggcggcctgtag

SEQ ID NO: 172990 - DNA, 4494 bp, synthetic construct
  misc_feature 1..4494: note = Description of Artificial Sequence: Synthetic coding sequence
  source 1..4494: mol_type = other DNA
atgagcagagctgtgcggctgcctgtgccctgccctgtgcagctgggcaccctgagaaatgacagcctggaggcccagctgcacgagtatgtgaagcagggcaactacgtgaaggtgaagaagatcctgaagaagggcatctacgtggatgctgtgaacagcctgggccagacagccctgtttgtggccgccctgctgggcctgaggaagtttgtggatgtgctggtggactatggcagtgaccccaaccaccgctgctttgatggcagcacccctgtgcatgctgctgccttcagcggcaaccagtggatcctgagcaagctgctggatgctggaggagacctgcggctgcatgatgagcggggccagaaccccaagacctgggccctgacagctgggaaggagaggagcacccagatcgtggagttcatgcagagatgtgccagccacatgcaggccatcatccagggcttctcctatgacctgctgaagaagattgacagcccccagaggctggtgtacagccccagctggtgtggcggcctggtgcagggcaaccccaacggcagccccaaccggctgctgaaggccggggtcatcagcgcccagaacatctacagctttggatttgggaaggccatgccctggttccagttctacctgaccggggccacccagatggcctacctgggcagcctgcccgtcatcggggagaaggaggtgatccaggctgatgatgagcccaccttctccttcttcagcggcccctacatggtgatgaccaacctggtgtggaatggcagccgggtgacagtgaaggagctgaacctgcccacccacccccactgcagccggctgcggctggccgacctgctgattgctgagcaggagcacagcagcaagctgcggcacccctacctgctgcagctgatggctgtgtgcctgagccaggacctggagaagacccggctggtgtatgaaagaatcaccatcggcaccctcttctctgtgctgcatgaaagaagaagccagtttcctgtgctgcacatggaggtgattgtgcacctgctgctgcagatcagtgatgccctgcgctacctgcacttccagggcttcatccacaggagcctgagcagctatgctgtgcacatcatcagccctggagaggcccggctgaccaacctggagtacatgctggagagcgaggacagaggagtgcagagggacctgaccagggtgcccctgcccacccagctgtacaactgggccgcccctgaggtgatcctgcagaaggccgccaccgtgaagagtgacatctacagcttctccatgatcatgcaggagatcctgacagatgacatcccctggaagggcctggatggctctgtggtgaagaaggctgtggtgtctggcaactacctggaggctgatgtgcggctgcccaagccctactatgacatcgtgaagagcggcatccacgtgaagcagaaggacaggaccatgaacctgcaggacatccgctacatcctgaagaatgacctgaaggacttcaccggggcccagaggacccagcccacagagagcccccgggtgcagagatatggcctgcacccagatgtgaatgtgtacctgggcctgaccagcgagcacccccgggagaccccagacatggagatcatcgagctgaaggagatgggcagccagccccacagcccccgggtgcacagcctcttcacagagggcaccctggacccccaggccccagacccctgcctgatggcccgggagacccagaaccaggatgccccctgcccagcccccttcatggccgaggaggccagcagccccagcacaggccagcccagcctgtgcagctttgagatcaatgagatctacagcggctgcctgatcctggaggatgacatcgaggagcccccaggggccgccagcagcctggaggctgatggccccaaccaggtggatgagctgaagtccatggaggaggagctggacaagatggagcgggaggcctgctgcttcggctctgaagatgagagcagcagcaaggccgagacagagtacagctttgatgactgggactggcagaatggcagcctgagcagcctgagcctgcctgagagcacccgggaggccaagagcaacctgaacaacatgagcaccacagaggagtacctgatcagcaaatgtgtgctggacctgaagatcatgcagaccatcatgcatgaaaatgatgaccggctgagaaatattgagcagatcctggatgaggtggagatgaagcagaaggagcaggaggagaggatgagcctgtgggccaccagccgggagttcaccaatgcctacaagctgcccctggccgtgggcccccccagcctgaactacatcccccctgtgctgcagctgagcggcggccagaagccagacaccagcggcaactaccccaccctgccccgcttccccaggatgctgcccaccctgtgtgaccccgggaagcagaacacagatgagcagttccagtgcacccagggcgccaaggacagcctggagaccagccgcatccagaacaccagcagccagggccggccccgggagagcacagcccaggccaaggccacccagttcaacagcgccctcttcaccctgagcagccaccggcagggccccagcgccagccccagctgccactgggacagcaccaggatgtctgtggagcctgtgtcctctgagatctacaatgctgagagcaggaacaaggatgatggcaaggtgcacctgaagtggaagatggaggtgaaggagatggccaagaaggccgccaccggccagctgactgtgcccccctggcacccccagagcagcctgaccctggagagcgaggccgagaatgaaccagatgccctgctgcagccccccatccgcagcccagaaaatacagactggcagagggtgattgagtaccaccgggagaatgatgagcccagaggaaatggcaagtttgacaagacaggcaacaatgactgtgacagcgaccagcacggccggcagccccggctgggcagcttcaccagcatccgccaccccagcccccggcagaaggagcagcctgagcacagcgaggccttccaggccagcagtgacaccctggtggccgtggagaagagctacagccaccagagcatgcagagcacctgcagccctgagagcagcgaggacatcacagatgagttcctgaccccagatggagagtacttctacagcagcacagcccaggagaacctggccctggagaccagcagccccatcgaggaggactttgagggcatccagggcgcctttgcccagccccaggtgtctggagaggagaagttccagatgaggaagatcctgggcaagaatgctgagatcctgcccaggagccagttccagcctgtgcgcagcacagaagatgagcaggaggagaccagcaaggagagccccaaggagctgaaggagaaggacatcagcctgacagacatccaggacctgagcagcatctcctatgagccagacagcagcttcaaggaggccagctgcaagacccccaagatcaaccacgcccccacctctgtgtccacccccctgagccctggctctgtgtcctctgctgccagccagtacaaggactgcctggagagcatcaccttccaggtgaagacagaatttgccagctgctggaacagccaggagttcatccagaccctgagtgatgacttcatctctgtgcgggagcgggccaagaagctggacagcctgctgaccagcagcgagaccccacccagccggctgaccggcctgaagaggctgagcagcttcatcggggccggcagccccagcctggtgaaggcctgtgacagcagcccccctcatgccacccagaggaggagcctgcccaaggtggaggccttcagccagcaccacattgatgagctgcccccacccagccaggagctgctggatgacatcgagctgctgaagcagcagcagggcagcagcacagtgctgcacgagaacacagccagtgatggcggcggcacagccaatgaccagaggcacctggaggagcaggagacagacagcaagaaggaggacagctccatgctgctgagcaaggagacagaggacctgggggaggacacagagcgggcccacagcaccctggatgaggacctggagcgctggctgcagcccccagaggagagcgtggagctgcaggacctgcccaagggcagcgagcgggagaccaacatcaaggaccagaaggtgggggaggagaagaggaagagagaagattccatcaccccagagaggaggaagtcagaaggagtgctgggcaccagcgaggaggatgagctgaagagctgcttctggaagaggctgggctggagcgagagcagccgcatcatcgtgctggaccagagcgacctgagtgactag

SEQ ID NO: 172991 - DNA, 4356 bp, synthetic construct
  misc_feature 1..4356: note = Description of Artificial Sequence: Synthetic coding sequence
  source 1..4356: mol_type = other DNA
atgagcagagctgtgcggctgcctgtgccctgccctgtgcagctgggcaccctgagaaatgacagcctggaggcccagctgcacgagtatgtgaagcagggcaactacgtgaaggtgaagaagatcctgaagaagggcatctacgtggatgctgtgaacagcctgggccagacagccctgtttgtggccgccctgctgggcctgaggaagtttgtggatgtgctggtggactatggcagtgaccccaaccaccgctgctttgatggcagcacccctgtgcatgctgctgccttcagcggcaaccagtggatcctgagcaagctgctggatgctggaggagacctgcggctgcatgatgagcggggccagaaccccaagacctgggccctgacagctgggaaggagaggagcacccagatcgtggagttcatgcagagatgtgccagccacatgcaggccatcatccagggcttctcctatgacctgctgaagaagattgacagcccccagaggctggtgtacagccccagctggtgtggcggcctggtgcagggcaaccccaacggcagccccaaccggctgctgaaggccggggtcatcagcgcccagaacatctacagctttggatttgggaagttctacctgaccggggccacccagatggcctacctgggcagcctgcccgtcatcggggagaaggaggtgatccaggctgatgatgagcccaccttctccttcttcagcggcccctacatggtgatgaccaacctggtgtggaatggcagccgggtgacagtgaaggagctgaacctgcccacccacccccactgcagccggctgcggctggccgacctgctgattgctgagcaggagcacagcagcaagctgcggcacccctacctgctgcagctgatggctgtgtgcctgagccaggacctggagaagacccggctggtgtatgaaagaatcaccatcggcaccctcttctctgtgctgcatgaaagaagaagccagtttcctgtgctgcacatggaggtgattgtgcacctgctgctgcagatcagtgatgccctgcgctacctgcacttccagggcttcatccacaggagcctgagcagctatgctgtgcacatcatcagccctggagaggcccggctgaccaacctggagtacatgctggagagcgaggacagaggagtgcagagggacctgaccagggtgcccctgcccacccagctgtacaactgggccgcccctgaggtgatcctgcagaaggccgccaccgtgaagagtgacatctacagcttctccatgatcatgcaggagatcctgacagatgacatcccctggaagggcctggatggctctgtggtgaagaaggctgtggtgtctggcaactacctggaggctgatgtgcggctgcccaagccctactatgacatcgtgaagagcggcatccacgtgaagcagaaggacaggaccatgaacctgcaggacatccgctacatcctgaagaatgacctgaaggacttcaccggggcccagaggacccagcccacagagagcccccgggtgcagagatatggcctgcacccagatgtgaatgtgtacctgggcctgaccagcgagcacccccgggagaccccagacatggagatcatcgagctgaaggagatgggcagccagccccacagcccccgggtgcacagcctcttcacagagggcaccctggacccccaggccccagacccctgcctgatggcccgggagacccagaaccaggatgccccctgcccagcccccttcatggccgaggaggccagcagccccagcacaggccagcccagcctgtgcagctttgagatcaatgagatctacagcggctgcctgatcctggaggatgacatcgaggagcccccaggggccgccagcagcctggaggctgatggccccaaccaggtggatgagctgaagtccatggaggaggagctggacaagatggagcgggaggcctgctgcttcggctctgaagatgagagcagcagcaaggccgagacagagtacagctttgatgactgggactggcagaatggcagcctgagcagcctgagcctgcctgagagcacccgggaggccaagagcaacctgaacaacatgagcaccacagaggagtacctgatcagcaaatgtgtgctggacctgaagatcatgcagaccatcatgcatgaaaatgatgaccggctgagaaatattgagcagatcctggatgaggtggagatgaagcagaaggagcaggaggagaggatgagcctgtgggccaccagccgggagttcaccaatgcctacaagctgcccctggccgtgggcccccccagcctgaactacatcccccctgtgctgcagctgagcggcggccagaagccagacaccagcggcaactaccccaccctgccccgcttccccaggatgctgcccaccctgtgtgaccccgggaagcagaacacagatgagcagttccagtgcacccagggcgccaaggacagcctggagaccagccgcatccagaacaccagcagccagggccggccccgggagagcacagcccaggccaaggccacccagttcaacagcgccctcttcaccctgagcagccaccggcagggccccagcgccagccccagctgccactgggacagcaccaggatgtctgtggagcctgtgtcctctgagatctacaatgctgagagcaggaacaaggatgatggcaaggtgcacctgaagtggaagatggaggtgaaggagatggccaagaaggccgccaccggccagctgactgtgcccccctggcacccccagagcagcctgaccctggagagcgaggccgagaatgaaccagatgccctgctgcagccccccatccgcagcccagaaaatacagactggcagagggtgattgagtaccaccgggagaatgatgagcccagaggaaatggcaagtttgacaagacaggcaacaatgactgtgacagcgaccagcacggccggcagccccggctgggcagcttcaccagcatccgccaccccagcccccggcagaaggagcagcctgagcacagcgaggccttccaggccagcagtgacaccctggtggccgtggagaagagctacagcaccagcagccccatcgaggaggactttgagggcatccagggcgcctttgcccagccccaggtgtctggagaggagaagttccagatgaggaagatcctgggcaagaatgctgagatcctgcccaggagccagttccagcctgtgcgcagcacagaagatgagcaggaggagaccagcaaggagagccccaaggagctgaaggagaaggacatcagcctgacagacatccaggacctgagcagcatctcctatgagccagacagcagcttcaaggaggccagctgcaagacccccaagatcaaccacgcccccacctctgtgtccacccccctgagccctggctctgtgtcctctgctgccagccagtacaaggactgcctggagagcatcaccttccaggtgaagacagaatttgccagctgctggaacagccaggagttcatccagaccctgagtgatgacttcatctctgtgcgggagcgggccaagaagctggacagcctgctgaccagcagcgagaccccacccagccggctgaccggcctgaagaggctgagcagcttcatcggggccggcagccccagcctggtgaaggcctgtgacagcagcccccctcatgccacccagaggaggagcctgcccaaggtggaggccttcagccagcaccacattgatgagctgcccccacccagccaggagctgctggatgacatcgagctgctgaagcagcagcagggcagcagcacagtgctgcacgagaacacagccagtgatggcggcggcacagccaatgaccagaggcacctggaggagcaggagacagacagcaagaaggaggacagctccatgctgctgagcaaggagacagaggacctgggggaggacacagagcgggcccacagcaccctggatgaggacctggagcgctggctgcagcccccagaggagagcgtggagctgcaggacctgcccaagggcagcgagcgggagaccaacatcaaggaccagaaggtgggggaggagaagaggaagagagaagattccatcaccccagagaggaggaagtcagaaggagtgctgggcaccagcgaggaggatgagctgaagagctgcttctggaagaggctgggctggagcgagagcagccgcatcatcgtgctggaccagagcgacctgagtgactag

SEQ ID NO: 172992 - DNA, 4476 bp, synthetic construct
  misc_feature 1..4476: note = Description of Artificial Sequence: Synthetic coding sequence
  source 1..4476: mol_type = other DNA
atgagcagagctgtgcggctgcctgtgccctgccctgtgcagctgggcaccctgagaaatgacagcctggaggcccagctgcacgagtatgtgaagcagggcaactacgtgaaggtgaagaagatcctgaagaagggcatctacgtggatgctgtgaacagcctgggccagacagccctgtttgtggccgccctgctgggcctgaggaagtttgtggatgtgctggtggactatggcagtgaccccaaccaccgctgctttgatggcagcacccctgtgcatgctgctgccttcagcggcaaccagtggatcctgagcaagctgctggatgctggaggagacctgcggctgcatgatgagcggggccagaaccccaagacctgggccctgacagctgggaaggagaggagcacccagatcgtggagttcatgcagagatgtgccagccacatgcaggccatcatccagggcttctcctatgacctgctgaagaagattgacagcccccagaggctggtgtacagccccagctggtgtggcggcctggtgcagggcaaccccaacggcagccccaaccggctgctgaaggccggggtcatcagcgcccagaacatctacagctttggatttgggaagttctacctgaccggggccacccagatggcctacctgggcagcctgcccgtcatcggggagaaggaggtgatccaggctgatgatgagcccaccttctccttcttcagcggcccctacatggtgatgaccaacctggtgtggaatggcagccgggtgacagtgaaggagctgaacctgcccacccacccccactgcagccggctgcggctggccgacctgctgattgctgagcaggagcacagcagcaagctgcggcacccctacctgctgcagctgatggctgtgtgcctgagccaggacctggagaagacccggctggtgtatgaaagaatcaccatcggcaccctcttctctgtgctgcatgaaagaagaagccagtttcctgtgctgcacatggaggtgattgtgcacctgctgctgcagatcagtgatgccctgcgctacctgcacttccagggcttcatccacaggagcctgagcagctatgctgtgcacatcatcagccctggagaggcccggctgaccaacctggagtacatgctggagagcgaggacagaggagtgcagagggacctgaccagggtgcccctgcccacccagctgtacaactgggccgcccctgaggtgatcctgcagaaggccgccaccgtgaagagtgacatctacagcttctccatgatcatgcaggagatcctgacagatgacatcccctggaagggcctggatggctctgtggtgaagaaggctgtggtgtctggcaactacctggaggctgatgtgcggctgcccaagccctactatgacatcgtgaagagcggcatccacgtgaagcagaaggacaggaccatgaacctgcaggacatccgctacatcctgaagaatgacctgaaggacttcaccggggcccagaggacccagcccacagagagcccccgggtgcagagatatggcctgcacccagatgtgaatgtgtacctgggcctgaccagcgagcacccccgggagaccccagacatggagatcatcgagctgaaggagatgggcagccagccccacagcccccgggtgcacagcctcttcacagagggcaccctggacccccaggccccagacccctgcctgatggcccgggagacccagaaccaggatgccccctgcccagcccccttcatggccgaggaggccagcagccccagcacaggccagcccagcctgtgcagctttgagatcaatgagatctacagcggctgcctgatcctggaggatgacatcgaggagcccccaggggccgccagcagcctggaggctgatggccccaaccaggtggatgagctgaagtccatggaggaggagctggacaagatggagcgggaggcctgctgcttcggctctgaagatgagagcagcagcaaggccgagacagagtacagctttgatgactgggactggcagaatggcagcctgagcagcctgagcctgcctgagagcacccgggaggccaagagcaacctgaacaacatgagcaccacagaggagtacctgatcagcaaatgtgtgctggacctgaagatcatgcagaccatcatgcatgaaaatgatgaccggctgagaaatattgagcagatcctggatgaggtggagatgaagcagaaggagcaggaggagaggatgagcctgtgggccaccagccgggagttcaccaatgcctacaagctgcccctggccgtgggcccccccagcctgaactacatcccccctgtgctgcagctgagcggcggccagaagccagacaccagcggcaactaccccaccctgccccgcttccccaggatgctgcccaccctgtgtgaccccgggaagcagaacacagatgagcagttccagtgcacccagggcgccaaggacagcctggagaccagccgcatccagaacaccagcagccagggccggccccgggagagcacagcccaggccaaggccacccagttcaacagcgccctcttcaccctgagcagccaccggcagggccccagcgccagccccagctgccactgggacagcaccaggatgtctgtggagcctgtgtcctctgagatctacaatgctgagagcaggaacaaggatgatggcaaggtgcacctgaagtggaagatggaggtgaaggagatggccaagaaggccgccaccggccagctgactgtgcccccctggcacccccagagcagcctgaccctggagagcgaggccgagaatgaaccagatgccctgctgcagccccccatccgcagcccagaaaatacagactggcagagggtgattgagtaccaccgggagaatgatgagcccagaggaaatggcaagtttgacaagacaggcaacaatgactgtgacagcgaccagcacggccggcagccccggctgggcagcttcaccagcatccgccaccccagcccccggcagaaggagcagcctgagcacagcgaggccttccaggccagcagtgacaccctggtggccgtggagaagagctacagccaccagagcatgcagagcacctgcagccctgagagcagcgaggacatcacagatgagttcctgaccccagatggagagtacttctacagcagcacagcccaggagaacctggccctggagaccagcagccccatcgaggaggactttgagggcatccagggcgcctttgcccagccccaggtgtctggagaggagaagttccagatgaggaagatcctgggcaagaatgctgagatcctgcccaggagccagttccagcctgtgcgcagcacagaagatgagcaggaggagaccagcaaggagagccccaaggagctgaaggagaaggacatcagcctgacagacatccaggacctgagcagcatctcctatgagccagacagcagcttcaaggaggccagctgcaagacccccaagatcaaccacgcccccacctctgtgtccacccccctgagccctggctctgtgtcctctgctgccagccagtacaaggactgcctggagagcatcaccttccaggtgaagacagaatttgccagctgctggaacagccaggagttcatccagaccctgagtgatgacttcatctctgtgcgggagcgggccaagaagctggacagcctgctgaccagcagcgagaccccacccagccggctgaccggcctgaagaggctgagcagcttcatcggggccggcagccccagcctggtgaaggcctgtgacagcagcccccctcatgccacccagaggaggagcctgcccaaggtggaggccttcagccagcaccacattgatgagctgcccccacccagccaggagctgctggatgacatcgagctgctgaagcagcagcagggcagcagcacagtgctgcacgagaacacagccagtgatggcggcggcacagccaatgaccagaggcacctggaggagcaggagacagacagcaagaaggaggacagctccatgctgctgagcaaggagacagaggacctgggggaggacacagagcgggcccacagcaccctggatgaggacctggagcgctggctgcagcccccagaggagagcgtggagctgcaggacctgcccaagggcagcgagcgggagaccaacatcaaggaccagaaggtgggggaggagaagaggaagagagaagattccatcaccccagagaggaggaagtcagaaggagtgctgggcaccagcgaggaggatgagctgaagagctgcttctggaagaggctgggctggagcgagagcagccgcatcatcgtgctggaccagagcgacctgagtgactag

SEQ ID NO: 172993 - DNA, 8370 bp, synthetic construct
  misc_feature 1..8370: note = Description of Artificial Sequence: Synthetic coding sequence
  source 1..8370: mol_type = other DNA
atgcccagtgatgccaaggacagcgtgaatggagacctgctgctgaactggaccagcctgaagaacatcctgagcggcctgaatgccagcttccccctgcacaacaacacaggcagcagcacagtgaccaccagcaagagcatcaaggacccccggctgatgagaagagaggagagcatgggagagcagagcagcacagctggcctgaatgaggtgctgcagtttgagaagagcagtgacaacgtgaacagcgagatcaagagcacccccagcaacagcgccagcagcagcgaggtggtgcctggggactgtgctgtgctgaccaacggcctggacaccccctgcttcaagacctctgtgaatgacagccagagctgggcccacaacatgggctctgaagattatgactgcatcccccccaacaaggtgaccatggccggccagtgcaaggaccagggcaacttctccttccccatctctgtgtccaatgtggtgtctgaggtggagaaccagaaccacagcgaggagaaggcccagagggcccagcaggagagcggaaatgcctacaccaaggagtacagcagccacatcttccaggacagccagagcagtgacctgaagaccatctaccagacaggctgccagaccagcaccgtcttccccctgaagaagaaggtgtccattgatgagtacctgcagaacacaggcaagatgaagaactttgctgacctggaggacagcagcaagcatgaggagaagcagacctcctggaaggagattgacaatgacttcaccaatgagaccaagatcagccccatcgacaactacatcgtgctgcaccaggagtacaaggagagcgagagccacaacagctttgggaagagctgtgacaagatcctgatcacccaggagctggagatcaccaagagcagcaccagcaccatcaaggacaaggatgagctggaccacctggccctggagtggcagatcacccccagctttgagagcctgagccagaagcacccccagcacagcgtggagtatgagggcaacatccacaccagcctggccatcgcccagaagctgatggagctgaagctgggcaagatcaaccagaactatgccagcatcatcacagaggccttccccaagcccaaggacatcccccaggccaaggagatgttcatcgacaccgtcatcagcagctacaacattgaaacagcccatgacagcagcaactgcagcatcacccgggagcacatctgtgtgcacaggaagaatgaaaatgaacctgtgtccctggagaacatccagagggactacaaggagacagcctacgtggaggaccggggccaggaccacaacctcttctgcaacagccagctgagcaatgacatctggctgaatgtgaacttcaagaagcagacagaccgggagaaccagaatgaggccaaggagaacagcgccagctgtgtggagaacaacatcgagaacatctacggggacaagaagcaggacagccacaccaatgaaaacttcagcaacattgatgagaaggaggacaagaactaccacaacatcgagatcctgagcagcgaggagttcagcaccaagttcaacctgatctgcagagaagataatgctgtgtctgctgccacagccctgctggagagcgaggaggacaccatctctgctgtgaagcagaaggacacagagaacacaggccgctctgtggagcacctggccagcaccaccttccccaagacagccagcagctctgtgtgtgtggccagcaatgctgccatccagatcgccagcgccaccatgcctgccctgagcctgaacaatgatgaccaccagatctaccagttcaaggagacctgcagcagcgagagcccagactttggcctgctggtgaagcaccgggtgtctgactgtgaaattgacacagacaagaacaagagccaggagagcttccaccagagcatcaatgaaaacctggtgctgcagagcattgagctggagagcgagattgaaattgagctggaggactgtgatgatgccttcatcttccagcaggacacccacagccatgagaacatgctgtgtgaggagtttgtgaccagctacaaggccctgaagagccgcatctcctgggagggcctgctggccctggacaatggagagatggaggtgctggagagcaccaccggccgggagaacagcgaccagcactacagcaaggagagcaactacttctacagcagcacccagaacaatgaaacagagctgaccagccccatcctgctgcctgacctgcagatcaagatcaccaacatcttccggcccggcttcagccccacagctgacagcctggccctgaaggacagcttctgcacccacgtgacagaggccaccaagccagagatcaacaaggaggatggagagatcctgggctttgacatctacagccagccctttggagaaaatgctgactacccctgtgaggacaaggtggacaacatccggcaggagagcggccctgtgagcaacagcgagatcagcctgagctttgacctgagcaggaacacagatgtgaaccacaccagcgagaaccagaacagcgagagcctcttcacagagcccagcaatgtgaccaccattgatgatggcagccgctgcttcttcaccaagagcaagacagactacaatgacaccaagaacaagaaggaggtggagagccgcatcagcaagaggaagctgcacatcagcagccgggaccagaacatcccccacaaggacctgcggcggcacaagatctacggcaggaagaggcggctgaccagccaggacagcagcgagtgcttcagcagcctgagccagggccgcatcaagaccttcagccagagcgagaagcacatcaagtctgtgctgaacatcctgagtgatgaggccagcctgtgcaagagcaagtgcctgagcaggaagctggacaaggctgtggtgcacctgaagaaggcccacagaagagtgcacaccagcctgcagctgatcaccaaggtgggggaggagaggaagggccccctgcccaagagctatgccatcatctgcaacaacttctgggagagctgtgacctgcagggctacagctctgtgtcccagaggaagtactacagcaccaagcacttcagcagcaagaggaaatatgacaagaggaggaagaagagggcccccaaggctgacatcagcaagagcctgacccacgtgtccaagcacaagagctacaagaccagcggggagaagaagtgcctgagcaggaagtccatggccagctctgtgtccaagagccaccccaccaccagccacatgggagagttctgcaaccaggagcaccctgagagccagctgcctgtgagcagcaccagccagagcaccagccagagcgtgtactacaacagctctgtgagcaaccccagcctgtctgaggagcaccagcccttcagcggcaagacagcctacctgttctccccagaccacagtgatgagaagctgattgagaaggagaaccagattgacacagccttcctgagcagcaccagcaaatatgagaagctggagaagcacagcgccaaccacaacgtgaaggatgccaccaaggagaacagctgtgatgccaatgaggtgatcaatgaaagcaacagcgtgtccctgagctgcatcaaggagaacatcaacagcagcactggaaatgactgtgatgccacctgcatcggccacaccaaggccaagacagatgtgctgatctctgtgctggacagcaatgtgaagcacttcctgaatgacctgtaccagcagggcaacctgatcctgagtgactgcaagaggaacctggaggtgaagtggacagaccccatcgagcggcccaagcagaacatcatcaccggcaacttcctgatgggccccctgaacctgaccctgattgccagcaagaagtacagcatcccccagctgtctgctgctgctgtgacagattctgagggggagagcagcaagagctacctggacaagcagaggatcctgactgtggacagctttgctgccagcagcacagtgccccactgtgagcagagctgccgggagaaggagctgctgaagacagagcagtgcagcagcggcaactgcctgcacacagatggaaatgagaccaacgtgacagagaactatgagctggatgtggccagcggcacagaggaggacaagagctatggagagaacatcgtggagctgagcagcagtgacagcagcctgctgctgaaggacaacgtgaagggcagcagcagcgagacctgcatcgtgaagaaggacacagaagatcgcatcacctggaaggtgaagcaggccgagaaggccaaggacagcgtgtacaagaggtccatgacagagggcagcacagtgaacacagagtacaagaaccagaagaaccagatcagcgaggagagctgcctgaatgagaagatcatcaccaccaacctgattgacagccacctgagcaccaagaacaccaccacagaatctgtgcccctgaagaacacagtgagcaaccccctgaacaagcgggagaagaagggggagatcaaggtgtccaaggacagccagagcgacctgaccctgcacagcgagatcgcctacatcagcaagccaggcatcctgggcgtgaaccacacccccatcctgcctgcccacagcgagacctgcaaggtgcccaccctgctgaagaagccagccagctatgtgtctgacttcaaggagaagcactgcagcgccaaccacacagccctgattgccaacctgagccagatcctgcagagagcagatgaggccagcagcctgcagatcctgcaggaggagaccaaggtgtgcctgaacatcctgcccctgtttgtggaggcctttgagaggaagcaggagtgcagcgtggagcagatcctgatcagccgggagctgctggtggaccagaacctgtggaacaactgcaagcacaccctgaagccctgtgctgtggacaccctggtggagctgcagatgatgatggagaccatccagttcatcgagaacaagaagaggcacctggagggggagcccaccctgcggagcctgctgtggtatgatgagaccctgtatgcagagctgctgggcaagccccggggcttccagcagcagagcaacttctacccaggcttccagggccgcctgaagtacaatgccttctgtgagctgcagacctaccatgaccagctggtggagctgctggaggagaccaagcgggagaagaacagctactacgtgttcctgaagtacaagaggcaggtgaatgaatgtgaggccatcatggagcactgcagcgactgctttgacttcagcctgtctgtgcccttcacctgtggggtgaactttggagacagcctggaggacctggagatcctgaggaagagcaccctgaagctgatcaacgtgtgtggggacagccccaaggtgcacagctacccaggcaagcaggaccacctgtggatcatcatcgagatgatcagcagcaaggtgaacttcatcaagaacaatgaggccgtgcgggtgaagatcagcctgtatggcctggagcacatcttctttgatgctgccaagaacctggtgtggaaggagaggacccagagcttcagcaagaagtacagccagaagaaggatgaggagcggctgctgcgggtgaacaagtgtgccttcagcaagctgcagaagatctatgacaccctgagcaaggacctgaacaatgagcccatcagccccatcggcctggaggaggacaccatcatcgccagcaggaagagtgaccaccccatcaatgaggccaccatcagcattgagaacagcaagttcaacagcaacctgctggcccacccagacatctgctgcatcagcgagatcctggaccaggccgagtttgctgacctgaagaagctgcaggacctgaccctgcgctgcacagaccacctggagatcctgaagaagtacttccagatgctgcaggacaacaacatggacaacatcttcatcacagaggagaatgtgctggatgtggtgatcaaccacagccatgaggccatcatcctgaagccagaggccatcgagatgtacattgaaattgtgatggtgtctgagaccatccacttcctgaagaacagcatcgccaagaagctggacaagcagcgcttccggggcatgctgtggtttgacctgagcctgctgcctgagctggtgcagtgccaggagaagatggccagcttctccttcctgaaggacaacagcacagatgtgtgcctgtggaaggtgattgaaacagctgtgtctgagctgaagaaggacctggacatcatctgcaagtacaatgaggccgtgaactgcagctatgccatccacctgctgagccgggagctgcaggagctgtctgagatcaagaagctgctgaagaagagcaagtacttcatcagcacctacatcgactttgtgccctacatcgccagcatcaactacggcagcacagtgacagagctggagtacaactacaaccagttcagcaccctgctgaagaatgtgatgtctgcccccaggaaggacctgggcaagatggcccacatcaggaaggtgatgaagaccatcgagcacatgaagatgatctgcaccaagaatgctgagctgaccatctccttcttcctgtgccagatgctgtacaacagaaggaagatcctgcagctgaagaggaaggagaagatgaacatccacatcgtgaagccaggagagaacaacaacaagttcagcatcagcaccatgctgccccctgtgtctgagtgcatcaacaagaacatcagcaacagcagcaagaagaggcccagcacagtggacaagtgtgaggacagccaggagcagcagcaggacaccaccgtgagcagctgcaagaagctgaaggtggacatgaaggatgtgaccaagatcaaccgggagaaggccaccttcaagcaccccaggaccaccggcagccaccccaagtctgagaacaagatcgtgcccagcagctgtgacagcctgaagaggaaccacctgacccccaagaaggtggagatgcagaggagcctgcccggcagcctgctgcccctggagaaccccaaggacacctgtgccagcaagtctgagagcaagattgacctgactgtgtccagtgaccacttcagcggccagcaggagaacctgaacagcatgaagaagagaaatgtgaacttctctgctgctgagaccaagagtgacaagaaggactgtgccgcctttgccatctgtgaccagaagtctgtgcacggcaccttctccccagaccacggcaccctgctgcagaagttcctgaagaacagcccagaccccacccagaagagctgcctgagtgacatcaaccctgagacagatgtgtccctggtgcctgatgcctctgtgctgagcaagcccatcttctgctttgtgaaggatgtgcacccagacctggagatgaatgacacagtgtttgagctgcaggacaatgacatcgtgaacagcagcatcaagaacagcagctgcatgaccagccctgagcccatctgcatccagaacaagatccccaccctgcagatcaacaagctgcagcccacagaaacagaaagtgaggacaagtacatgaaggacaccctgaaccccaacacagtgcacacctttggagccagcggccacatcaccctgaatgtgaaccagggcgctgagtacagcctgtctgagcagcagaatgacaagaacagcaaggtgctgatgcagaatgctgccacctactggaatgagctgccccagagcgcctgcaaccccacctacaacagcagcgagcacctgtttggcaccagctacccctacagcgcctggtgtgtgtaccagtacagcaacagcaatggaaatgccatcacccagacctaccagggcatcaccagctatgaggtgcagcccagccccagcggcctgctgaccaccgtggccagcacagcccagggcacccacagcaacctgctgtacagccagtacttcacctactttgctggggagccccaggccaacggctttgtgcctgtgaatggctacttccagagccagatcccagccagcaacttccggcagcccatcttcagccagtatgccagccaccagcccctgccccaggccacctacccctacctgcccaacagatttgtgcccccagaggtgccctgggtgtatgccccctggcaccaggagagcttccaccctggccactag

SEQ ID NO: 172994 - DNA, 1233 bp, synthetic construct
  misc_feature 1..1233: note = Description of Artificial Sequence: Synthetic coding sequence
  source 1..1233: mol_type = other DNA
atggtgctgaaggccgagcacaccaggagccccagcgccaccctgcccagcaatgtgcccagctgccgcagcctgagcagcagtgaagatggccccagcggccccagcagcctggctgatggcggcctggcccacaacctgcaggacagcgtgcgccaccgcatcctgtacctgtctgagcagctgcgggtggagaaggccagcagagatggcaacacagtgtcctacctgaagctggtgtccaaggctgacagacaccaggtgccccacatccagcaggcctttgagaaggtgaaccagagggccagcgccaccatcgcccagatcgagcaccggctgcaccagtgccaccagcagctgcaggagctggaggagggctgcaggcctgagggcctgctgctgatggccgagagtgaccctgccaactgtgagcccccatctgagaaggccctgctgtctgagcccccagagcctggaggagaagatggccctgtgaacctgccccacgccagccggcccttcatcctggagagccgcttccagagcctgcagcagggcacctgcctggagacagaagatgtggcccagcagcagaacctgctgctgcagaaggtgaaggccgagctggaggaggccaagcgcttccacatcagcctgcaggagagctaccacagcctgaaggagaggagcctgacagacctgcagctgctgctggagagcctgcaggaggagaagtgccggcaggccctgatggaggagcaggtgaatggccgcctgcagggccagctgaatgagatctacaacctgaagcacaacctggcctgcagcgaggagaggatggcctacctgtcctatgagcgggccaaggagatctgggagatcacagagaccttcaagagccgcatcagcaagctggagatgctgcagcaggtgacccagctggaggccgctgagcacctgcagagccggcccccccagatgctgttcaagttcctgagcccccggctgagcctggccaccgtgctgctggtgtttgtgtccaccctgtgtgcctgccccagcagcctcatcagcagccggctgtgcacctgcaccatgctgatgctgattggcctgggcgtgctggcctggcagcgctggagggccatcccagccacagactggcaggagtgggtgcccagccgctgccgcctgtacagcaaggacagcggccccccagcagatggcccctag

SEQ ID NO: 172995 - DNA, 1233 bp, synthetic construct; identical to SEQ ID NO: 172994
  misc_feature 1..1233: note = Description of Artificial Sequence: Synthetic coding sequence
  source 1..1233: mol_type = other DNA

SEQ ID NO: 172996 - DNA, 945 bp, synthetic construct
  misc_feature 1..945: note = Description of Artificial Sequence: Synthetic coding sequence
  source 1..945: mol_type = other DNA
atgaggcctgagggcagcctgacctacagagtgcctgagcggctgcggcagggcttctgtggggtgggccgggccgcccaggccctggtgtgtgccagcgccaaggagggcacagccttcaggatggaggccgtgcaggagggcgccgccggcgtggagagcgagcaggccgccctgggggaggaggccgtgctgctgctggatgacatcatggccgaggtggaggtggtggccgaggtggaggtggtggccgaggaggagggcctggtggagcggcgggaggaggcccagagggcccagcaggccgtgcccggccctggccccatgaccccagagagcgcccctgaggagctgctggccgtgcaggtggagctggagcctgtgaatgcccaggccaggaaggccttcagccggcagcgggagaagatggagaggaggaggaagccccacctggacagaagaggagctgtgatccagagcgtgcccggcttctgggccaacgtgattgccaaccacccccagatgtctgccctgatcacagatgaagatgaggacatgctgagctacatggtgtccctggaggtgggggaggagaagcaccctgtgcacctgtgcaagatcatgctgttcttccgcagcaacccctacttccagaacaaggtgatcaccaaggagtacctggtgaacatcacagagtaccgggccagccacagcacccccatcgagtggtacccagactatgaggtggaggcctacagaagaagacaccacaacagcagcctgaacttcttcaactggttcagtgaccacaactttgctggcagcaacaagattgctgagatcctgtgcaaggacctgtggaggaaccccctgcagtactacaagaggatgaagcccccagaggagggcacagagaccagcggggacagccagctgctgtcctag

SEQ ID NO: 172997 - DNA, 927 bp, synthetic construct
  misc_feature 1..927: note = Description of Artificial Sequence: Synthetic coding sequence
  source 1..927: mol_type = other DNA
atgaggcctgagggcagcctgacctacagagtgcctgagcggctgcggcagggcttctgtggggtgggccgggccgcccaggccctggtgtgtgccagcgccaaggagggcacagccttcaggatggaggccgtgcaggagggcgccgccggcgtggagagcgagcaggccgccctgggggaggaggccgtgctgctgctggatgacatcatggccgaggtggaggtggtggccgaggaggagggcctggtggagcggcgggaggaggcccagagggcccagcaggccgtgcccggccctggccccatgaccccagagagcgcccctgaggagctgctggccgtgcaggtggagctggagcctgtgaatgcccaggccaggaaggccttcagccggcagcgggagaagatggagaggaggaggaagccccacctggacagaagaggagctgtgatccagagcgtgcccggcttctgggccaacgtgattgccaaccacccccagatgtctgccctgatcacagatgaagatgaggacatgctgagctacatggtgtccctggaggtgggggaggagaagcaccctgtgcacctgtgcaagatcatgctgttcttccgcagcaacccctacttccagaacaaggtgatcaccaaggagtacctggtgaacatcacagagtaccgggccagccacagcacccccatcgagtggtacccagactatgaggtggaggcctacagaagaagacaccacaacagcagcctgaacttcttcaactggttcagtgaccacaactttgctggcagcaacaagattgctgagatcctgtgcaaggacctgtggaggaaccccctgcagtactacaagaggatgaagcccccagaggagggcacagagaccagcggggacagccagctgctgtcctag

SEQ ID NO: 172998 - DNA, 2097 bp, synthetic construct
  misc_feature 1..2097: note = Description of Artificial Sequence: Synthetic coding sequence
  source 1..2097: mol_type = other DNA
atgatgaggagccgcagcaagagcccccggcggcccagccccacagcccggggggccaactgtgatgtggagctgctgaagaccaccacccgggaccgggaggagctgaagtgcatgctggagaagtatgagcggcacctggccgagatccagggcaatgtgaaggtgctgaagtctgagcgggacaagatcttcctgctgtatgagcaggcccaggaggagatcacccggctgcggcgggagatgatgaagagctgcaagagccccaagagcaccacagcccacgccatcctgcggcgggtggagacagaaagagatgtggccttcacagacctgcggaggatgaccacagagcgggacagcctgcgggagcggctgaagatcgcccaggagacagccttcaatgagaaggcccacctggagcagagaattgaggagctggagtgcaccgtgcacaacctggatgatgagaggatggagcagatgagcaacatgaccctgatgaaggagaccatcagcacagtggagaaggagatgaagagcctggccaggaaggccatggacacagaaagtgagctgggccggcagaaggccgagaacaacagcctgcggctgctgtatgagaacacagagaaggacctgagtgacacccagaggcacctggccaagaagaagtatgagctgcagctgacccaggagaagatcatgtgcctggatgagaagattgacaacttcacccggcagaacatcgcccagcgggaggagatcagcatcctgggcggcaccctgaatgacctggccaaggagaaggaatgtctgcaggcctgcctggacaagaagtctgagaacatcgccagcctgggggagagcctggccatgaaggagaagaccatcagcggcatgaagaacatcatcgccgagatggagcaggccagccggcagtgcacagaggccctgattgtgtgtgagcaggatgtgtccaggatgaggcggcagctggatgagaccaatgatgagctggcccagatcgcccgggagcgggacatcctggcccatgacaatgacaacctgcaggagcagtttgccaaggccaagcaggagaaccaggccctgagcaagaagctgaatgacacccacaatgagctgaatgacatcaagcagaaggtgcaggacaccaacctggaggtgaacaagctgaagaacatcctgaagtctgaggagagtgaaaatcggcagatgatggagcagctgaggaaggccaatgaagatgctgagaactgggagaacaaggcccggcagagcgaggccgacaacaacaccctgaagctggagctgatcacagctgaggccgagggcaaccggctgaaggagaaggtggacagcctgaaccgggaggtggagcagcacctgaatgctgagaggagctacaagagccagatcagcaccctgcacaagtctgtggtgaagatggaggaggagctgcagaaggtgcagtttgagaaggtgtctgccctggccgacctgagcagcacccgggagctgtgcatcaagctggacagcagcaaggagctgctgaaccggcagctggtggccaaggaccaggagattgagatgagagaaaatgagctggacagcgcccacagcgagattgagctgctgcggagccagatggccaatgaaagaatctccatgcagaacctggaggccctgctggtggccaacagagacaaggagtaccagagccagatcgccctgcaggagaaggagagcgagatccagctgctgaaggagcacctgtgcctggccgagaacaagatggccatccagagcagagatgtggcccagttcagaaatgtggtgacccagctggaggccgacctggacatcaccaagaggcagctgggcacagaaagatttgagcgggagagagctgtgcaggagctgcggcggcagaactacagcagcaatgcctaccacatgagcagcaccatgaagcccaacaccaagtgccacagccctgagcgggcccaccacaggagcccagaccggggcctggacaggagcctggaggagaacctgtgctacagagacttctag

SEQ ID NO: 172999 - DNA, 2073 bp, synthetic construct
  misc_feature 1..2073: note = Description of Artificial Sequence: Synthetic coding sequence
  source 1..2073: mol_type = other DNA
atgatgaggagccgcagcaagagcccccggcggcccagccccacagcccggggggccaactgtgatgtggagctgctgaagaccaccacccgggaccgggaggagctgaagtgcatgctggagaagtatgagcggcacctggccgagatccagggcaatgtgaaggtgctgaagtctgagcgggacaagatcttcctgctgtatgagcaggcccaggaggagatcacccggctgcggcgggagatgatgaagagctgcaagagccccaagagcaccacagcccacgccatcctgcggcgggtggagacagaaagagatgtggccttcacagacctgcggaggatgaccacagagcgggacagcctgcgggagcggctgaagatcgcccaggagacagccttcaatgagaaggcccacctggagcagagaattgaggagctggagtgcaccgtgcacaacctggatgatgagaggatggagcagatgagcaacatgaccctgatgaaggagaccatcagcacagtggagaaggagatgaagagcctggccaggaaggccatggacacagaaagtgagctgggccggcagaaggccgagaacaacagcctgcggctgctgtatgagaacacagagaaggacctgagtgacacccagaggcacctggccaagaagaagtatgagctgcagctgacccaggagaagatcatgtgcctggatgagaagattgacaacttcacccggcagaacatcgcccagcgggaggagatcagcatcctgggcggcaccctgaatgacctggccaaggagaaggaatgtctgcaggcctgcctggacaagaagtctgagaacatcgccagcctgggggagagcctggccatgaaggagaagaccatcagcggcatgaagaacatcatcgccgagatggagcaggccagccggcagtgcacagaggccctgattgtgtgtgagcaggatgtgtccaggatgaggcggcagctggatgagaccaatgatgagctggcccagatcgcccgggagcgggacatcctggcccatgacaatgacaacctgcaggagcagtttgccaaggccaagcaggagaaccaggccctgagcaagaagctgaatgacacccacaatgagctgaatgacatcaagcagaaggtgcaggacaccaacctggaggtgaacaagctgaagaacatcctgaagtctgaggagagtgaaaatcggcagatgatggagcagctgaggaaggccaatgaagatgctgagaactgggagaacaaggcccggcagagcgaggccgacaacaacaccctgaagctggagctgatcacagctgaggccgagggcaaccggctgaaggagaaggtggacagcctgaaccgggaggtggagcagcacctgaatgctgagaggagctacaagagccagatcagcaccctgcacaagtctgtggtgaagatggaggaggagctgcagaaggtgcagtttgagaaggtgtctgccctggccgacctgagcagcacccgggagctgtgcatcaagctggacagcagcaaggagctgctgaaccggcagctggtggccaaggaccaggagattgagatgagagaaaatgagctggacagcgcccacagcgagattgagctgctgcggagccagatggccaatgaaagaatctccatgcagaacctggaggccctgctggtggccaacagagacaaggagtaccagagccagatcgccctgcaggagaaggagagcgagatccagctgctgaaggagcacctgtgcctggccgagaacaagatggccatccagagcagagatgtggcccagttcagaaatgtggtgacccagctggaggccgacctggacatcaccaagaggcagctgggcacagaaagatttgagcgggagagagctgtgcaggagctgcggcggcagaactacagcagcaatgcctaccacatgagcagcaccatgaagcccaacaccaagtgccacagccctgagcgggcccaccacaggagcccagaccggggcctggacaggagcctggagtag

SEQ ID NO: 173000 - DNA, 2097 bp, synthetic construct; identical to SEQ ID NO: 172998
  misc_feature 1..2097: note = Description of Artificial Sequence: Synthetic coding sequence
  source 1..2097: mol_type = other DNA

SEQ ID NO: 173001 - DNA, 2097 bp, synthetic construct; identical to SEQ ID NO: 172998
  misc_feature 1..2097: note = Description of Artificial Sequence: Synthetic coding sequence
  source 1..2097: mol_type = other DNA

SEQ ID NO: 173002 - DNA, 2097 bp, synthetic construct; identical to SEQ ID NO: 172998
  misc_feature 1..2097: note = Description of Artificial Sequence: Synthetic coding sequence
  source 1..2097: mol_type = other DNA

SEQ ID NO: 173003 - DNA, 894 bp, synthetic construct
  misc_feature 1..894: note = Description of Artificial Sequence: Synthetic coding sequence
  source 1..894: mol_type = other DNA
atgatgaggagccgcagcaagagcccccggcggcccagccccacagcccggggggccaactgtgatgtggagctgctgaagaccaccacccgggaccgggaggagctgaagtgcatgctggagaagtatgagcggcacctggccgagatccagggcaatgtgaaggtgctgaagtctgagcgggacaagatcttcctgctgtatgagcaggcccaggaggagatcacccggctgcggcgggagatgatgaagagctgcaagagccccaagagcaccacagcccacgccatcctgcggcgggtggagacagaaagagatgtggccttcacagacctgcggaggatgaccacagagcgggacagcctgcgggagcggctgaagatcgcccaggagacagccttcaatgagaaggcccacctggagcagagaattgaggagctggagtgcaccgtgcacaacctggatgatgagaggatggagcagatgagcaacatgaccctgatgaaggagaccatcagcacagtggagaaggagatgaagagcctggccaggaaggccatggacacagaaagtgagctgggccggcagaaggccgagaacaacagcctgcggctgctgtatgagaacacagagaaggacctgagtgacacccagaggcacctggccaagaagaagtatgagctgcagctgacccaggagaagatcatgtgcctggatgagaagattgacaacttcacccggcagaacatcgcccagcgggaggagatcagcatcctgggcggcaccctgaatgacctggccaaggagaaggaatgtctgcaggcctgcctggacaagaagtctgagaacatcgccagcctgggggagagcctggccatgaagacagtgtactag

SEQ ID NO: 173004 - DNA, 1881 bp, synthetic construct
  misc_feature 1..1881: note = Description of Artificial Sequence: Synthetic coding sequence
  source 1..1881: mol_type = other DNA
atggccggggagcggccccccctgcggggccctggccctggccctggagaggtgcctggagagggccccccaggccctgggggcactggaggcggccctggccggggccggcccagcagctaccgggccctgcggtctgctgtgagcagcctggcccgggtggatgacttccactgtgccgagaagattggagctggcttcttcagcgaggtgtacaaggtgcgccaccggcagagcggccaggtgatggtgctgaagatgaacaagctgcccagcaacagaggcaacaccctgcgggaggtgcagctgatgaaccggctgcggcaccccaacatcctgcgcttcatgggcgtgtgtgtgcaccagggccagctgcacgccctgacagagtacatgaatggaggcaccctggagcagctgctgagcagccctgagcccctgtcctggcctgtgcggctgcacctggccctggacatcgcccggggcctgcgctacctgcacagcaaaggagtcttccaccgggacctgaccagcaagaactgcctggtgcggcgggaggaccggggcttcaccgctgtggtgggggactttggcctggccgagaagatccctgtgtaccgggagggcgccaggaaggagcccctggccgtggtgggcagcccctactggatggcccctgaggtgctgcggggggagctgtatgatgagaaggcagatgtgtttgcctttggaattgtgctgtgtgagctgattgcccgggtgcctgctgaccctgactacctgcccaggacagaagattttggcctggatgtgcctgccttccgcaccctggtgggagatgactgccccctgcccttcctgctgctggccatccactgctgcaacctggagcccagcacccgggcccccttcacagagatcacccagcacctggagtggatcctggagcagctgcctgagcccgcccccctgaccaggacagccctgacccacaaccagggctctgtggcccggggcggccccagcgccaccctgcccaggccagacccccggctgagccgcagcagaagtgacctcttcctgccccccagccctgagagcccccccaactggggagacaacctgaccagggtgaaccccttcagcctgcgggaggacctgcggggcggcaagatcaagctgctggacacccccagcaagcctgtgctgcccctggtgccccccagccccttccccagcacccagctgcccctggtgaccaccccagagaccctggtgcagcccggcaccccagcccggcgctgccgcagcctgcccagcagccctgagctgcccaggaggatggagacagccctgcccggccctggccccccagctgtgggccccagcgctgaggagaagatggagtgtgagggcagcagccctgagcctgagcccccaggccctgccccccagctgcccctggccgtggccacagacaacttcatcagcacctgcagcagcgccagccagccctggagccccaggagcggccctgtgctgaacaacaaccccccagctgtggtggtgaacagcccccagggctgggccggggagccctggaacagagcccagcacagcctgcccagggctgctgccctggagaggacagagcccagccccccaccttctgccccccgggagccagatgagggcctgccctgccccggctgctgcctgggccccttctcctttggcttcctgtccatgtgcccccggcccaccccagctgtggcccgctacagaaacctgaactgtgaggccggcagcctgctgtgccaccggggccaccacgccaagccacccacccccagcctgcagctgcccggggcccggagctag

SEQ ID NO: 173005 - DNA, 474 bp, synthetic construct
  misc_feature 1..474: note = Description of Artificial Sequence: Synthetic coding sequence
  source 1..474: mol_type = other DNA
tctgcccgggctgctgccctgagcaggaacctgcagggccagaggcccctgcccctggccgtggccacagacaacttcatcagcacctgcagcagcgccagccagccctggagccccaggagcggccctgtgctgaacaacaaccccccagctgtggtggtgaacagcccccagggctgggccggggagccctggaacagagcccagcacagcctgcccagggctgctgccctggagaggacagagcccagccccccacccagcgccccccgggagccagatgagggcctgccctgccccggctgctgcctgggccccttctcctttggcttcctgtccatgtgcccccggcccaccccagctgtggcccgctacagaaacctgaactgtgaggccggcagcctgctgtgccaccggggccaccacgccaagccacccacccccagcctgcagctgcccggggcccggagctag

SEQ ID NO: 173006 - DNA, 1077 bp, synthetic construct
  misc_feature 1..1077: note = Description of Artificial Sequence: Synthetic coding sequence
  source 1..1077: mol_type = other DNA
atggatgatgccaccgtgctgaggaagaagggctacatcgtgggcatcaacctgggcaagggcagctatgccaaggtgaagagcgcctacagcgagcggctgaagttcaacgtggccgtgaagatcatcgacaggaagaagacccccacagactttgtggagcgcttcctgccccgggagatggacatcctggccaccgtgaaccacggcagcatcatcaagacctatgagatctttgagaccagtgatggccgcatctacatcatcatggagctgggcgtgcagggcgacctgctggagttcatcaagtgccagggcgccctgcatgaagatgtggccaggaagatgttccggcagctgagcagcgctgtgaagtactgccacgacctggacatcgtgcaccgggacctgaagtgtgagaacctgctgctggacaaggacttcaacatcaagctgagtgactttggcttcagcaagcgctgcctgcgggacagcaatggccgcatcatcctgagcaagaccttctgtggcagcgctgcctatgctgcccctgaggtgctgcagagcatcccctaccagcccaaggtgtatgacatctggagcctgggcgtcatcctgtacatcatggtgtgtggctccatgccctatgatgacagcgacatcaggaagatgctgcgcatccagaaggagcaccgggtggacttccccaggagcaagaacctgacctgtgagtgcaaggacctgatctacaggatgctgcagccagatgtgtcccagaggctgcacattgatgagatcctgagccacagctggctgcagccccccaagcccaaggccaccagcagcgccagcttcaagcgggagggggagggcaagtacagagctgagtgcaagctggacaccaagacaggcctgcggccagaccacaggccagaccacaagctgggcgccaagacccagcaccggctgctggtggtgcctgaaaatgaaaataggatggaggaccggctggccgagaccagccgggccaaggaccaccacatctctggagctgaggtgggcaaggccagcacctag

SEQ ID NO: 173007 - DNA, 807 bp, synthetic construct
  misc_feature 1..807: note = Description of Artificial Sequence: Synthetic coding sequence
  source 1..807: mol_type = other DNA
atggaggacttcctgctgagcaatggctaccagctgggcaagaccatcggggagggcacctacagcaaggtgaaggaggccttcagcaagaagcaccagaggaaggtggccatcaaggtgattgacaagatgggcggccctgaggagttcatccagcgcttcctgccccgggagctgcagatcgtgaggaccctggaccacaagaacatcatccaggtgtatgagatgctggagagcgcagatggcaagatctgcctggtgatggagctggccgagggcggagatgtgtttgactgtgtgctgaatggaggccccctgcctgagagccgggccaaggccctcttccggcagatggtggaggccatccgctactgccacggctgcggcgtggcccaccgggacctgaagtgtgaaaatgccctgctgcagggcttcaacctgaagctgacagactttggatttgccaaggtgctgcccaagagccaccgggagctgagccagaccttctgtggcagcacagcctatgctgcccctgaggtgctgcagggcatcccccatgacagcaagaagggagatgtgtggagcatgggcgtggtgctgtatgtgatgctgtgtgccagcctgccctttgatgacacagacatccccaagatgctgtggcagcagcagaagggcgtgtccttccccacccacctgagcatctctgctgactgccaggacctgctgaagaggctgctggagccagacatgatcctgcggcccagcattgaggaggtgtcctggcacccctggctggccagcacctag

SEQ ID NO: 173008 - DNA, 987 bp, synthetic construct
  misc_feature 1..987: note = Description of Artificial Sequence: Synthetic coding sequence
  source 1..987: mol_type = other DNA
atgggcaaaggagatgtgctggaggccgcccccaccaccacagcctaccacagcctgatggatgaatatggctatgaggtgggcaaggccatcggccacggcagctatggctctgtgtatgaggccttctacaccaagcagaaggtgatggtggccgtgaagatcatcagcaagaagaaggccagtgatgactacctgaacaagttcctgccccgggagatccaggtgatgaaggtgctgcggcacaagtacctgatcaacttctaccgggccatcgagagcaccagccgggtgtacatcatcctggagctggcccagggcggagatgtgctggagtggatccagagatatggagcctgcagcgagcccctggccggcaagtggttcagccagctgaccctgggcatcgcctacctgcacagcaagagcatcgtgcaccgggacctgaagctggagaacctgctgctggacaagtgggagaatgtgaagatcagtgactttggatttgccaagatggtgcccagcaaccagcctgtgggctgcagccccagctaccggcaggtgaactgcttcagccacctgagccagacctactgcggcagctttgcctatgcctgcccagagatcctgcggggcctgccctacaaccccttcctgagtgacacctggagcatgggcgtcatcctgtacaccctggtggtggcccacctgccctttgatgacaccaacctgaagaagctgctgcgggagacccagaaggaggtgaccttccctgccaaccacaccatcagccaggagtgcaagaacctgatcctgcagatgctgcggcaggccaccaagagggccaccatcctggacatcatcaaggacagctgggtgctgaagttccagcctgagcagcccacccatgagatccggctgctggaggccatgtgccagctgcacaacaccaccaagcagcaccagagcctgcagatcaccacctag

SEQ ID NO: 173009 - DNA, 1017 bp, synthetic construct
  misc_feature 1..1017: note = Description of Artificial Sequence: Synthetic coding sequence
  source 1..1017: mol_type = other DNA
atgggcaaaggagatgtgctggaggccgcccccaccaccacagcctaccacagcctgatggatgaatatggctatgaggtgggcaaggccatcggccacggcagctatggctctgtgtatgaggccttctacaccaagcagaaggtgatggtggccgtgaagatcatcagcaagaagaaggccagtgatgactacctgaacaagttcctgccccgggagatccaggtgatgaaggtgctgcggcacaagtacctgatcaacttctaccgggccatcgagagcaccagccgggtgtacatcatcctggagctggcccagggcggagatgtgctggagtggatccagagatatggagcctgcagcgagcccctggccggcaagtggttcagccagctgaccctgggcatcgcctacctgcacagcaagagcatcgtgcaccggctgatgcccagcctgtctgctgctggccgggacctgaagctggagaacctgctgctggacaagtgggagaatgtgaagatcagtgactttggatttgccaagatggtgcccagcaaccagcctgtgggctgcagccccagctaccggcaggtgaactgcttcagccacctgagccagacctactgcggcagctttgcctatgcctgcccagagatcctgcggggcctgccctacaaccccttcctgagtgacacctggagcatgggcgtcatcctgtacaccctggtggtggcccacctgccctttgatgacaccaacctgaagaagctgctgcgggagacccagaaggaggtgaccttccctgccaaccacaccatcagccaggagtgcaagaacctgatcctgcagatgctgcggcaggccaccaagagggccaccatcctggacatcatcaaggacagctgggtgctgaagttccagcctgagcagcccacccatgagatccggctgctggaggccatgtgccagctgcacaacaccaccaagcagcaccagagcctgcagatcaccacctag

SEQ ID NO: 173010 - DNA, 759 bp, synthetic construct
  misc_feature 1..759: note = Description of Artificial Sequence: Synthetic coding sequence
  source 1..759: mol_type = other DNA
atgaaggtgctgcggcacaagtacctgatcaacttctaccgggccatcgagagcaccagccgggtgtacatcatcctggagctggcccagggcggagatgtgctggagtggatccagagatatggagcctgcagcgagcccctggccggcaagtggttcagccagctgaccctgggcatcgcctacctgcacagcaagagcatcgtgcaccgggacctgaagctggagaacctgctgctggacaagtgggagaatgtgaagatcagtgactttggatttgccaagatggtgcccagcaaccagcctgtgggctgcagccccagctaccggcaggtgaactgcttcagccacctgagccagacctactgcggcagctttgcctatgcctgcccagagatcctgcggggcctgccctacaaccccttcctgagtgacacctggagcatgggcgtcatcctgtacaccctggtggtggcccacctgccctttgatgacaccaacctgaagaagctgctgcgggagacccagaaggaggtgaccttccctgccaaccacaccatcagccaggagtgcaagaacctgatcctgcagatgctgcggcaggccaccaagagggccaccatcctggacatcatcaaggacagctgggtgctgaagttccagcctgagcagcccacccatgagatccggctgctggaggccatgtgccagctgcacaacaccaccaagcagcaccagagcctgcagatcaccacctag

SEQ ID NO: 173011 - DNA, 822 bp, synthetic construct
  misc_feature 1..822: note = Description of Artificial Sequence: Synthetic coding sequence
  source 1..822: mol_type = other DNA
atgtctggggacaagctgctgtctgagctgggctacaagctgggccgcaccatcggggagggcagctacagcaaggtgaaggtggccaccagcaagaagtacaagggcaccgtggccatcaaggtggtggacagaagaagagcccccccagactttgtgaacaagttcctgccccgggagctgagcatcctgcggggcgtgcgccacccccacatcgtgcacgtgtttgagttcatcgaggtgtgcaatggcaagctgtacatcgtgatggaggccgccgccacagacctgctgcaggccgtgcagagaaatggccgcatccctggggtgcaggcccgggacctgtttgcccagattgctggagctgtgcgctacctgcatgaccaccacctggtgcaccgggacctgaagtgtgaaaatgtgctgctgagcccagatgagcggcgggtgaagctgacagactttggatttggccggcaggcccacggctacccagacctgagcaccacctactgcggcagcgctgcctatgccagccctgaggtgctgctgggcatcccctatgaccccaagaagtatgatgtgtggagcatgggcgtggtgctgtatgtgatggtgacaggctgcatgccctttgatgacagcgacattgctggcctgccccggcggcagaagaggggcgtgctgtacccagagggcctggagctgtctgagcgctgcaaggccctgattgctgagctgctgcagttcagccccagcgcccggcccagcgctggccaggtggccaggaactgctggctgcgggccggggacagcggctag

SEQ ID NO: 173012 - DNA, 822 bp, synthetic construct; identical to SEQ ID NO: 173011
  misc_feature 1..822: note = Description of Artificial Sequence: Synthetic coding sequence
  source 1..822: mol_type = other DNA

SEQ ID NO: 173013 - DNA, 6411 bp, synthetic construct
  misc_feature 1..6411: note = Description of Artificial Sequence: Synthetic coding sequence
  source 1..6411: mol_type = other DNA
atgagccgcagcagacatgcccggcccagccggctggtgaggaaggaggatgtgaacaagaagaagaagaacagccagctgaggaagaccaccaagggggccaacaagaatgtggcctctgtgaagaccctgagccctgggaagctgaagcagctgatccaggagagagatgtgaagaagaagacagagcccaagccccctgtgcctgtgcgcagcctgctgaccagggctggagctgccaggatgaacctggacagaacagaggtgctcttccagaaccctgagagcctgacctgcaatggcttcaccatggccctgcggagcaccagcctgagccggcggctgagccagccccccctggtggtggccaagagcaagaaggtgcccctgagcaagggcctggagaagcagcacgactgtgactacaagatcctgcctgccctgggcgtgaagcacagtgaaaatgattctgtgcccatgcaggacacccaggtgctgcctgacatcgagaccctgattggagtgcagaaccccagcctgctgaagggcaagagccaggagaccacccagttctggagccagagggtggaggacagcaagatcaacatccccacccacagcggccctgctgctgagatcctgcccggccccctggagggcacccgctgtggggagggcctcttcagcgaggagaccctgaatgacaccagcggcagccccaagatgtttgcccaggacacagtgtgtgcccccttcccccagagggccacccccaaggtgaccagccagggcaaccccagcatccagctggaggagctgggcagccgggtggagagcctgaagctgagtgacagctacctggaccccatcaagtcagaacatgactgctaccccaccagcagcctgaacaaggtgatcccagacctgaacctgaggaactgcctggccctgggcggcagcaccagccccaccagcgtcatcaagttcctgctggccggcagcaagcaggccaccctgggcgccaagccagaccaccaggaggcctttgaggccacagccaaccagcaggaggtgtctgacaccaccagcttcctgggccaggcctttggagccatcccccaccagtgggagctgcctggagctgaccctgtgcatggagaggccctgggggagaccccagacctgcctgagatccctggggccatccctgtgcagggcgaggtgtttggcaccatcctggaccagcaggagaccctgggcatgagcggctctgtggtgcctgacctgcccgtcttcctgcctgtgccccccaaccccatcgccaccttcaatgcccccagcaagtggccagagccccagagcacagtgtcctatggcctggccgtgcagggcgccatccagatcctgcccctgggcagcggccacaccccccagagcagcagcaacagcgagaagaacagcctgccccctgtgatggccatcagcaatgtggagaatgagaagcaggtgcacatctccttcctgcctgccaacacccagggcttccccctggcccctgagcggggcctcttccacgccagcctgggcatcgcccagctgagccaggccggccccagcaagagtgaccggggcagcagccaggtgtctgtgaccagcacagtgcacgtggtgaacaccaccgtggtgaccatgcctgtgcccatggtgtccaccagcagcagcagctacaccaccctgctgcccaccctggagaagaagaagaggaagagatgtggggtgtgtgagccctgccagcagaagaccaactgtggagaatgtacctactgcaagaacaggaagaacagccaccagatctgcaagaagaggaaatgtgaggagctgaagaagaagcccagcgtggtggtgcccctggaggtgatcaaggagaacaagaggccccagcgggagaagaagcccaaggtgctgaaggctgactttgacaacaagcctgtgaatggccccaagtctgagagcatggactacagccgctgtggccatggagaggagcagaagctggagctgaacccccacacagtggagaatgtgaccaagaatgaagattccatgactggaattgaggtggagaagtggacccagaacaagaagagccagctgacagaccacgtgaagggggacttcagcgccaacgtgcctgaggccgagaagagcaagaacagcgaggtggacaagaagaggaccaagagccccaagctgtttgtgcagacagtgagaaatggcatcaagcacgtgcactgcctgcctgctgagaccaacgtgtccttcaagaagttcaacatcgaggagtttgggaagaccctggagaacaacagctacaagttcctgaaggacacagccaaccacaagaatgccatgagctctgtggccacagacatgagctgtgaccacctgaagggccgcagcaatgtgctggtgttccagcagcccggcttcaactgcagcagcatcccccacagcagccacagcatcatcaaccaccacgccagcatccacaatgaaggagaccagcccaagaccccagagaacatccccagcaaggagcccaaggatggcagccctgtgcagcccagcctgctgagcctgatgaaggaccggcggctgaccctggagcaggtggtggccatcgaggccctgacccagctgtctgaggcccccagcgagaacagcagccccagcaagtctgagaaggatgaggagagcgagcagaggacagccagcctgctgaacagctgcaaggccatcctgtacacagtgaggaaggacctgcaggaccccaacctgcagggcgagccccccaagctgaaccactgccccagcctggagaagcagagcagctgcaacacagtggtgttcaacggccagaccaccaccctgagcaacagccacatcaacagcgccaccaaccaggccagcaccaagagccatgagtacagcaaggtgaccaacagcctgagcctcttcatccccaagagcaacagcagcaagattgacaccaacaagagcatcgcccagggcatcatcaccctggacaactgcagcaatgacctgcaccagctgcccccaagaaataatgaggtggagtactgcaaccagctgctggacagcagcaagaagctggacagtgatgacctgagctgccaggatgccacccacacccagattgaagaagatgtggccacccagctgacccagctggccagcatcatcaagatcaactacatcaagccagaggacaagaaggtggagagcacccccaccagcctggtgacctgcaatgtgcagcagaagtacaaccaggagaagggcaccatccagcagaagccacccagctctgtgcacaacaaccacggcagcagcctgaccaagcagaagaaccccacccagaagaagaccaagagcacccccagccgggacaggaggaagaagaagcccaccgtggtgtcctaccaggagaatgaccggcagaagtgggagaagctgagctacatgtatggcaccatctgtgacatctggatcgccagcaagttccagaactttggccagttctgcccccatgacttccccaccgtgtttgggaagatcagcagcagcaccaagatctggaagcccctggcccagaccaggagcatcatgcagcccaagacagtgtttcctcccctgacccagatcaagctgcagcgctacccagagagcgctgaggagaaggtgaaggtggagcccctggacagcctgagcctcttccacctgaagacagagagcaatggcaaggccttcacagacaaggcctacaacagccaggtgcagctgactgtgaatgccaaccagaaggcccaccccctgacccagcccagcagcccccccaaccagtgtgccaacgtgatggctggagatgaccagatccgcttccagcaggtggtgaaggagcagctgatgcaccagaggctgcccaccctgcccggcatcagccatgagacccccctgcctgagagcgccctgaccctgagaaatgtgaatgtggtgtgcagcggcggcatcaccgtggtgtccaccaagtctgaggaggaggtgtgcagcagcagctttggcaccagcgagttcagcacagtggacagcgcccagaagaacttcaatgactatgccatgaacttcttcaccaaccccaccaagaacctggtgtccatcaccaaggacagcgagctgcccacctgcagctgcctggacagagtcatccagaaggacaagggcccctactacacccacctgggcgccggccccagcgtggccgctgtgcgggagatcatggagaacagatatggccagaagggaaatgccatccgcatcgagatcgtggtgtacaccgggaaggagggcaagagcagccacggctgccccatcgccaagtgggtgctgcggcgcagcagtgatgaggagaaggtgctgtgcctggtgcggcagaggacaggccaccactgccccacagctgtgatggtggtgctgatcatggtgtgggatggcatccccctgcccatggctgaccggctgtacacagagctgacagagaacctgaagagctacaacggccaccccacagaccggcgctgcaccctgaatgaaaatagaacctgcacctgccagggcatcgaccctgagacctgtggggccagcttctcctttggctgctcctggagcatgtacttcaacggctgcaagtttggccgcagccccagcccccggcgcttcagaattgaccccagcagccccctgcacgagaagaacctggaggacaacctgcagagcctggccacccggctggcccccatctacaagcagtatgcccctgtggcctaccagaaccaggtggagtatgaaaatgtggccagagaatgtcggctgggcagcaaggagggccggcccttctctggagtgacagcctgcctggacttctgtgcccacccccaccgggacatccacaacatgaacaacggcagcacagtggtgtgcaccctgacccgggaggacaacagaagcctgggcgtcatcccccaggatgagcagctgcacgtgctgcccctgtacaagctgagtgacacagatgaatttggcagcaaggagggcatggaggccaagatcaagagcggggccatcgaggtgctggcccccaggaggaagaagaggacctgcttcacccagcctgtgcccaggtctgggaagaagagagctgccatgatgacagaggtgctggcccacaagatccgggctgtggagaagaagcccatcccccgcatcaagaggaagaacaacagcaccaccaccaacaacagcaagcccagcagcctgcccaccctgggcagcaacacagaaacagtgcagcctgaggtgaagtcagaaacagagccccacttcatcctgaagagcagtgacaacaccaagacctacagcctgatgcccagcgccccccaccctgtgaaggaggccagccctggcttctcctggagccccaagacagccagcgccaccccagcccccctgaagaatgatgccacagccagctgtggcttcagcgagaggagcagcaccccccactgcaccatgcccagcggccgcctgagcggggccaatgctgctgctgctgatggccctggcatcagccagctgggggaggtggcccccctgcccaccctgagcgcccctgtgatggagcccctcatcaacagcgagcccagcactggagtgacagagcccctgaccccccaccagcccaaccaccagcccagcttcctgaccagcccccaggacctggccagcagccccatggaggaggatgagcagcacagcgaggctgatgagcccccatctgatgagcccctgagtgatgaccccctgagccctgctgaggagaagctgccccacattgatgagtactggagcgacagcgagcacatcttcctggatgccaacatcggcggcgtggccatcgccccagcccacggctctgtgctgattgaatgtgcccggcgggagctgcacgccaccacccctgtggagcaccccaacagaaaccaccccacccggctgagcctggtgttctaccagcacaagaacctgaacaagccccagcacggctttgagctgaacaagatcaagtttgaggccaaggaggccaagaacaagaagatgaaggccagcgagcagaaggaccaggccgccaatgaaggacctgagcagagcagcgaggtgaatgagctgaaccagatccccagccacaaggccctgaccctgacccatgacaacgtggtgacagtgagcccctatgccctgacccacgtggccggcccctacaaccactgggtgtag

SEQ ID NO: 173014 - DNA, 330 bp, synthetic construct
  misc_feature 1..330: note = Description of Artificial Sequence: Synthetic coding sequence
  source 1..330: mol_type = other DNA
atggctgaccggctgtacacagagctgacagagaacctgaagagctacaacggccaccccacagaccggcgctgcaccctgaatgaaaatagaacctgcacctgccagggcatcgaccctgagacctgtggggccagcttctcctttggctgctcctggagcatgtacttcaacggctgcaagtttggccgcagccccagcccccggcgcttcagaattgaccccagcagccccctgcacacctactatgagcgcatcaccaagggcaggaaccctgagcggcgctacatgaagccagagcgcatcagccctggccacgaggccatgtag

SEQ ID NO: 173015 - DNA, 726 bp, synthetic construct
  misc_feature 1..726: note = Description of Artificial Sequence: Synthetic coding sequence
  source 1..726: mol_type = other DNA
atgcagtgcttctccttcatcaagaccatgatgatcctcttcaacctgctgatcttcctgtgtggggccgccctgctggccgtgggcatctgggtgtccattgatggagccagcttcctgaagatcttcggccccctgagcagcagcgccatgcagtttgtgaatgtgggctacttcctgattgctgctggggtggtggtgtttgccctgggcttcctgggctgctacggggccaagacagagagcaaatgtgccctggtgaccttcttcttcatcctgctgctgatcttcatcgccgaggtggccgctgctgtggtggccctggtgtacaccaccatggccgagcacttcctgaccctgctggtggtgcctgccatcaagaaggactatggcagccaggaggacttcacccaggtgtggaacaccaccatgaagggcctgaagtgctgcggcttcaccaactacacagactttgaggacagcccctacttcaaggagaacagcgccttcccccccttctgctgcaatgacaacgtgaccaacacagccaatgagacctgcaccaagcagaaggcccatgaccagaaggtggagggctgcttcaaccagctgctgtatgacatccgcaccaatgctgtgacagtgggcggcgtggccgccggcatcggcggcctggagctggccgccatgattgtgtccatgtacctgtactgcaacctgcagtag

SEQ ID NO: 173016 - DNA, 702 bp, synthetic construct
  misc_feature 1..702: note = Description of Artificial Sequence: Synthetic coding sequence
  source 1..702: mol_type = other DNA
atgagcagctactttgtgaaccccaccttccctggcagcctgcccagcggccaggacagcttcctgggccagctgcccctgtaccaggccggctatgatgccctgcggcccttccctgccagctatggagccagcagcctgcctgacaagacctacaccagcccctgcttctaccagcagagcaacagcgtgctggcctgcaacagagccagctatgaatatggagccagctgcttctacagcgacaaggacctgagcggggccagccccagcggcagcggcaagcagaggggccctggggactacctgcacttcagccctgagcagcagtacaagccagacagcagcagcggccagggcaaggccctgcatgatgaaggagctgacaggaagtacaccagccctgtgtacccctggatgcagaggatgaacagctgtgccggggctgtgtatggcagccacggccggcggggccggcagacctacacccgctaccagaccctggagctggagaaggagttccacttcaaccgctacctgaccaggagaagacgcatcgagatcgccaatgccctgtgcctgacagagcggcagatcaagatctggttccagaacagaaggatgaagtggaagaaggagaacaagctgatcaacagcacccagcccagcggagaagattctgaggccaaggccggggagtag

SEQ ID NO: 173017 - DNA, 918 bp, synthetic construct; identical to SEQ ID NO: 155476
  misc_feature 1..918: note = Description of Artificial Sequence: Synthetic coding sequence
  source 1..918: mol_type = other DNA

SEQ ID NO: 173018 - DNA, 339 bp, synthetic construct
  misc_feature 1..339: note = Description of Artificial Sequence: Synthetic coding sequence
  source 1..339: mol_type = other DNA
atggcccgggaggacagcgtgaagtgcctgcgctgcctgctgtatgccctgaacctgctcttctggctgatgagcatctctgtgctggccgtgtctgcctggatgagggactacctgaacaacgtgctgaccctgacagctgagaccagggtggaggaggccgtcatcctgacctacttccctgtggtgcaccctgtgatgattgctgtgtgctgcttcctgatcatcgtgggcatgctgggctactgcggcaccgtgaagaggaacctgctgctgctggcctggtacttcggcagcctgctggtgatcttctgtgtggagctggcctgtggggtgtag

SEQ ID NO: 173019 - DNA, 288 bp, synthetic construct
  misc_feature 1..288: note = Description of Artificial Sequence: Synthetic coding sequence
  source 1..288: mol_type = other DNA
atggcccgggaggacagcgtgaagtgcctgcgctgcctgctgtatgccctgaacctgctcttctggctgatgagcatctctgtgctggccgtgtctgcctggatgagggactacctgaacaacgtgctgaccctgacagctgagaccagggtggaggaggccgtcatcctgacctacttccctgtggtgcaccctgtgatgattgctgtgtgctgcttcctgatcatcgtgggcatgctgggctactgcggcaccgtgaagaggaacctgctgctgctggcctggtag

SEQ ID NO: 173020 - DNA, 363 bp, synthetic construct
  misc_feature 1..363: note = Description of Artificial Sequence: Synthetic coding sequence
  source 1..363: mol_type = other DNA
atggcccgggaggacagcgtgaagtgcctgcgctgcctgctgtatgccctgaacctgctcttctggctgatgagcatctctgtgctggccgtgtctgcctggatgagggactacctgaacaacgtgctgaccctgacagctgagaccagggtggaggaggccgtcatcctgacctacttccctgtggtgcaccctgtgatgattgctgtgtgctgcttcctgatcatcgtgggcatgctgggctactgcggcaccgtgaagaggaacctgctgctgctggcctggtacttcggcagcctgctggtgatcttctgtgtggagctggcctgtggggtgtggacctatgagcaggagctgatgtag

SEQ ID NO: 173021 - DNA, 444 bp, synthetic construct
  misc_feature 1..444: note = Description of Artificial Sequence: Synthetic coding sequence
  source 1..444: mol_type = other DNA
atggcccgggaggacagcgtgaagtgcctgcgctgcctgctgtatgccctgaacctgctcttctggctgatgagcatctctgtgctggccgtgtctgcctggatgagggactacctgaacaacgtgctgaccctgacagctgagaccagggtggaggaggccgtcatcctgacctacttccctgtggtgcaccctgtgatgattgctgtgtgctgcttcctgatcatcgtgggcatgctgggctactgcggcaccgtgaagaggaacctgctgctgctggcctggtacttcggcagcctgctggtgatcttctgtgtggagctggcctgtggggtgtggacctatgagcaggagctgatggtgcctgtgcagtggagcgacatggtgaccctgaaggccaggatgaccaactacggcctgccccgctaccgctggctgacctag

SEQ ID NO: 173022 - DNA, 885 bp, synthetic construct
  misc_feature 1..885: note = Description of Artificial Sequence: Synthetic coding sequence
  source 1..885: mol_type = other DNA
atgcccaggggggacagcgagcaggtgcgctactgtgcccgcttctcctacctgtggctgaagttcagcctcatcatctacagcacagtgttctggctgattggagccctggtgctgtctgtgggcatctatgcagaggtggagcggcagaagtacaagaccctggagagcgccttcctggccccagccatcatcctgatcctgctgggcgtggtgatgttcatggtgtccttcatcggcgtgctggccagcctgcgggacaacctgtacctgctgcaggccttcatgtacatcctgggcatctgcctgatcatggagctgattggaggagtggtggccctgaccttcaggaaccagaccatcgacttcctgaatgacaacatcagaagaggaattgagaactactatgatgacctggacttcaagaacatcatggactttgtgcagaagaagttcaagtgctgcggcggggaggactacagagactggagcaagaaccagtaccatgactgcagcgcccctggccccctggcctgtggggtgccctacacctgctgcatccggaacaccacagaggtggtgaacaccatgtgtggctacaagaccatcgacaaggagcgcttctctgtgcaggacgtcatctacgtgcggggctgcaccaatgctgtgatcatctggttcatggacaactacaccatcatggccggcatcctgctgggcatcctgctgccccagttcctgggcgtgctgctgaccctgctgtacatcaccagggtggaggacatcatcatggagcacagcgtgacagatggcctgctgggccctggggccaagcccagcgtggaggccgccggcaccggctgctgcctgtgctaccccaactag

SEQ ID NO: 173023 - DNA, 582 bp, synthetic construct
  misc_feature 1..582: note = Description of Artificial Sequence: Synthetic coding sequence
  source 1..582: mol_type = other DNA
atgggccgcttccggggcggcctgcgctgcatcaagtacctgctgctgggcttcaacctgctcttctggctggccggcagcgctgtgattgccttcggcctgtggttccgctttggaggagccatcaaggagctgagcagcgaggacaagagccctgagtacttctacgtgggcctgtatgtgctggtgggcgctggggccctgatgatggctgtgggcttcttcggctgctgcggggccatgagggagagccagtgtgtgctgggcagcttcttcacctgcctgctggtgatctttgctgctgaggtgaccactggagtgtttgccttcatcggcaaaggagtggccatcagacatgtgcagaccatgtatgaggaggcctacaatgactacctgaaggaccggggcaaaggaaatggcaccctcatcaccttccacagcaccttccagtgctgcggcaaggagagcagcgagcaggtgcagcccacctgccccaaggagctgctgggccacaagatcttcggcatgatcttctccatggtgctgtgctgtgccatccggaacagcagagatgtgatctag

SEQ ID NO: 173024 - DNA, 591 bp, synthetic construct
  misc_feature 1..591: note = Description of Artificial Sequence: Synthetic coding sequence
  source 1..591: mol_type = other DNA
atgggccgcttccggggcggcctgcgctgcatcaagtacctgctgctgggcttcaacctgctcttctggctggccggcagcgctgtgattgccttcggcctgtggttccgctttggaggagccatcaaggagctgagcagcgaggacaagagccctgagtacttctacgtgggcctgtatgtgctggtgggcgctggggccctgatgatggctgtgggcttcttcggctgctgcggggccatgagggagagccagtgtgtgctgggcagcgccatccgccacgtgcagaccatgtatgaggaggcctacaatgactacctgaaggaccggggcaaaggaaatggcaccctcatcaccttccacagcaccttccagtgctgcggcaaggagagcagcgagcaggtgcagcccacctgccccaaggagctgctgggccacaagaactgcattgatgaaattgagaccatcatctctgtgaagctgcagctgattggcatcgtgggcattggaattgctggcctgaccatcttcggcatgatcttctccatggtgctgtgctgtgccatccggaacagcagagatgtgatctag

SEQ ID NO: 173025 - DNA, 666 bp, synthetic construct
  misc_feature 1..666: note = Description of Artificial Sequence: Synthetic coding sequence
  source 1..666: mol_type = other DNA
atgggccgcttccggggcggcctgcgctgcatcaagtacctgctgctgggcttcaacctgctcttctggctggccggcagcgctgtgattgccttcggcctgtggttccgctttggaggagccatcaaggagctgagcagcgaggacaagagccctgagtacttctacgtgggcctgtatgtgctggtgggcgctggggccctgatgatggctgtgggcttcttcggctgctgcggggccatgagggagagccagtgtgtgctgggcagcttcttcacctgcctgctggtgatctttgctgctgaggtgaccactggagtgtttgccttcatcggcaaaggagtggccatcagacatgtgcagaccatgtatgaggaggcctacaatgactacctgaaggaccggggcaaaggaaatggcaccctcatcaccttccacagcaccttccagtgctgcggcaaggagagcagcgagcaggtgcagcccacctgccccaaggagctgctgggccacaagaactgcattgatgaaattgagaccatcatctctgtgaagctgcagctgattggaattgtgggcatcggcattgctggcctgaccatcttcggcatgatcttctccatggtgctgtgctgtgccatccggaacagcagagatgtgatctag

SEQ ID NO: 173026 - DNA, 564 bp, synthetic construct
  misc_feature 1..564: note = Description of Artificial Sequence: Synthetic coding sequence
  source 1..564: mol_type = other DNA
ggcctgcgctgcatcaagtacctgctgctgggcttcaacctgctcttctggctggccggcagcgctgtgattgccttcggcctgtggttccgctttggaggagccatcaaggagctgagcagcgaggacaagagccctgagtacttctacgtgggcctgtatgtgctggtgggcgctggggccctgatgatggctgtgggcttcttcggctgctgcggggccatgagggagagccagtgtgtgctgggcagcttcttcacctgcctgctggtgatctttgctgctgaggtgaccactggagtgtttgccttcatcggcaaaggagtggccatcagacatgtgcagaccatgtatgaggaggcctacaatgactacctgaaggaccggggcaaaggaaatggcaccctcatcaccttccacagcaccttccagtgctgcggcaaggagagcagcgagcaggtgcagcccacctgccccaaggagctgctgggccacaagatcttcggcatgatcttctccatggtgctgtgctgtgccatccggaacagcagagatgtgatctag

SEQ ID NO: 173027 - DNA, 762 bp, synthetic construct
  misc_feature 1..762: note = Description of Artificial Sequence: Synthetic coding sequence
  source 1..762: mol_type = other DNA
atgggccagtgtggcatcaccagcagcaagacagtgctggtgttcctgaacctgatcttctggggcgccgccggcatcctgtgctacgtgggcgcctacgtgttcatcacctatgatgattatgaccacttctttgaagatgtgtacaccctcatcccagctgtggtgatcatcgctgtgggcgccctgctcttcatcatcggcctcatcggctgctgtgccaccatccgggagagccgctgtggcctggccaccttcgtcatcatcctgctgctggtgtttgtgacagaggtggtggtggtggtgctgggctacgtgtaccgggccaaggtggagaatgaggtggacaggagcatccagaaggtgtacaagacctacaacggcaccaacccagatgctgccagccgggccatcgactatgtgcagaggcagctgcactgctgcggcatccacaactacagcgactgggagaacacagactggttcaaggagaccaagaaccagagcgtgcccctgagctgctgccgggagacagccagcaactgcaatggcagcctggcccaccccagcgacctgtatgcagagggctgtgaggccctggtggtgaagaagctgcaggagatcatgatgcacgtgatctgggccgccctggcctttgctgccatccagctgctgggcatgctgtgtgcctgcatcgtgctgtgccgccgcagccgggaccctgcctatgagctgctgatcaccggcggcacctacgcctag

SEQ ID NO: 173028 - DNA, 687 bp, synthetic construct
  misc_feature 1..687: note = Description of Artificial Sequence: Synthetic coding sequence
  source 1..687: mol_type = other DNA
atgggccagtgtggcatcaccagcagcaagacagtgctggtgttcctgaacctgatcttctggggcgccgccggcatcctgtgctacgtgggcgcctacgtgttcatcacctatgatgattatgaccacttctttgaagatgtgtacaccctcatcccagctgtggtgatcatcgctgtgggcgccctgctcttcatcatcggcctcatcggctgctgtgccaccatccgggagagccgctgtggcctggccaccgtggagaatgaggtggacaggagcatccagaaggtgtacaagacctacaacggcaccaacccagatgctgccagccgggccattgattatgtgcagaggcagctgcactgctgcggcatccacaactacagcgactgggagaacacagactggttcaaggagaccaagaaccagagcgtgcccctgagctgctgccgggagacagccagcaactgcaatggcagcctggcccaccccagcgacctgtatgcagagggctgtgaggccctggtggtgaagaagctgcaggagatcatgatgcacgtgatctgggccgccctggcctttgctgccatccagctgctgggcatgctgtgtgcctgcatcgtgctgtgcagaagaagccgggaccctgcctatgagctgctgatcactggaggcacctacgcctag

SEQ ID NO: 173029 - DNA, 651 bp, synthetic construct
  misc_feature 1..651: note = Description of Artificial Sequence: Synthetic coding sequence
  source 1..651: mol_type = other DNA
atgtgggagcccatgagcagcagcctgatgatgaccatgaccaccagcctgaagatgtgcaccaggagcagcctgctcttcatcatcggcctcatcggctgctgtgccaccatccgggagagccgctgtggcctggccaccttcgtcatcatcctgctgctggtgtttgtgacagaggtggtggtggtggtgctgggctacgtgtaccgggccaaggtggagaatgaggtggacaggagcatccagaaggtgtacaagacctacaacggcaccaacccagatgctgccagccgggccatcgactatgtgcagaggcagctgcactgctgcggcatccacaactacagcgactgggagaacacagactggttcaaggagaccaagaaccagagcgtgcccctgagctgctgccgggagacagccagcaactgcaatggcagcctggcccaccccagcgacctgtatgcagagggctgtgaggccctggtggtgaagaagctgcaggagatcatgatgcacgtgatctgggccgccctggcctttgctgccatccagcagctgctgggcatgctgtgtgcctgcatcgtgctgtgcagaagaagccgggaccctgcctatgagctgctgatcactggaggcacctacgcctag

SEQ ID NO: 173030 - DNA, 570 bp, synthetic construct
  misc_feature 1..570: note = Description of Artificial Sequence: Synthetic coding sequence
  source 1..570: mol_type = other DNA
atgggccagtgtggcatcaccagcagcaagacagtgctggtgttcctgaacctgatcttctggtttgtgatcatcctgctgctggtgtttgtgacagaggtggtggtggtggtgctgggctacgtgtaccgggccaaggtggagaatgaggtggacaggagcatccagaaggtgtacaagacctacaacggcaccaacccagatgctgccagccgggccatcgactatgtgcagaggcagctgcactgctgcggcatccacaactacagcgactgggagaacacagactggttcaaggagaccaagaaccagagcgtgcccctgagctgctgccgggagacagccagcaactgcaatggcagcctggcccaccccagcgacctgtatgcagagggctgtgaggccctggtggtgaagaagctgcaggagatcatgatgcacgtgatctgggccgccctggcctttgctgccatccagctgctgggcatgctgtgtgcctgcatcgtgctgtgccgccgcagccgggaccctgcctatgagctgctgatcaccggcggcacctacgcctag

SEQ ID NO: 173031 - DNA, 633 bp, synthetic construct
  misc_feature 1..633: note = Description of Artificial Sequence: Synthetic coding sequence
  source 1..633: mol_type = other DNA
atggtgtgtggcggctttgcctgcagcaagaatgccctgtgtgccctgaatgtggtgtacatgctggtgtccctgctgctgattggagtggccgcctggggcaagggcctgggcctggtgagcagcatccacatcatcggcggcgtgattgctgtgggcgtcttcctgctgctgattgctgtggccggcctggtgggcgctgtgaaccaccaccaggtgctgctcttcttctacatgatcatcctgggcctggtgttcatcttccagtttgtgatcagctgcagctgcctggccatcaacagaagcaagcagacagatgtgatcaatgcctcctggtgggtgatgagcaacaagaccagagatgagctggagaggagctttgactgctgcggcctcttcaacctgaccaccctgtaccagcaggactatgacttctgcacagccatctgcaagagccagagccccacctgccagatgtgtggggagaagttcctgaagcacagtgatgaggccctgaagatcctgggcggcgtgggcctcttcttctccttcacagagatcctgggcgtgtggctggccatgaggttcaggaaccagaaggacccccgggccaaccccagcgccttcctgtag

SEQ ID NO: 173032 - DNA, 963 bp, synthetic construct
  misc_feature 1..963: note = Description of Artificial Sequence: Synthetic coding sequence
  source 1..963: mol_type = other DNA
atgggcccctggagccgggtgcgggtggccaagtgccagatgctggtgacctgcttcttcatcctgctgctgggcctgtctgtggccaccatggtgaccctgacctactttggagcccactttgctgtgatcagaagagccagcctggagaagaacccctaccaggccgtgcaccagtgggccttctctgctggcctgagcctggtgggcctgctgaccctgggcgctgtgctgtctgctgctgccaccgtgcgggaggcccagggcctgatggccggcggcttcctgtgcttcagcctggccttctgtgcccaggtgcaggtggtgttctggaggctgcacagccccacccaggtggaggatgccatgctggacacctatgacctggtgtatgagcaggccatgaagggcaccagccacgtgcggcggcaggagctggccgccatccaggatgtgttcctgtgctgcggcaagaagagccccttcagccggctgggcagcacagaggccgacctgtgccagggcgaggaggccgcccgggaggactgcctgcagggcatccgctccttcctgcggacccaccagcaggtggccagcagcctgaccagcatcggcctggccctgactgtgtctgccctgctcttcagcagcttcctgtggtttgccatccgctgtggctgcagcctggacaggaagggcaagtacaccctgaccccccgggcctgtggccggcagccccaggagcccagcctgctgcgctgcagccagggcggccccacccactgcctgcacagcgaggccgtggccatcggcccccggggctgcagcggcagcctgcgctggctgcaggagagtgatgctgcccccctgcccctgagctgccacctggccgcccaccgggccctgcagggccgcagccggggcggcctgagcggctgcccagagcggggcctgagtgactag

SEQ ID NO: 173033 - DNA, 762 bp, synthetic construct
  misc_feature 1..762: note = Description of Artificial Sequence: Synthetic coding sequence
  source 1..762: mol_type = other DNA
atgggcccctggagccgggtgcgggtggccaagtgccagatgctggtgacctgcttcttcatcctgctgctgggcctgtctgtggccaccatggtgaccctgacctactttggagcccactttgctgtgatcagaagagccagcctggagaagaacccctaccaggccgtgcaccagtgggccttctctgctggcctgagcctggtgggcctgctgaccctgggcgctgtgctgtctgctgctgccaccgtgcgggaggcccagggcctgatggccggcggcttcctgtgcttcagcctggccttctgtgcccaggtgcaggtggtgttctggaggctgcacagccccacccaggtggaggatgccatgctggacacctatgacctggtgtatgagcaggccatgaagggcaccagccacgtgcggcggcaggagctggccgccatccaggatgtgttcctgtgctgcggcaagaagagccccttcagccggctgggcagcacagaggccgacctgtgccagggcgaggaggccgcccgggaggactgcctgcagggcatccgctccttcctgcggacccaccagcaggtggccagcagcctgaccagcatcggcctggccctgactgtgtctgccctgctcttcagcagcttcctgtggtttgccatccgctgtggctgcagcctggacaggaagggcaagtacaccctgacccccaggagccctggccagaagagccgctgggcccagtgggtgccctag

SEQ ID NO: 173034 - DNA, 525 bp, synthetic construct
  misc_feature 1..525: note = Description of Artificial Sequence: Synthetic coding sequence
  source 1..525: mol_type = other DNA
atggccatcggctttgtgggctgcctgggcgccatcaaggagaacaagtgcctgctgctgaccttcttcctgctgctgctgctggtgttcctgctggaggccaccatcgccatcctcttctttgcctacacagacaagattgacagatatgcccagcaggacctgaagaagggcctgcacctgtatggcacccagggcaatgtgggcctgaccaatgcctggagcatcatccagacagacttccgctgctgcggcgtgagcaactacacagactggtttgaggtgtacaatgccaccagggtgcctgacagctgctgcctggagttcagcgagagctgtggcctgcacgcccctggcacctggtggaaggccccctgctatgaaacagtgaaggtgtggctgcaggagaacctgctggccgtgggcatcttcggcctgtgcacagccctggtgcagatcctgggcctgacctttgccatgaccatgtactgccaggtggtgaaggctgacacctactgtgcctag

SEQ ID NO: 173035 - DNA, 717 bp, synthetic construct
  misc_feature 1..717: note = Description of Artificial Sequence: Synthetic coding sequence
  source 1..717: mol_type = other DNA
atggcccgggcctgcctgcaggccgtgaagtacctgatgtttgccttcaacctgctcttctggctgggcggctgcggcgtgctgggcgtgggcatctggctggccgccacccagggcagctttgccaccctgagcagcagcttccccagcctgtctgctgccaacctgctgatcatcaccggggcctttgtgatggccatcggctttgtgggctgcctgggcgccatcaaggagaacaagtgcctgctgctgaccttcttcctgctgctgctgctggtgttcctgctggaggccaccatcgccatcctcttctttgcctacacagacaagattgacagatatgcccagcaggacctgaagaagggcctgcacctgtatggcacccagggcaatgtgggcctgaccaatgcctggagcatcatccagacagacttccgctgctgcggcgtgagcaactacacagactggtttgaggtgtacaatgccaccagggtgcctgacagctgctgcctggagttcagcgagagctgtggcctgcacgcccctggcacctggtggaaggccccctgctatgaaacagtgaaggtgtggctgcaggagaacctgctggccgtgggcatcttcggcctgtgcacagccctggtgcagatcctgggcctgacctttgccatgaccatgtactgccaggtggtgaaggctgacacctactgtgcctag

SEQ ID NO: 173036 - DNA, 717 bp, synthetic construct; identical to SEQ ID NO: 173035
  misc_feature 1..717: note = Description of Artificial Sequence: Synthetic coding sequence
  source 1..717: mol_type = other DNA

SEQ ID NO: 173037 - DNA, 717 bp, synthetic construct; identical to SEQ ID NO: 173035
  misc_feature 1..717: note = Description of Artificial Sequence: Synthetic coding sequence
  source 1..717: mol_type = other DNA

SEQ ID NO: 173038 - DNA, 717 bp, synthetic construct; identical to SEQ ID NO: 173035
  misc_feature 1..717: note = Description of Artificial Sequence: Synthetic coding sequence
  source 1..717: mol_type = other DNA

SEQ ID NO: 173039 - DNA, 717 bp, synthetic construct; identical to SEQ ID NO: 173035
  misc_feature 1..717: note = Description of Artificial Sequence: Synthetic coding sequence
  source 1..717: mol_type = other DNA

SEQ ID NO: 173040 - DNA, 774 bp, synthetic construct
  misc_feature 1..774: note = Description of Artificial Sequence: Synthetic coding sequence
  source 1..774: mol_type = other DNA
atgacccccaggtctgctggcaccagcgcccatggagctgagctgaagagatgtggcatggcccgggcctgcctgcaggccgtgaagtacctgatgtttgccttcaacctgctcttctggctgggcggctgcggcgtgctgggcgtgggcatctggctggccgccacccagggcagctttgccaccctgagcagcagcttccccagcctgtctgctgccaacctgctgatcatcactggagcctttgtgatggccatcggctttgtgggctgcctgggcgccatcaaggagaacaagtgcctgctgctgaccttcttcctgctgctgctgctggtgttcctgctggaggccaccatcgccatcctcttctttgcctacacagacaagattgacagatatgcccagcaggacctgaagaagggcctgcacctgtatggcacccagggcaatgtgggcctgaccaatgcctggagcatcatccagacagacttccgctgctgcggcgtgagcaactacacagactggtttgaggtgtacaatgccaccagggtgcctgacagctgctgcctggagttcagcgagagctgtggcctgcacgcccctggcacctggtggaaggccccctgctatgagaccgtgaaggtgtggctgcaggagaacctgctggccgtgggcatcttcggcctgtgcacagccctggtgcagatcctgggcctgacctttgccatgaccatgtactgccaggtggtgaaggctgacacctactgtgcctag

SEQ ID NO: 173041 - DNA, 717 bp, synthetic construct; identical to SEQ ID NO: 173035
  misc_feature 1..717: note = Description of Artificial Sequence: Synthetic coding sequence
  source 1..717: mol_type = other DNA

SEQ ID NO: 173042 - DNA, 525 bp, synthetic construct; identical to SEQ ID NO: 173034
  misc_feature 1..525: note = Description of Artificial Sequence: Synthetic coding sequence
  source 1..525: mol_type = other DNA

SEQ ID NO: 173043 - DNA, 303 bp, synthetic construct
  misc_feature 1..303: note = Description of Artificial Sequence: Synthetic coding sequence
  source 1..303: mol_type = other DNA
atggccatcggctttgtgggctgcctgggcgccatcaaggagaacaagtgcctgctgctgaccttcttcctgctgctgctgctggtgttcctgctggaggccaccatcgccatcctcttctttgcctacacagacaagattgacagatatgcccagcaggacctgaagaagggcctgcacctgtatggcacccagggcaatgtgggcctgaccaatgcctggagcatcatccagacagacttccgctgctgcggcgtgagcaactacacagactggtttgaggtgtacaatgccaccaggtag

SEQ ID NO: 173044 - DNA, 480 bp, synthetic construct
  misc_feature 1..480: note = Description of Artificial Sequence: Synthetic coding sequence
  source 1..480: mol_type = other DNA
atggcccgggcctgcctgcaggccgtgaagtacctgatgtttgccttcaacctgctcttctggctgggcggctgcggcgtgctgggcgtgggcatctggctggccgccacccagggcagctttgccaccctgagcagcagcttccccagcctgtctgctgccaacctgctgatcatcaccggggcctttgtgatggccatcggctttgtgggctgcctgggcgccatcaaggagaacaagtgcctgctgctgaccttcttcctgctgctgctgctggtgttcctgctggaggccaccatcgccatcctcttctttgcctacacagacaagattgacagatatgcccagcaggacctgaagaagggcctgcacctgtatggcacccagggcaatgtgggcctgaccaatgcctggagcatcatccagacagacttccgctgctgcggcgtgagcaactacacagactggtttgaggtgtag

SEQ ID NO: 173045 - DNA, 258 bp, synthetic construct
  misc_feature 1..258: note = Description of Artificial Sequence: Synthetic coding sequence
  source 1..258: mol_type = other DNA
atggcccgggcctgcctgcaggccgtgaagtacctgatgtttgccttcaacctgctcttctggctgggcggctgcggcgtgctgggcgtgggcatctggctggccgccacccagggcagctttgccaccctgagcagcagcttccccagcctgtctgctgccaacctgctgatcatcaccggggcctttgtgatggccatcggctttgtgggctgcctgggcgccatcaaggagaacaagtgcctgctgctgacctag

SEQ ID NO: 173046 - DNA, 807 bp, synthetic construct
  misc_feature 1..807: note = Description of Artificial Sequence: Synthetic coding sequence
  source 1..807: mol_type = other DNA
atgtctgggaagcactacaagggccctgaggtgtcctgctgcatcaagtacttcatcttcggcttcaacgtcatcttctggttcctgggcatcaccttcctgggcatcggcctgtgggcctggaatgagaagggcgtgctgagcaacatcagcagcatcacagacctgggcggctttgatcctgtgtggctgttcctggtggtgggcggcgtgatgttcatcctgggctttgctggctgcattggagccctgcgggagaacaccttcctgctgaagttcttctctgtgttcctgggcatcatcttcttcctggagctgacagctggggtgctggcctttgtgttcaaggactggatcaaggaccagctgtacttcttcatcaacaacaacatccgggcctacagagatgacatcgacctgcagaacctgattgacttcacccaggagtactggcagtgctgcggggcctttggagcagatgactggaacctgaacatctacttcaactgcacagacagcaatgccagccgggagcgctgtggggtgcccttcagctgctgcaccaaggaccctgcagaagatgtgatcaacacccagtgtggctatgatgcccggcagaagccagaggtggaccagcagatcgtcatctacaccaagggctgtgtgccccagtttgagaagtggctgcaggacaacctgaccatcgtggccggcatcttcatcggcatcgccctgctgcagatcttcggcatctgcctggcccagaacctggtgtctgacattgaagctgtgcgggcctcctggtag

SEQ ID NO: 173047 - DNA, 594 bp, synthetic construct
  misc_feature 1..594: note = Description of Artificial Sequence: Synthetic coding sequence
  source 1..594: mol_type = other DNA
atgttcatcctgggctttgctggctgcatcggggccctgcgggagaacaccttcctgctgaagttcttcagcgtcttcctgggcatcatcttcttcctggagctgacagctggggtgctggcctttgtgttcaaggactggatcaaggaccagctgtacttcttcatcaacaacaacatccgggcctacagagatgacatcgacctgcagaacctgattgacttcacccaggagtactggcagtgctgcggggccttcggggctgatgactggaacctgaacatctacttcaactgcacagacagcaatgccagccgggagcgctgtggggtgcccttcagctgctgcaccaaggaccctgcagaagatgtgatcaacacccagtgtggctatgatgcccggcagaagccagaggtggaccagcagatcgtcatctacaccaagggctgtgtgccccagtttgagaagtggctgcaggacaacctgaccatcgtggccggcatcttcatcggcatcgccctgctgcagatcttcggcatctgcctggcccagaacctggtgtctgacatcgaggccgtgcgggcctcctggtag

SEQ ID NO: 173048 - DNA, 801 bp, synthetic construct
  misc_feature 1..801: note = Description of Artificial Sequence: Synthetic coding sequence
  source 1..801: mol_type = other DNA
atggccagcaggaggatggagaccaagcctgtgatcacctgcctgaagaccctgctgatcatctacagctttgtgttctggaaggagaaggccgccggcttctgtggccggcaggatgtggccatggccctgatcaccggggtcatcctgctggccgtgggcgtgtggggcaagctgaccctgggcacctacatcagcctgattgctgagaacagcaccaatgccccctacgtgctgattggcaccggcaccaccatcgtggtgtttggcctgtttggctgctttgccacctgccggggcagcccctggatgctgaagctgtatgccatgttcctgagcctggtgttcctggccgagctggtggccggcatcagcggctttgtgttcagacatgagatcaaggacaccttcctgcggacctacacagatgccatgcagacctacaatggaaatgatgagaggagcagagctgtggaccacgtgcagaggagcctgagctgctgcggcgtgcagaactacaccaactggagcaccagcccctacttcctggagcacggcatcccccccagctgctgcatgaatgaaacagactgcaacccccaggacctgcacaacctgactgtggccgccaccaaggtgaaccagaagggctgctatgacctggtgaccagcttcatggagaccaacatgggcatcatcgccggcgtggccttcggcatcgccttcagccagctgattggcatgctgctggcctgctgcctgagccgcttcatcacagccaaccagtatgagatggtgtag

SEQ ID NO: 173049 - DNA, 750 bp, synthetic construct
  misc_feature 1..750: note = Description of Artificial Sequence: Synthetic coding sequence
  source 1..750: mol_type = other DNA
atggccagcaggaggatggagaccaagcctgtgatcacctgcctgaagaccctgctgatcatctacagctttgtgttctggatcactggagtcatcctgctggccgtgggcgtgtggggcaagctgaccctgggcacctacatcagcctgattgctgagaacagcaccaatgccccctacgtgctgattggaacaggcaccaccatcgtggtgtttggcctgtttggctgctttgccacctgccggggcagcccctggatgctgaagctgtatgccatgttcctgagcctggtgttcctggccgagctggtggccggcatcagcggctttgtgttcagacatgagatcaaggacaccttcctgcggacctacacagatgccatgcagacctacaatggaaatgatgagaggagcagagctgtggaccacgtgcagaggagcctgagctgctgcggcgtgcagaactacaccaactggagcaccagcccctacttcctggagcacggcatcccccccagctgctgcatgaatgaaacagactgcaacccccaggacctgcacaacctgactgtggccgccaccaaggtgaaccagaagggctgctatgacctggtgaccagcttcatggagaccaacatgggcatcatcgccggcgtggcctttggaattgccttcagccagctgattggcatgctgctggcctgctgcctgagccgcttcatcacagccaaccagtatgagatggtgtag

SEQ ID NO: 173050 - DNA, 828 bp, synthetic construct
  misc_feature 1..828: note = Description of Artificial Sequence: Synthetic coding sequence
  source 1..828: mol_type = other DNA
atggccaacagaacagtgtgcaatggccagggccgcagccgggacctgctgcgcatcaagaacatccccaatgcccctggccacttcctgattgctggggtgggcggcagcagcagccagggccgcagcattgaggaggagggcaagacccacctgggcatcactggagtcatcctgctggccgtgggcgtgtggggcaagctgaccctgggcacctacatcagcctgattgctgagaacagcaccaatgccccctacgtgctgattggaacaggcaccaccatcgtggtgtttggcctgtttggctgctttgccacctgccggggcagcccctggatgctgaagctgtatgccatgttcctgagcctggtgttcctggccgagctggtggccggcatcagcggctttgtgttcagacatgagatcaaggacaccttcctgcggacctacacagatgccatgcagacctacaatggaaatgatgagaggagcagagctgtggaccacgtgcagaggagcctgagctgctgcggcgtgcagaactacaccaactggagcaccagcccctacttcctggagcacggcatcccccccagctgctgcatgaatgaaacagactgcaacccccaggacctgcacaacctgactgtggccgccaccaaggtgaaccagaagggctgctatgacctggtgaccagcttcatggagaccaacatgggcatcatcgccggcgtggcctttggaattgccttcagccagctgattggcatgctgctggcctgctgcctgagccgcttcatcacagccaaccagtatgagatggtgtag

SEQ ID NO: 173051 - DNA, 672 bp, synthetic construct
  misc_feature 1..672: note = Description of Artificial Sequence: Synthetic coding sequence
  source 1..672: mol_type = other DNA
atgatcactggagtcatcctgctggccgtgggcgtgtggggcaagctgaccctgggcacctacatcagcctgattgctgagaacagcaccaatgccccctacgtgctgattggaacaggcaccaccatcgtggtgtttggcctgtttggctgctttgccacctgccggggcagcccctggatgctgaagctgtatgccatgttcctgagcctggtgttcctggccgagctggtggccggcatcagcggctttgtgttcagacatgagatcaaggacaccttcctgcggacctacacagatgccatgcagacctacaatggaaatgatgagaggagcagagctgtggaccacgtgcagaggagcctgagctgctgcggcgtgcagaactacaccaactggagcaccagcccctacttcctggagcacggcatcccccccagctgctgcatgaatgaaacagactgcaacccccaggacctgcacaacctgactgtggccgccaccaaggtgaaccagaagggctgctatgacctggtgaccagcttcatggagaccaacatgggcatcatcgccggcgtggcctttggaattgccttcagccagctgattggcatgctgctggcctgctgcctgagccgcttcatcacagccaaccagtatgagatggtgtag

SEQ ID NO: 173052 - DNA, 714 bp, synthetic construct
  misc_feature 1..714: note = Description of Artificial Sequence: Synthetic coding sequence
  source 1..714: mol_type = other DNA
atggccggcgtgtctgcctgcatcaagtacagcatgttcaccttcaacttcctgttctggctgtgtggcatcctgatcctggccctggccatctgggtgcgggtgtccaatgacagccaggccatctttggaagtgaagatgtgggcagcagcagctatgtggccgtggacatcctgattgctgtgggcgccatcatcatgatcctgggcttcctgggctgctgcggggccatcaaggagagccgctgcatgctgctgctcttcttcatcggcctgctgctgatcctgctgctgcaggtggccaccggcatcctgggcgctgtgttcaagagcaagagtgaccgcatcgtgaatgagaccctgtatgagaacaccaagctgctgagcgccactggagagagcgagaagcagttccaggaggccatcatcgtgttccaggaggagttcaagtgctgcggcctggtgaatggagctgctgactggggcaacaacttccagcactacccagagctgtgtgcctgcctggacaagcagaggccctgccagagctacaacgggaagcaggtgtacaaggagacctgcatctccttcatcaaggacttcctggccaagaacctgatcatcgtcatcggcatcagctttggcctggccgtgattgagatcctgggcctggtgttctccatggtgctgtactgccagatcggcaacaagtag

SEQ ID NO: 173053 - DNA, 714 bp, synthetic construct; identical to SEQ ID NO: 173052
  misc_feature 1..714: note = Description of Artificial Sequence: Synthetic coding sequence
  source 1..714: mol_type = other DNA

SEQ ID NO: 173054 - DNA, 714 bp, synthetic construct; identical to SEQ ID NO: 173052
  misc_feature 1..714: note = Description of Artificial Sequence: Synthetic coding sequence
  source 1..714: mol_type = other DNA

SEQ ID NO: 173055 - DNA, 720 bp, synthetic construct
  misc_feature 1..720: note = Description of Artificial Sequence: Synthetic coding sequence
  source 1..720: mol_type = other DNA
atggcccggggctgcctgtgctgcctgaagtacatgatgttcctgttcaacctgatcttctggctgtgtggctgcggcctgctgggcgtgggcatctggctgtctgtgtcccagggcaactttgccaccttcagccccagcttccccagcctgtctgctgccaacctggtgattgccatcggcaccatcgtgatggtgacaggcttcctgggctgcctgggcgccatcaaggagaacaagtgcctgctgctgtccttcttcatcgtgctgctggtgatcctgctggccgagctgatcctgctgatcctcttctttgtgtacatggacaaggtgaatgaaaatgccaagaaggacctgaaggagggcctgctgctgtaccacacagaaaataatgtgggcctgaagaatgcctggaacatcatccaggccgagatgcgctgctgcggcgtgacagactacacagactggtaccctgtgctgggggagaacacagtgcctgaccgctgctgcatggagaacagccagggctgcggcagaaatgccaccacccccctgtggaggacaggctgctatgagaaggtgaagatgtggtttgatgacaacaagcacgtgctgggcaccgtgggcatgtgcatcctgatcatgcagatcctgggcatggccttctccatgaccctcttccagcacatccacaggacaggcaagaagtatgatgcctag

SEQ ID NO: 173056 - DNA, 720 bp, synthetic construct; identical to SEQ ID NO: 173055
  misc_feature 1..720: note = Description of Artificial Sequence: Synthetic coding sequence
  source 1..720: mol_type = other DNA

SEQ ID NO: 173057 - DNA, 1044 bp, synthetic construct
  misc_feature 1..1044: note = Description of Artificial Sequence: Synthetic coding sequence
  source 1..1044: mol_type = other DNA
atggccctgatgctgagcctggtgctgagcctgctgaagctgggcagcggccagtggcaggtgtttggaccagacaagcctgtgcaggccctggtgggggaggatgctgccttcagctgcttcctgagccccaagaccaatgctgaggccatggaggtgcgcttcttccggggccagttcagctctgtggtgcacctgtacagagatggcaaggaccagcccttcatgcagatgccccagtaccagggccgcaccaagctggtgaaggacagcattgctgagggccgcatcagcctgcggctggagaacatcaccgtgctggatgctggcctgtatggctgccgcatcagcagccagagctactaccagaaggccatctgggagctgcaggtgtctgccctgggctctgtgcccctcatcagcatcaccggctacgtggaccgggacatccagctgctgtgccagagcagcggctggttcccccggcccacagccaagtggaagggcccccagggccaggacctgagcacagacagcaggaccaacagagacatgcacggcctgtttgatgtggagatcagcctgactgtgcaggagaatgccggcagcatcagctgcagcatgagacatgcccacctgagccgggaggtggagagccgggtgcagattggagacaccttctttgagcccatctcctggcacctggccaccaaggtgctgggcatcctgtgctgcggcctcttctttggaattgtgggcctgaagatcttcttcagcaagttccagtgcaagcgggagcgggaggcctgggccggggccctcttcatggtgcctgctggcactggaagtgagatgctgccccaccctgctgccagcctgctgctggtgctggccagccggggccctggccccaagaaggaaaatcctgggggcaccggcctggagaagaaggccaggactggaagaattgaaagaagacctgagaccaggtctggaggagacagcggcagcagagatggcagccctgaggccctgcgcttctag

SEQ ID NO: 173058 - DNA, 879 bp, synthetic construct
  misc_feature 1..879: note = Description of Artificial Sequence: Synthetic coding sequence
  source 1..879: mol_type = other DNA
atgggagagaagtctgagaactgtggggtgcctgaggacctgctgaatggcctgaaggtgacagacacccaggaggctgaatgtgccggcccccctgtgcctgaccccaagaaccagcacagccagagcaagctgctgagagatgatgaggcccacctgcaggaggaccagggcgaggaggagtgcttccatgactgcagcgccagctttgaggaggagcccggggctgacaaggtggagaacaagagcaatgaagatgtgaacagcagcgagctggatgaggagtacctgattgagctggagaagaacatgtctgatgaggagaagcagaagaggcgggaggagagcacccggctgaaggaggagggcaatgagcagttcaagaagggggactacattgaagctgagagcagctacagccgggccctggagatgtgccccagctgcttccagaaggagaggagcatcctcttcagcaacagagctgctgccaggatgaagcaggacaagaaggagatggccatcaatgactgcagcaaggccatccagctgaaccccagctacatccgggccatcctgcggcgggcagagctgtatgagaagacagacaagctggatgaggccctggaggactacaagagcatcctggagaaggaccccagcatccaccaggcccgggaggcctgcatgaggctgcccaagcagatcgaggagagaaatgaaaggctgaaggaggagatgctgggcaagctgaaggacctgggcaacctggtgctgcggcccttcggcctgagcacagagaacttccagatcaagcaggacagcagcacaggcagctacagcatcaactttgtgcagaaccccaacaacaacagatag

SEQ ID NO: 173059 - DNA, 2199 bp, synthetic construct
  misc_feature 1..2199: note = Description of Artificial Sequence: Synthetic coding sequence
  source 1..2199: mol_type = other DNA
atggatgctgacaaggagaaggacctgcagaagttcctgaagaatgtggatgagatcagcaacctgatccaggagatgaacagtgatgatcctgtggtgcagcagaaggctgtgctggagacagagaagaggctgctgctgatggaggaggaccaggaggaggatgagtgcaggaccaccctgaacaagaccatgatcagccccccccagacagccatgaagtctgctgaggagatcaacagcgaggccttcctggcctctgtggagaaggatgccaaggagcgggccaagagaagaagagagaacaaggtgctggctgatgccctgaaggagaagggaaatgaggcctttgctgagggcaactatgaaacagccatcctgcgctacagcgagggcctggagaagctgaaggacatgaaggtgctgtacaccaacagagcccaggcctacatgaagctggaggactatgagaaggccctggtggactgtgagtgggccctgaagtgtgatgagaagtgcaccaaggcctacttccacatgggcaaggccaacctggccctgaagaactacagcgtgtcccgggagtgctacaagaagatcctggagatcaaccccaagctgcagacccaggtgaagggctacctgaaccaggtggacctgcaggagaaggctgacctgcaggagaaggaggcccacgagctgctggacagcggcaagaacacagctgtgaccaccaagaacctgctggagaccctgagcaagccagaccagatccccctcttctacgccggcggcatcgagatcctgacagagatgatcaatgaatgtacagagcagaccctcttcaggatgcacaacggcttcagcatcatcagtgacaatgaggtgatccgccgctgcttcagcacagctggaaatgatgctgtggaggagatggtgtgtgtgtctgtgctgaagctgtggcaggccgtgtgcagcagaaatgaggagaaccagagggtgctggtgatccaccacgaccgggcccggctgctggccgccctgctgagcagcaaggtgctggccatccggcagcagagctttgccctgctgctgcacctggcccagacagagagcggccgcagcctcatcatcaaccacctggacctgacccggctgctggaggccctggtgtccttcctggacttcagtgacaaggaggccaacacagccatgggcctcttcacagacctggccctggaggagcgcttccaggtgtggttccaggccaacctgcccggggtgctgcctgccctgactggagtgctgaagacagaccccaaggtgagcagcagcagcgccctgtgccagtgcatcgccatcatgggcaacctgtctgctgagcccaccaccaggaggcacatggccgcctgtgaggagtttggagatggctgcctgagcctgctggcccgctgtgaagaagatgtggacctcttccgggaggtgatctacaccctgctgggcctgatgatgaacctgtgcctgcaggccccctttgtgtctgaggtgtgggccgtggaggtgtcccggcgctgcctgagcctgctgaacagccaggacggcggcatcctgaccagggctgctggggtgctgagcaggaccctgagcagcagcctgaagatcgtggaggaggccctgcgggccggcgtggtgaagaagatgatgaagttcctgaagacaggaggagaaacagccagccgctatgccatcaagatcctggccatctgcaccaacagctaccacgaggcccgggaggaggtgatccggctggacaagaagctgtctgtgatgatgaagctgctgagcagtgaagatgaggtgctggtgggcaatgctgccctgtgcctgggcaactgcatggaggtgcccaacgtggccagcagcctgctgaagacagacctgctgcaggtgctgctgaagctggccggcagtgacacccagaagacagctgtgcaggtgaatgccggcatcgccctgggcaagctgtgcacagctgagccccgggtgcctgctgagagcagccacctgcagtttggccgggagagcgctgcccctgaggccctgagcccccggcgctgggaggagatgttccacatgctggtgttcagcctgagctctgtggaccccccacctcctccaccccagacctgctacccctag

SEQ ID NO: 173060 - DNA, 324 bp, synthetic construct
  misc_feature 1..324: note = Description of Artificial Sequence: Synthetic coding sequence
  source 1..324: mol_type = other DNA
atggatgctgacaaggagaaggacctgcagaagttcctgaagaatgtggatgagatcagcaacctgatccaggagatgaacagtgatgatcctgtggtgcagcagaaggctgtgctggagacagagaagaggctgctgctgatggaggaggaccaggaggaggatgagtgcaggaccaccctgaacaagaccatgatcagccccccccagacagccatgaagtctgctgaggagatcaacagcgaggccttcctggcctctgtggagaaggatgccaaggagcgggccaagagaagaagagagaacaaggtgctggccgactag

SEQ ID NO: 173061 - DNA, 609 bp, synthetic construct
  misc_feature 1..609: note = Description of Artificial Sequence: Synthetic coding sequence
  source 1..609: mol_type = other DNA
atggatgctgacaaggagaaggacctgcagaagttcctgaagaatgtggatgagatcagcaacctgatccaggagatgaacagtgatgatcctgtggtgcagcagaaggctgtgctggagacagagaagaggctgctgctgatggaggaggaccaggaggaggatgagtgcaggaccaccctgaacaagaccatgatcagccccccccagacagccatgaagtctgctgaggagatcaacagcgaggccttcctggcctctgtggagaaggatgccaaggagcgggccaagagaagaagagagaacaaggtgctggctgatgccctgaaggagaagggaaatgaggcctttgctgagggcaactatgaaacagccatcctgcgctacagcgagggcctggagaagctgaaggacatgaaggtgctgtacaccaacagagcccaggcctacatgaagctggaggactatgagaaggccctggtggactgtgagtgggccctgaagtgtgatgagaagtgcaccaaggcctacttccacatgggcaaggccaacctggccctgaagaactacagcgtgtcccgggagtgctacaagaagatcctggagtag

SEQ ID NO: 173062 - DNA, 504 bp, synthetic construct
  misc_feature 1..504: note = Description of Artificial Sequence: Synthetic coding sequence
  source 1..504: mol_type = other DNA
atggatgctgacaaggagaaggacctgcagaagttcctgaagaatgtggatgagatcagcaacctgatccaggagatgaacagtgatgatcctgtggtgcagcagaaggctgtgctggagacagagaagaggctgctgctgatggaggaggaccaggaggaggatgagtgcaggaccaccctgaacaagaccatgatcagccccccccagacagccatgaagtctgctgaggagatcaacagcgaggccttcctggcctctgtggagaaggatgccaaggagcgggccaagagaagaagagagaacaaggtgctggctgatgccctgaaggagaagggaaatgaggcctttgctgagggcaactatgaaacagccatcctgcgctacagcgagggcctggagaagctgaaggacatgaaggtgctgtacaccaacagagcccaggcctacatgaagctggaggactatgagaaggccctggtggactgtgagtgggccctgtag

SEQ ID NO: 173063 - DNA, 2118 bp, synthetic construct
  misc_feature 1..2118: note = Description of Artificial Sequence: Synthetic coding sequence
  source 1..2118: mol_type = other DNA
atggatgctgacaaggagaaggacctgcagaagttcctgaagaatgtggatgagatcagcaacctgatccaggagatgaacagtgatgatcctgtggtgcagcagaaggctgtgctggagacagagaagaggctgctgctgatggaggaggaccaggaggaggatgagtgcaggaccaccctgaacaagaccatgatcagccccccccagacagccatgaagtctgctgaggagatcaacagcgaggccttcctggcctctgtggagaaggatgccaaggagcgggccaagagaagaagagagaacaaggtgctggctgatgccctgaaggagaagggaaatgaggcctttgctgagggcaactatgaaacagccatcctgcgctacagcgagggcctggagaagctgaaggacatgaaggtgctgtacaccaacagagcccaggcctacatgaagctggaggactatgagaaggccctggtggactgtgagtgggccctgaagtgtgatgagaagtgcaccaaggcctacttccacatgggcaaggccaacctggccctgaagaactacagcgtgtcccgggagtgctacaagaagatcctggagatcaaccccaagctgcagacccaggtgaagggctacctgaaccaggtggacctgcaggagaaggctgacctgcaggagaaggaggcccacgagctgctggacagcggcaagaacacagctgtgaccaccaagaacctgctggagaccctgagcaagccagaccagatccccctcttctacgccggcggcatcgagatcctgacagagatgatcaatgaatgtacagagcagaccctcttcaggatgcacaacggcttcagcatcatcagtgacaatgaggtgatccgccgctgcttcagcacagctggaaatgatgctgtggaggagatggtgtgtgtgtctgtgctgaagctgtggcaggccgtgtgcagcagaaatgaggagaaccagagggtgctggtgatccaccacgaccgggcccggctgctggccgccctgctgagcagcaaggtgctggccatccggcagcagagctttgccctgctgctgcacctggcccagacagagagcggccgcagcctcatcatcaaccacctggacctgacccggctgctggaggccctggtgtccttcctggacttcagtgacaaggaggccaacacagccatgggcctcttcacagacctggccctggaggagcgcttccaggtgtggttccaggccaacctgcccggggtgctgcctgccctgactggagtgctgaagacagaccccaaggtgagcagcagcagcgccctgtgccagtgcatcgccatcatgggcaacctgtctgctgagcccaccaccaggaggcacatggccgcctgtgaggagtttggagatggctgcctgagcctgctggcccgctgtgaagaagatgtggacctcttccgggaggtgatctacaccctgctgggcctgatgatgaacctgtgcctgcaggccccctttgtgtctgaggtgtgggccgtggaggtgtcccggcgctgcctgagcctgctgaacagccaggacggcggcatcctgaccagggctgctggggtgctgagcaggaccctgagcagcagcctgaagatcgtggaggaggccctgcgggccggcgtggtgaagaagatgatgaagttcctgaagacaggaggagaaacagccagccgctatgccatcaagatcctggccatctgcaccaacagctaccacgaggcccgggaggaggtgatccggctggacaagaagctgtctgtgatgatgaagctgctgagcagtgaagatgaggtgctggtgggcaatgctgccctgtgcctgggcaactgcatggaggtgcccaacgtggccagcagcctgctgaagacagacctgctgcaggtgctgctgaagctggccggcagtgacacccagaagacagctgtgcaggtgaatgccggcatcgccctgggcaagctgtgcacagctgagcccaggtttgctgcccagctgaggaagctgcacggcctggagatcctgaacagcaccatgaagtacatcagtgacagctag

SEQ ID NO: 173064 - DNA, 1143 bp, synthetic construct
  misc_feature 1..1143: note = Description of Artificial Sequence: Synthetic coding sequence
  source 1..1143: mol_type = other DNA
atgttccggctgctgtcctggagcctgggccggggcttcctgcgggctgctggaagacgctgccggggctgcagcgcccggctgctgcccggcctggccggcggccctggccctgaggtgcaggtgccccccagccgggtggccccccacggccggggccctggcctgctgcccctgctggccgccctggcctggttcagcaggcctgctgctgctgaggaggaggagcagcagggcgcagatggagctgctgctgaagatggagcagatgaggccgaggccgagatcatccagctgctgaagagggccaagctgagcatcatgaaggatgagcctgaggaggccgagctgatcctgcatgatgccctgcggctggcctaccagacagacaacaagaaggccatcacctacacctatgacctgatggccaacctggccttcatccggggccagctggagaatgctgagcagctgttcaaggccaccatgagctacctgctgggcggcggcatgaagcaggaggacaatgccatcatcgagatcagcctgaagctggccagcatctatgctgcccagaaccggcaggagtttgctgtggccggctatgagttctgcatcagcaccctggaggagaagattgagcgggagaaggagctggccgaggacatcatgtctgtggaggagaaggccaacacccacctgctgctgggcatgtgcctggatgcctgtgcccgctacctgctcttcagcaagcagcccagccaggcccagaggatgtatgagaaggccctgcagatcagcgaggagatccagggcgagcggcacccccagaccatcgtgctgatgtctgacctggccaccaccctggatgcccagggccgctttgatgaggcctacatctacatgcagagggccagtgacctggcccggcagatcaaccaccctgagctgcacatggtgctgagcaacctggccgctgtgctgatgcaccgggagcgctacacccaggccaaggagatctaccaggaggccctgaagcaggccaagctgaagaaggatgagatctctgtgcagcacatccgggaggagctggccgagctgagcaagaagagccggcccctgaccaacagcgtgaagctgtag

SEQ ID NO: 173065 - DNA, 1143 bp, synthetic construct; identical to SEQ ID NO: 173064
  misc_feature 1..1143: note = Description of Artificial Sequence: Synthetic coding sequence
  source 1..1143: mol_type = other DNA

SEQ ID NO: 173066 - DNA, 1506 bp, synthetic construct
  misc_feature 1..1506: note = Description of Artificial Sequence: Synthetic coding sequence
  source 1..1506: mol_type = other DNA
atggcccagccccacaccacctctgtgccctactttgcccggagccctgcccctcctccacccagccgcagcggggccccaccccagcccccagccaccctgcggcccagcagaagaaggaccaggcctcccaggcctgctgacagaagagatgccccagctgactgtgcctacctgtggaggatcctgaccccccggcggggccgggccaggagaagtgatgtgggcgcccggcaccgggcctgtggcagaagagatgtgctgctgagccggcagggccctgccaaccctgagggcgccaggagagtggtgggcggccaggagcgggtgtggccagctgtgagaagaggccggggcggctccatgttccggctgctgtcctggagcctgggccggggcttcctgcgggccgccggccgccgctgccggggctgcagcgcccggctgctgcccggcctggccggcggccctggccctgaggtgcaggtgccccccagccgggtggcccctcatggccggggccctggcctgctgcccctgctggccgccctggcctggttcagcaggcctgctgctgctgaggaggaggagcagcagggcgcagatggagctgctgctgaagatggagcagatgaagctgaggccgagatcatccagctgctgaagagggccaagctgagcatcatgaaggatgagcctgaggaggccgagctgatcctgcatgatgccctgcggctggcctaccagacagacaacaagaaggccatcacctacacctatgacctgatggccaacctggccttcatccggggccagctggagaatgctgagcagctgttcaaggccaccatgagctacctgctgggcggcggcatgaagcaggaggacaatgccatcatcgagatcagcctgaagctggccagcatctatgctgcccagaaccggcaggagtttgctgtggccggctatgagttctgcatcagcaccctggaggagaagattgaaagagagaaggagctggccgaggacatcatgtctgtggaggagaaggccaacacccacctgctgctgggcatgtgcctggatgcctgtgcccgctacctgctcttcagcaagcagcccagccaggcccagaggatgtatgagaaggccctgcagatcagcgaggagatccagggcgagcggcacccccagaccatcgtgctgatgtctgacctggccaccaccctggatgcccagggccgctttgatgaggcctacatctacatgcagagggccagtgacctggcccggcagatcaaccaccctgagctgcacatggtgctgagcaacctggccgctgtgctgatgcaccgggagcgctacacccaggccaaggagatctaccaggaggccctgaagcaggccaagctgaagaaggatgagatctctgtgcagcacatccgggaggagctggccgagctgagcaagaagagccggcccctgaccaacagcgtgaagctgtag

SEQ ID NO: 173067 - DNA, 501 bp, synthetic construct
  misc_feature 1..501: note = Description of Artificial Sequence: Synthetic coding sequence
  source 1..501: mol_type = other DNA
tgacaggagcgggtgtggccagctgtgcggcggggccggggcggctccatgttccggctgctgtcctggagcctgggccggggcttcctgcgggctgctggaagacgctgccggggctgcagcgcccggctgctgcccggcctggccggcggccctggccctgaggtgcaggtgccccccagccgggtggccccccacggccggggccctggcctgctgcccctgctggccgccctggcctggttcagcaggcctgctgctgctgaggaggaggagcagcagggcgcagatggagctgctgctgaagatggagcagatgaggccgaggccgagatcatccagctgctgaagagggccaaggtgcggcggctgcgggccctgcggcctgctgagcggggcagcctgtgtgagcggggcctgggcgtggccgcccactacagcctgcggctggccgaggagtggatggaggccccccgggtgaagctgcccaggatgtcctag

SEQ ID NO: 173068 - DNA, 3951 bp, synthetic construct
  misc_feature 1..3951: note = Description of Artificial Sequence: Synthetic coding sequence
  source 1..3951: mol_type = other DNA
atggacagccaggagctgaagaccctcatcaactactactgccaggagcgctacttccaccacgtgctgctggtggccagcgagggcatcaagagatatggcagtgaccctgtgttccgcttctaccacgcctacggcaccctgatggagggcaagacccaggaggccctgcgggagtttgaggccatcaagaacaagcaggatgtgtccctgtgcagcctgctggccctgatctatgcccacaagatgagccccaacccagaccgggaggccatcctggagagtgatgcccgggtgaaggagcagaggaagggggccggggagaaggccctgtaccacgccggcctcttcctgtggcacatcggcagacatgacaaggcccgggagtacatcgacaggatgatcaagatcagtgatggcagcaagcagggccacgtgctgaaggcctggctggacatcacccggggcaaggagccctacaccaagaaggccctgaagtactttgaggagggcctgcaggatggaaatgacacctttgccctgctgggcaaggcccagtgcctggagatgaggcagaactacagcggggccctggagaccgtgaaccagatcatcgtgaacttccccagcttcctgcctgcctttgtgaagaagatgaagctgcagctggccctgcaggactgggaccagacagtggagacagcccagaggctgctgctgcaggacagccagaatgtggaggccctgaggatgcaggccctgtactacgtgtgccgggagggggacatcgagaaggccagcaccaagctggagaacctgggcaacaccctggatgccatggagccccagaatgcccagctgttctacaacatcaccctggccttcagcaggacctgtggccgcagccagctgatcctgcagaagatccagaccctgctggagcgggccttcagcctgaacccccagcagagcgagtttgccacagagctgggctaccagatgatcctgcagggccgggtgaaggaggccctgaagtggtacaagacagccatgaccctggatgagacctctgtgtctgccctggtgggcttcatccagtgccagctgattgagggccagctgcaggatgctgaccagcagctggagttcctgaatgagatccagcagagcatcggcaagtctgctgagctgatctacctgcatgctgtgctggccatgaagaagaacaagaggcaggaggaggtgatcaacctgctgaatgatgtgctggacacccacttcagccagctggagggcctgcccctgggcatccagtactttgagaagctgaacccagacttcctgctggagatcgtgatggagtacctgtccttctgccccatgcagcctgccagccctggccagcccctgtgccccctgctgcggcgctgcatctctgtgctggagaccgtggtgaggacagtgcccggcctgctgcagaccgtcttcctgattgccaaggtgaagtacctgagcggggacatcgaggccgccttcaacaacctgcagcactgcctggagcacaaccccagctatgcagatgcccacctgctgctggcccaggtgtacctgagccaggagaaggtgaagctgtgcagccagagcctggagctgtgcctgtcctatgacttcaaggtgcgggactaccccctgtaccacctgatcaaggcccagagccagaagaagatgggagaaattgctgatgccatcaagaccctgcacatggccatgagcctgcccggcatgaagagaattggagccagcaccaagagcaaggacaggaagacagaggtggacaccagccaccggctgagcatcttcctggagctgattgatgtgcaccggctgaatggagagcagcacgaggccaccaaggtgctgcaggatgccatccacgagttcagcggcaccagcgaggaggtgcgggtgaccatcgccaatgctgacctggccctggcccagggcgacatcgagcgggccctgagcatcctgcagaatgtgacagctgagcagccctacttcatcgaggcccgggagaagatggctgacatctacctgaagcacaggaaggacaagatgctgtacatcacctgcttccgggagattgctgagaggatggccaaccccaggagcttcctgctgctgggagatgcctacatgaacatcctggagcctgaggaggccatcgtggcctatgagcaggccctgaaccagaaccccaaggatggcaccctggccagcaagatgggcaaggccctgatcaagacccacaactacagcatggccatcacctactatgaagctgccctgaagacaggccagaagaactacctgtgctatgacctggccgagctgctgctgaagctgaagtggtatgacaaggccgagaaggtgctgcagcacgccctggcccacgagcctgtgaatgagctgagcgccctgatggaggatggccgctgccaggtgctgctggccaaggtgtacagcaagatggagaagctgggagatgccatcacagccctgcagcaggcccgggagctgcaggcccgggtgctgaagagggtgcagatggagcagccagatgctgtgcctgcccagaagcacctggccgctgagatctgtgccgagatcgccaagcacagcgtggcccagagggactatgagaaggccatcaagttctaccgggaggccctggtgcactgtgaaacagacaacaagatcatgctggagctggcccggctgtacctggcccaggatgatcctgacagctgcctgcggcagtgtgccctgctgctgcagagcgaccaggacaatgaagctgccaccatgatgatggctgacctgatgttcaggaagcaggactatgagcaggccgtgttccacctgcagcagctgctggagaggaagccagacaactacatgaccctgagccggctgattgacctgctgcggcgctgtgggaagctggaggatgtgccccgcttcttctccatggccgagaagaggaacagccgggccaagctggagcccggcttccagtactgcaagggcctgtacctgtggtacaccggggagcccaatgatgccctgcggcacttcaacaaggccaggaaggaccgggactggggccagaatgccctgtacaacatgattgagatctgcctgaacccagacaatgagaccgtgggcggggaggtgtttgagaacctggatggagacctgggcaacagcacagagaagcaggagagcgtgcagctggccgtgaggacagctgagaagctgctgaaggagctgaagccccagacagtgcagggccacgtgcagctgcgcatcatggagaactactgcctgatggccaccaagcagaagagcaatgtggagcaggccctgaacaccttcacagaaattgctgccagcgagaaggagcacatcccagccctgctgggcatggccacagcctacatgatcctgaagcagaccccccgggccaggaaccagctgaagagaattgccaagatgaactggaatgccattgatgctgaggagtttgagaagtcctggctgctgctggccgacatctacatccagagcgccaagtatgacatggccgaggacctgctgaagcgctgcctgcggcacaacagaagctgctgcaaggcctatgagtacatgggctacatcatggagaaggagcaggcctacacagatgctgccctgaactatgagatggcctggaagtacagcaacagaaccaacccagctgtgggctacaagctggccttcaactacctgaaggccaagcgctacgtggacagcattgacatctgccaccaggtgctggaggcccaccccacctaccccaagatcaggaaggacatcctggacaaggcccgggccagcctgcggccctag

SEQ ID NO: 173069 - DNA, 765 bp, synthetic construct
  misc_feature 1..765: note = Description of Artificial Sequence: Synthetic coding sequence
  source 1..765: mol_type = other DNA
atgattgagatctgcctgaacccagacaatgagaccgtgggcggggaggtgtttgagaacctggatggagacctgggcaacagcacagagaagcaggagagcgtgcagctggccgtgaggacagctgagaagctgctgaaggagctgaagccccagacagtgcagggccacgtgcagctgcgcatcatggagaactactgcctgatggccaccaagcagaagagcaatgtggagcaggccctgaacaccttcacagaaattgctgccagcgagaaggagcacatcccagccctgctgggcatggccacagcctacatgatcctgaagcagaccccccgggccaggaaccagctgaagagaattgccaagatgaactggaatgccattgatgctgaggagtttgagaagtcctggctgctgctggccgacatctacatccagagcgccaagtatgacatggccgaggacctgctgaagcgctgcctgcggcacaacagaagctgctgcaaggcctatgagtacatgggctacatcatggagaaggagcaggcctacacagatgctgccctgaactatgagatggcctggaagtacagcaacagaaccaacccagctgtgggctacaagctggccttcaactacctgaaggccaagcgctacgtggacagcattgacatctgccaccaggtgctggaggcccaccccacctaccccaagatcaggaaggacatcctggacaaggcccgggccagcctgcggccctag

SEQ ID NO: 173070 - DNA, 6078 bp, synthetic construct
  misc_feature 1..6078: note = Description of Artificial Sequence: Synthetic coding sequence
  source 1..6078: mol_type = other DNA
atggacaactttgctgagggggacttcaccgtggccgactatgccctgctggaggactgcccccacgtggatgactgtgtgtttgctgctgagttcatgagcaatgactatgtgcgggtgacccagctgtactgtgatggagtgggcgtgcagtacaaggactacatccagagcgagaggaacctggagtttgacatctgcagcatctggtgcagcaagcccatctctgtgctgcaggactactgtgatgccatcaagatcaacatcttctggcccctgctcttccagcaccagaacagcagcgtcatcagccggctgcacccctgtgtggatgccaacaacagccgggccagcgagatcaacctgaagaagctgcagcacctggagctgatggaggacatcgtggacctggccaagaaggtggccaatgacagcttcctgattggaggcctgctgcgcatcggctgcaagattgagaacaagatcctggccatggaggaggccctgaactggatcaagtatgctggagatgtgaccatcctgaccaagctgggcagcattgacaactgctggcccatgctgagcatcttcttcacagagtacaagtaccacatcaccaagatcgtgatggaggactgcaacctgctggaggagctgaagacccagagctgcatggactgcatcgaggagggggagctgatgaagatgaagggaaatgaggagttcagcaaggagagatttgatattgccatcatctactacacccgggccatcgagtacagacctgagaactacctgctgtatggcaacagagccctgtgcttcctgaggacaggccagttcagaaatgccctgggagatggcaagagggccaccatcctgaagaacacctggcccaagggccactaccgctactgtgatgccctgtccatgctgggggagtatgactgggccctgcaggccaacatcaaggcccagaagctgtgcaagaatgaccctgagggcatcaaggacctgatccagcagcacgtgaagctgcagaagcagatcgaggacctgcagggccgcacagccaacaaggaccccatcaaggccttctatgagaacagagcctacacccccaggagcctgagcgcccccatcttcaccaccagcctgaactttgtggagaaggagcgggacttcaggaagatcaaccacgagatggccaacggcggcaaccagaacctgaaggtggctgatgaggccctgaaggtggatgactgtgactgccaccctgagttcagcccccccagcagccagccccccaagcacaagggcaagcagaagagcagaaataatgaaagtgagaagttcagcagcagcagccccctgaccctgcctgctgacctgaagaacatcctggagaagcagttcagcaagagcagccgggccgcccaccaggactttgccaacatcatgaagatgctgcggagcctcatccaggacggctacatggccctgctggagcagcgctgccgctctgctgcccaggccttcacagagctgctgaatggcctggacccccagaagatcaagcagctgaacctggccatgatcaactacgtgctggtggtgtatggcctggccatcagcctgctgggcatcggccagcctgaggagctgtctgaggccgagaaccagttcaagaggatcatcgagcactaccccagcgagggcctggactgcctggcctactgcggcatcggcaaggtgtacctgaagaagaaccgcttcctggaggccctgaaccactttgagaaggcccggaccctcatctaccgcctgcccggggtgctgacctggcccaccagcaatgtcatcatcgaggagagccagccccagaagatcaagatgctgctggagaagtttgtggaggagtgcaagttcccccctgtgcctgatgccatctgctgctaccagaagtgccacggctacagcaagatccagatctacatcacagatcctgacttcaagggcttcatccgcatcagctgctgccagtactgcaagattgagttccacatgaactgctggaagaagctgaagaccaccaccttcaatgacaagattgacaaggacttcctgcagggcatctgcctgaccccagactgtgagggcgtcatcagcaagatcatcatcttcagcagcggcggggaggtgaagtgtgaatttgagcacaaggtgatcaaggagaaggtgcccccccggcccatcctgaagcagaagtgcagcagcctggagaagctgcggctgaaggaggacaagaagctgaagaggaagatccagaagaaggaggccaagaagctggcccaggagaggatggaggaggacctgcgggagagcaacccccccaagaatgaggagcagaaggagaccgtggacaacgtgcagcgctgccagttcctggatgaccgcatcctgcagtgcatcaagcagtatgctgacaagatcaagagcggcatccagaacacagccatgctgctgaaggagctgctgtcctggaaggtgctgagcacagaggactacaccacctgcttcagcagcaggaacttcctgaatgaagctgtggactatgtgatccgccacctgatccaggagaacaacagagtgaagacccgcatcttcctgcacgtgctgtctgagctgaaggaggtggagcccaagctggccgcctggatccagaagctgaacagctttggcctggatgccaccggcaccttcttcagccgctatggagccagcctgaagctgctggacttcagcatcatgaccttcctgtggaatgagaagtatggccacaagctggacagcattgagggcaagcagctggactacttcagcgagcccgccagcctgaaggaggcccgctgcctgatctggctgctggaggagcaccgggacaagtttcctgccctgcacagcgccctggatgagttctttgacatcatggacagccgctgcaccgtgctgaggaagcaggacagcggggaggcccccttcagcagcaccaaggtgaagaacaagagcaagaagaagaagcccaaggacagcaagcccatgctggtgggcagcggcaccacctctgtgaccagcaacaatgagatcatcaccagcagcgaggaccacagcaacagaaacagcgacagcgctggcccctttgctgtgcctgaccacctgcggcaggatgtggaggagtttgaggccctgtatgaccagcacagcaatgaatatgtggtgaggaacaagaagctgtgggacatgaaccccaagcagaagtgcagcaccctgtatgactacttcagccagttcctggaggagcacggccccctggacatgagcaacaagatgttttctgcagaatatgagttcttccctgaggagacccggcagatcctggagaaggccggcggcctgaagcccttcctgctgggctgccccaggtttgtggtgattgacaactgcatcgccctgaagaaggtggccagccggctgaagaagaagaggaagaagaagaacatcaagaccaaggtggaggagatcagcaaggccggggagtatgtgcgggtgaagctgcagctgaacccagctgcccgggagttcaagccagatgtgaagagcaagcctgtgtctgacagcagcagcgccccagcctttgaaaatgtgaagcccaagcctgtgtctgccaacagccccaagccagcctgtgaagatgtgaaggccaagcctgtgtctgacaacagcagccggcaggtgtctgaagatggccagcccaagggcgtgagcagcaacagccccaagccaggctctgaagatgccaactacaagagggtgtcctgcaacagccccaagcctgtgctggaggatgtgaagcccacctactgggcccagagccacctggtgacaggctactgcacctacctgcccttccagagatttgacatcacccagaccccaccagcctacatcaacgtgctgcccggcctgccccagtacaccagcatctacacccccctggccagcctgagccctgagtaccagctgcccaggtctgtgcctgtggtgcccagctttgtggccaatgacagagctgacaagaatgctgctgcctactttgagggccaccacctgaatgcagaaaatgtggccggccaccagatcgccagcgagacccagatcctggagggcagcctgggcatctctgtgaagagccactgcagcactggagatgcccacacagtgctgtctgagagcaacagaaatgatgagcactgcggcaacagcaacaacaagtgtgaggtgattcctgagagcaccagcgctgtgaccaacatcccccacgtgcagatggtggccatccaggtgtcctggaacatcatccaccaggaggtgaacacagagccctacaacccctttgaggagcggcagggcgagatcagcagaattgagaaggagcaccaggtgctgcaggaccagctgcaggaggtgtatgaaaattatgagcagatcaagctgaagggcctggaggagacccgggacctggaggagaagctgaagaggcacctggaggagaacaagatcagcaagacagagctggactggttcctgcaggacctggagcgggagatcaagaagtggcagcaggagaagaaggagatccaggagcggctgaagagcctgaagaagaagatcaagaaggtgtccaatgccagcgagatgtacacccagaagaatgatggcaaggagaaggagcacgagctgcacctggaccagagcctggagatcagcaacaccctgaccaatgagaagatgaagattgaggagtacatcaagaagggcaaggaggactatgaggagagccaccagagagctgtggccgctgaggtgtctgtgctggagaactggaaggagagcgaggtgtacaagctgcagatcatggagagccaggccgaggccttcctgaagaagctgggcctcatcagccgggaccctgctgcctacccagacatggagagtgacatccgctcctgggagctgttcctgagcaatgtgaccaaggagattgagaaggccaagagccagtttgaggagcagatcaaggccatcaagaatggcagccggctgtctgagctgagcaaggtgcagatcagcgagctgtccttccctgcctgcaacacagtgcaccctgagctgctgcctgagagcagtggagatgatggccagggcctggtgaccagcgccagtgatgtgacaggcaaccacgccgccctgcaccgggaccccagcgtcttctctgctggggacagccctggagaggcccccagcgccctgctgcccggccccccacctggccagcctgaggccacccagctgaccggccccaagagagctggccaggccgccctgtctgagaggagccctgtggccgacaggaagcagcctgtgcccccaggccgggccgcccggagcagccagagccccaagaagcccttcaacagcatcatcgagcacctgtctgtggtgttcccctgctacaacagcacagagctggccggcttcatcaagaaggtgcgcagcaagaacaagaacagcctgagcggcctgagcattgatgagatcgtgcagagggtgacagagcacatcctggatgagcagaagaagaagaagcccaaccctgggaaggacaagaggacctatgagcccagcagcgccacccctgtgaccaggagcagccagggcagccccagcgtggtggtggcccccagccccaagaccaagggccagaaggccgaggatgtgcctgtgcgcatcgccctgggcgccagcagctgtgagatctgccacgaggtgttcaagagcaagaatgtgcgggtgctgaagtgtggccacaagtaccacaagggctgcttcaagcagtggctgaagggccagagcgcctgcccagcctgccagggccgggacctgctgacagaggagagccccagcggccggggctggcccagccagaaccaggagctgcccagctgcagcagcaggtag

SEQ ID NO: 173071 - DNA, 6078 bp, synthetic construct; identical to SEQ ID NO: 173070
  misc_feature 1..6078: note = Description of Artificial Sequence: Synthetic coding sequence
  source 1..6078: mol_type = other DNA

SEQ ID NO: 173072 - DNA, 6078 bp, synthetic construct; identical to SEQ ID NO: 173070
  misc_feature 1..6078: note = Description of Artificial Sequence: Synthetic coding sequence
  source 1..6078: mol_type = other DNA

SEQ ID NO: 173073 - DNA, 3540 bp, synthetic construct
  misc_feature 1..3540: note = Description of Artificial Sequence: Synthetic coding sequence
  source 1..3540: mol_type = other DNA
atggacaactttgctgagggggacttcaccgtggccgactatgccctgctggaggactgcccccacgtggatgactgtgtgtttgctgctgagttcatgagcaatgactatgtgcgggtgacccagctgtactgtgatggagtgggcgtgcagtacaaggactacatccagagcgagaggaacctggagtttgacatctgcagcatctggtgcagcaagcccatctctgtgctgcaggactactgtgatgccatcaagatcaacatcttctggcccctgctcttccagcaccagaacagcagcgtcatcagccggctgcacccctgtgtggatgccaacaacagccgggccagcgagatcaacctgaagaagctgcagcacctggagctgatggaggacatcgtggacctggccaagaaggtggccaatgacagcttcctgattggaggcctgctgcgcatcggctgcaagattgagaacaagatcctggccatggaggaggccctgaactggatcaagtatgctggagatgtgaccatcctgaccaagctgggcagcattgacaactgctggcccatgctgagcatcttcttcacagagtacaagtaccacatcaccaagatcgtgatggaggactgcaacctgctggaggagctgaagacccagagctgcatggactgcatcgaggagggggagctgatgaagatgaagggaaatgaggagttcagcaaggagagatttgatattgccatcatctactacacccgggccatcgagtacagacctgagaactacctgctgtatggcaacagagccctgtgcttcctgaggacaggccagttcagaaatgccctgggagatggcaagagggccaccatcctgaagaacacctggcccaagggccactaccgctactgtgatgccctgtccatgctgggggagtatgactgggccctgcaggccaacatcaaggcccagaagctgtgcaagaatgaccctgagggcatcaaggacctgatccagcagcacgtgaagctgcagaagcagatcgaggacctgcagggccgcacagccaacaaggaccccatcaaggccttctatgagaacagagcctacacccccaggagcctgagcgcccccatcttcaccaccagcctgaactttgtggagaaggagcgggacttcaggaagatcaaccacgagatggccaacggcggcaaccagaacctgaaggtggctgatgaggccctgaaggtggatgactgtgactgccaccctgagttcagcccccccagcagccagccccccaagcacaagggcaagcagaagagcagaaataatgaaagtgagaagttcagcagcagcagccccctgaccctgcctgctgacctgaagaacatcctggagaagcagttcagcaagagcagccgggccgcccaccaggactttgccaacatcatgaagatgctgcggagcctcatccaggacggctacatggccctgctggagcagcgctgccgctctgctgcccaggccttcacagagctgctgaatggcctggacccccagaagatcaagcagctgaacctggccatgatcaactacgtgctggtggtgtatggcctggccatcagcctgctgggcatcggccagcctgaggagctgtctgaggccgagaaccagttcaagaggatcatcgagcactaccccagcgagggcctggactgcctggcctactgcggcatcggcaaggtgtacctgaagaagaaccgcttcctggaggccctgaaccactttgagaaggcccggaccctcatctaccgcctgcccggggtgctgacctggcccaccagcaatgtcatcatcgaggagagccagccccagaagatcaagatgctgctggagaagtttgtggaggagtgcaagttcccccctgtgcctgatgccatctgctgctaccagaagtgccacggctacagcaagatccagatctacatcacagatcctgacttcaagggcttcatccgcatcagctgctgccagtactgcaagattgagttccacatgaactgctggaagaagctgaagaccaccaccttcaatgacaagattgacaaggacttcctgcagggcatctgcctgaccccagactgtgagggcgtcatcagcaagatcatcatcttcagcagcggcggggaggtgaagtgtgaatttgagcacaaggtgatcaaggagaaggtgcccccccggcccatcctgaagcagaagtgcagcagcctggagaagctgcggctgaaggaggacaagaagctgaagaggaagatccagaagaaggaggccaagaagctggcccaggagaggatggaggaggacctgcgggagagcaacccccccaagaatgaggagcagaaggagaccgtggacaacgtgcagcgctgccagttcctggatgaccgcatcctgcagtgcatcaagcagtatgctgacaagatcaagagcggcatccagaacacagccatgctgctgaaggagctgctgtcctggaaggtgctgagcacagaggactacaccacctgcttcagcagcaggaacttcctgaatgaagctgtggactatgtgatccgccacctgatccaggagaacaacagagtgaagacccgcatcttcctgcacgtgctgtctgagctgaaggaggtggagcccaagctggccgcctggatccagaagctgaacagctttggcctggatgccaccggcaccttcttcagccgctatggagccagcctgaagctgctggacttcagcatcatgaccttcctgtggaatgagaagtatggccacaagctggacagcattgagggcaagcagctggactacttcagcgagcccgccagcctgaaggaggcccgctgcctgatctggctgctggaggagcaccgggacaagtttcctgccctgcacagcgccctggatgagttctttgacatcatggacagccgctgcaccgtgctgaggaagcaggacagcggggaggcccccttcagcagcaccaaggtgaagaacaagagcaagaagaagaagcccaaggacagcaagcccatgctggtgggcagcggcaccacctctgtgaccagcaacaatgagatcatcaccagcagcgaggaccacagcaacagaaacagcgacagcgctggcccctttgctgtgcctgaccacctgcggcaggatgtggaggagtttgaggccctgtatgaccagcacagcaatgaatatgtggtgaggaacaagaagctgtgggacatgaaccccaagcagaagtgcagcaccctgtatgactacttcagccagttcctggaggagcacggccccctggacatgagcaacaagatgttttctgcagaatatgagttcttccctgaggagacccggcagatcctggagaaggccggcggcctgaagcccttcctgctgggctgccccaggtttgtggtgattgacaactgcatcgccctgaagaaggtggccagccggctgaagtag

SEQ ID NO: 173074 - DNA, 2343 bp, synthetic construct
  misc_feature 1..2343: note = Description of Artificial Sequence: Synthetic coding sequence
  source 1..2343: mol_type = other DNA
atggacaactttgctgagggggacttcaccgtggccgactatgccctgctggaggactgcccccacgtggatgactgtgtgtttgctgctgagttcatgagcaatgactatgtgcgggtgacccagctgtactgtgatggagtgggcgtgcagtacaaggactacatccagagcgagaggaacctggagtttgacatctgcagcatctggtgcagcaagcccatctctgtgctgcaggactactgtgatgccatcaagatcaacatcttctggcccctgctcttccagcaccagaacagcagcgtcatcagccggctgcacccctgtgtggatgccaacaacagccgggccagcgagatcaacctgaagaagctgcagcacctggagctgatggaggacatcgtggacctggccaagaaggtggccaatgacagcttcctgattggaggcctgctgcgcatcggctgcaagattgagaacaagatcctggccatggaggaggccctgaactggatcaagtatgctggagatgtgaccatcctgaccaagctgggcagcattgacaactgctggcccatgctgagcatcttcttcacagagtacaagtaccacatcaccaagatcgtgatggaggactgcaacctgctggaggagctgaagacccagagctgcatggactgcatcgaggagggggagctgatgaagatgaagggaaatgaggagttcagcaaggagagatttgatattgccatcatctactacacccgggccatcgagtacagacctgagaactacctgctgtatggcaacagagccctgtgcttcctgaggacaggccagttcagaaatgccctgggagatggcaagagggccaccatcctgaagaacacctggcccaagggccactaccgctactgtgatgccctgtccatgctgggggagtatgactgggccctgcaggccaacatcaaggcccagaagctgtgcaagaatgaccctgagggcatcaaggacctgatccagcagcacgtgaagctgcagaagcagatcgaggacctgcagggccgcacagccaacaaggaccccatcaaggccttctatgagaacagagcctacacccccaggagcctgagcgcccccatcttcaccaccagcctgaactttgtggagaaggagcgggacttcaggaagatcaaccacgagatggccaacggcggcaaccagaacctgaaggtggctgatgaggccctgaaggtggatgactgtgactgccaccctgagttcagcccccccagcagccagccccccaagcacaagggcaagcagaagagcagaaataatgaaagtgagaagttcagcagcagcagccccctgaccctgcctgctgacctgaagaacatcctggagaagcagttcagcaagagcagccgggccgcccaccaggactttgccaacatcatgaagatgctgcggagcctcatccaggacggctacatggccctgctggagcagcgctgccgctctgctgcccaggccttcacagagctgctgaatggcctggacccccagaagatcaagcagctgaacctggccatgatcaactacgtgctggtggtgtatggcctggccatcagcctgctgggcatcggccagcctgaggagctgtctgaggccgagaaccagttcaagaggatcatcgagcactaccccagcgagggcctggactgcctggcctactgcggcatcggcaaggtgtacctgaagaagaaccgcttcctggaggccctgaaccactttgagaaggcccggaccctcatctaccgcctgcccggggtgctgacctggcccaccagcaatgtcatcatcgaggagagccagccccagaagatcaagatgctgctggagaagtttgtggaggagtgcaagttcccccctgtgcctgatgccatctgctgctaccagaagtgccacggctacagcaagatccagatctacatcacagatcctgacttcaagggcttcatccgcatcagctgctgccagtactgcaagattgagttccacatgaactgctggaagaagctgaagaccaccaccttcaatgacaagattgacaaggacttcctgcagggcatctgcctgaccccagactgtgagggcgtcatcagcaagatcatcatcttcagcagcggcggggaggtgaagtgtgaatttgagcacaaggtgatcaaggagaaggtgcccccccggcccatcctgaagcagaagtgcagcagcctggagaagctgcggctgaaggaggacaagaagctgaagaggaagatccagaagaaggaggcctag

SEQ ID NO: 173075 - DNA, 1839 bp, synthetic construct
  misc_feature 1..1839: note = Description of Artificial Sequence: Synthetic coding sequence
  source 1..1839: mol_type = other DNA
atgctgggggagtatgactgggccctgcaggccaacatcaaggcccagaagctgtgcaagaatgaccctgagggcatcaaggacctgatccagcagcacgtgaagctgcagaagcagatcgaggacctgcagggccgcacagccaacaaggaccccatcaaggccttctatgagaacagagcctacacccccaggagcctgagcgcccccatcttcaccaccagcctgaactttgtggagaaggagcgggacttcaggaagatcaaccacgagatggccaacggcggcaaccagaacctgaaggtggctgatgaggccctgaaggtggatgactgtgactgccaccctgagttcagcccccccagcagccagccccccaagcacaagggcaagcagaagagcagaaataatgaaagtgagaagttcagcagcagcagccccctgaccctgcctgctgacctgaagaacatcctggagaagcagttcagcaagagcagccgggccgcccaccaggactttgccaacatcatgaagatgctgcggagcctcatccaggacggctacatggccctgctggagcagcgctgccgctctgctgcccaggccttcacagagctgctgaatggcctggacccccagaagatcaagcagctgaacctggccatgatcaactacgtgctggtggtgtatggcctggccatcagcctgctgggcatcggccagcctgaggagctgtctgaggccgagaaccagttcaagaggatcatcgagcactaccccagcgagggcctggactgcctggcctactgcggcatcggcaaggtgtacctgaagaagaaccgcttcctggaggccctgaaccactttgagaaggcccggaccctcatctaccgcctgcccggggtgctgacctggcccaccagcaatgtcatcatcgaggagagccagccccagaagatcaagatgctgctggagaagtttgtggaggagtgcaagttcccccctgtgcctgatgccatctgctgctaccagaagtgccacggctacagcaagatccagatctacatcacagatcctgacttcaagggcttcatccgcatcagctgctgccagtactgcaagattgagttccacatgaactgctggaagaagctgaagaccaccaccttcaatgacaagattgacaaggacttcctgcagggcatctgcctgaccccagactgtgagggcgtcatcagcaagatcatcatcttcagcagcggcggggaggtgaagtgtgaatttgagcacaaggtgatcaaggagaaggtgcccccccggcccatcctgaagcagaagtgcagcagcctggagaagctgcggctgaaggaggacaagaagctgaagaggaagatccagaagaaggaggccaagaagctggcccaggagaggatggaggaggacctgcgggagagcaacccccccaagaatgaggagcagaaggagaccgtggacaacgtgcagcgctgccagttcctggatgaccgcatcctgcagtgcatcaagcagtatgctgacaagatcaagagcggcatccagaacacagccatgctgctgaaggagctgctgtcctggaaggtgctgagcacagaggactacaccacctgcttcagcagcaggaacttcctgaatgaagctgtggactatgtgatccgccacctgatccaggagaacaacagagtgaagacccgcatcttcctgcacgtgctgtctgagctgaaggaggtggagcccaagctggccgcctggatccagaagctgaacagctttggcatgagcctgtacatccctgagcagtag

SEQ ID NO: 173076 - DNA, 1842 bp, synthetic construct
  misc_feature 1..1842: note = Description of Artificial Sequence: Synthetic coding sequence
  source 1..1842: mol_type = other DNA
atggatgctgtgctggcctgccgcctgcggggccggggcaacagagtggccgccctgcggccccggcccaggcctgggggcagcgctggccccagcccctttgccctgctgtgtgccggcctgagccctgagcccagggctggggtgggcagcgagttccctgcctggttcctgggcggcagcagccagaggaggaacatggccctgctgggcagcagagctgagctggaggctgatgaagatgtgtttgaagatgccctggagaccatctccatggccaaggagagcatgtaccacgccctgggctacagcaccatcgtggtgctgcaggccgtgctgacctttgagcagcaggacatccagaatggcatcagcgccatgaaggatgccctgcagacctgccagaagtacaggaagaagtacacagtggtggagagcttcagcagcctgctgagccggggcagcctggagcagctgtctgaggaggagatgcacgccgagatctgctacgccgagtgcctgctgcagaaggccgccctgacctttgtgcaggatgagaacatgatcaacttcatcaagggcggcctgaagatccgcaccagctaccagatctacaaggaatgtctgagcatcctgcacgagatccagaagaacaagctgcagcaggagttcttctatgaatttgagggcggcgtgaagctgggcagcggggccttcaacctgatgctgagcctgctgcctgcccgcatcatccggctgctggagttcatcggcttcagcggcaaccgggagctgggcctgctgcagctgcgggagggcgccagcggccgctccatgaggtctgccctgtgctgcctgaccatcctggccttccacacctacatcagcctcatcctgggcactggagaggtgaatgtggccgaggccgagcggctgctggcccccttcctgcagcagttccccaacggcagcctggtgctcttctaccacgccagaattgagctgctgaagggcaacctggaggaggcccaggaggtgttccagaagtgcatctctgtgcaggaggagtggaagcagttccaccacctgtgctactgggagctgatgtggatcaacgtgttccagcagaactggatgcaggcctactactacagcgacctgctgtgcaaggagagcaagtggagcaaggccacctacgtgttcctgaaggccgccatcctgtccatgctgcctgaagaagatgtggtggccaccaatgaaaatgtggtgaccctcttccggcaggtggacagcctgaagcagagaattgctgggaagagcatccccacagagaagtttgctgtgaggaaggcccggcgctacagcgccagcctgcctgcccctgtgaagctgatcctgcctgccctggagatgatgtatgtgtggaatggcttcagcatcgtgtccaagaggaaggacctgtctgagaacctgctggtgacagtggagaaggccgaggccgccctgcagagccagaacttcaacagcttctctgtggatgatgaatgtctggtgaagctgctgaagggctgctgcctgaagaacctgcagaggcccctgcaggccgagctgtgctacaaccacgtggtggagagcgagaagctgctgaagtatgaccactacctggtgcccttcaccctgtttgagctggccagcctgtacaagagccagggcgagattgacaaggccatcaagttcctggagacagccaggaacaactacaaggactacagcctggagagccggctgcacttccgcatccaggccgccctgcacctgtggaggaagcccagcagtgactag

SEQ ID NO: 173077 - DNA, 1851 bp, synthetic construct
  misc_feature 1..1851: note = Description of Artificial Sequence: Synthetic coding sequence
  source 1..1851: mol_type = other DNA
atggccctgctgggcagcagagctgagctggaggctgatgaagatgtgtttgaagatgccctggagaccatcagcatcagcagccacagcgacatggccaccagcagcctgcactttgccagctgtgacacccagcaggccccccggcagagaggagccagcacagtgagcagcagcagcagcaccaaggtggacctgaagagcggcctggaggagtgtgctgtggccctgaacctcttcctgagcaacaagttcacagatgccctggagctgctgcggccctgggccaaggagagcatgtaccacgccctgggctacagcaccatcgtggtgctgcaggccgtgctgacctttgagcagcaggacatccagaatggcatcagcgccatgaaggatgccctgcagacctgccagaagtacaggaagaagtacacagtggtggagagcttcagcagcctgctgagccggggcagcctggagcagctgtctgaggaggagatgcatgctgagatctgctacgcagaatgtctgctgcagaaggccgccctgacctttgtgcaggatgagaacatgatcaacttcatcaagggcggcctgaagatccgcaccagctaccagatctacaaggagtgcctgagcatcctgcacgagatccagaagaacaagctgcagcaggagttcttctatgaatttgaaggaggagtgaagctgggcagcggggccttcaacctgatgctgagcctgctgcctgcccgcatcatccggctgctggagttcatcggcttcagcggcaaccgggagctgggcctgctgcagctgcgggagggcgccagcggccgctccatgaggtctgccctgtgctgcctgaccatcctggccttccacacctacatcagcctcatcctgggcaccggggaggtgaatgtggccgaggccgagcggctgctggcccccttcctgcagcagttccccaacggcagcctggtgctcttctaccacgcccgcatcgagctgctgaagggcaacctggaggaggcccaggaggtgttccagaagtgcatctctgtgcaggaggagtggaagcagttccaccacctgtgctactgggagctgatgtggatcaacgtgttccagcagaactggatgcaggcctactactacagcgacctgctgtgcaaggagagcaagtggagcaaggccacctacgtgttcctgaaggccgccatcctgtccatgctgcctgaggaggatgtggtggccaccaatgaaaatgtggtgaccctcttccggcaggtggacagcctgaagcagagaattgctgggaagagcatccccacagagaagtttgctgtgaggaaggcccggcgctacagcgccagcctgcctgcccctgtgaagctgatcctgcctgccctggagatgatgtatgtgtggaatggcttcagcatcgtgtccaagaggaaggacctgtctgagaacctgctggtgacagtggagaaggccgaggccgccctgcagagccagaacttcaacagcttctctgtggatgatgagtgcctggtgaagctgctgaagggctgctgcctgaagaacctgcagaggcccctgcaggccgagctgtgctacaaccacgtggtggagagcgagaagctgctgaagtatgaccactacctggtgcccttcaccctgtttgagctggccagcctgtacaagagccagggcgagattgacaaggccatcaagttcctggagacagccaggaacaactacaaggactacagcctggagagccggctgcacttccgcatccaggccgccctgcacctgtggaggaagcccagcagtgactag

SEQ ID NO: 173078 - DNA, 2010 bp, synthetic construct
  misc_feature 1..2010: note = Description of Artificial Sequence: Synthetic coding sequence
  source 1..2010: mol_type = other DNA
atggatgctgtgctggcctgccgcctgcggggccggggcaacagagtggccgccctgcggccccggcccaggcctgggggcagcgctggccccagcccctttgccctgctgtgtgccggcctgagccctgagcccagggctggggtgggcagcgagttccctgcctggttcctgggcggcagcagccagaggaggaacatggccctgctgggcagcagagctgagctggaggctgatgaagatgtgtttgaagatgccctggagaccatcagcatcagcagccacagcgacatggccaccagcagcctgcactttgccagctgtgacacccagcaggccccccggcagagaggagccagcacagtgagcagcagcagcagcaccaaggtggacctgaagagcggcctggaggagtgtgctgtggccctgaacctcttcctgagcaacaagttcacagatgccctggagctgctgcggccctgggccaaggagagcatgtaccacgccctgggctacagcaccatcgtggtgctgcaggccgtgctgacctttgagcagcaggacatccagaatggcatcagcgccatgaaggatgccctgcagacctgccagaagtacaggaagaagtacacagtggtggagagcttcagcagcctgctgagccggggcagcctggagcagctgtctgaggaggagatgcatgctgagatctgctacgcagaatgtctgctgcagaaggccgccctgacctttgtgcaggatgagaacatgatcaacttcatcaagggcggcctgaagatccgcaccagctaccagatctacaaggagtgcctgagcatcctgcacgagatccagaagaacaagctgcagcaggagttcttctatgaatttgaaggaggagtgaagctgggcagcggggccttcaacctgatgctgagcctgctgcctgcccgcatcatccggctgctggagttcatcggcttcagcggcaaccgggagctgggcctgctgcagctgcgggagggcgccagcggccgctccatgaggtctgccctgtgctgcctgaccatcctggccttccacacctacatcagcctcatcctgggcaccggggaggtgaatgtggccgaggccgagcggctgctggcccccttcctgcagcagttccccaacgtgcgcagcgtcttccagagcgcccaggaggtgttccagaagtgcatctctgtgcaggaggagtggaagcagttccaccacctgtgctactgggagctgatgtggatcaacgtgttccagcagaactggatgcaggcctactactacagcgacctgctgtgcaaggagagcaagtggagcaaggccacctacgtgttcctgaaggccgccatcctgtccatgctgcctgaagaagatgtggtggccaccaatgaaaatgtggtgaccctcttccggcaggtggacagcctgaagcagagaattgctgggaagagcatccccacagagaagtttgctgtgaggaaggcccggcgctacagcgccagcctgcctgcccctgtgaagctgatcctgcctgccctggagatgatgtatgtgtggaatggcttcagcatcgtgtccaagaggaaggacctgtctgagaacctgctggtgacagtggagaaggccgaggccgccctgcagagccagaacttcaacagcttctctgtggatgatgaatgtctggtgaagctgctgaagggctgctgcctgaagaacctgcagaggcccctgcaggccgagctgtgctacaaccacgtggtggagagcgagaagctgctgaagtatgaccactacctggtgcccttcaccctgtttgagctggccagcctgtacaagagccagggcgagattgacaaggccatcaagttcctggagacagccaggaacaactacaaggactacagcctggagagccggctgcacttccgcatccaggccgccctgcacctgtggaggaagcccagcagtgactag

SEQ ID NO: 173079 - DNA, 2049 bp, synthetic construct
  misc_feature 1..2049: note = Description of Artificial Sequence: Synthetic coding sequence
  source 1..2049: mol_type = other DNA
atggatgctgtgctggcctgccgcctgcggggccggggcaacagagtggccgccctgcggccccggcccaggcctgggggcagcgctggccccagcccctttgccctgctgtgtgccggcctgagccctgagcccagggctggggtgggcagcgagttccctgcctggttcctgggcggcagcagccagaggaggaacatggccctgctgggcagcagagctgagctggaggctgatgaagatgtgtttgaagatgccctggagaccatcagcatcagcagccacagcgacatggccaccagcagcctgcactttgccagctgtgacacccagcaggccccccggcagagaggagccagcacagtgagcagcagcagcagcaccaaggtggacctgaagagcggcctggaggagtgtgctgtggccctgaacctcttcctgagcaacaagttcacagatgccctggagctgctgcggccctgggccaaggagagcatgtaccacgccctgggctacagcaccatcgtggtgctgcaggccgtgctgacctttgagcagcaggacatccagaatggcatcagcgccatgaaggatgccctgcagacctgccagaagtacaggaagaagtacacagtggtggagagcttcagcagcctgctgagccggggcagcctggagcagctgtctgaggaggagatgcatgctgagatctgctacgcagaatgtctgctgcagaaggccgccctgacctttgtgcaggatgagaacatgatcaacttcatcaagggcggcctgaagatccgcaccagctaccagatctacaaggagtgcctgagcatcctgcacgagatccagaagaacaagctgcagcaggagttcttctatgaatttgaaggaggagtgaagctgggcagcggggccttcaacctgatgctgagcctgctgcctgcccgcatcatccggctgctggagttcatcggcttcagcggcaaccgggagctgggcctgctgcagctgcgggagggcgccagcggccgctccatgaggtctgccctgtgctgcctgaccatcctggccttccacacctacatcagcctcatcctgggcaccggggaggtgaatgtggccgaggccgagcggctgctggcccccttcctgcagcagttccccaacggcagcctggtgctcttctaccacgcccgcatcgagctgctgaagggcaacctggaggaggcccaggaggtgttccagaagtgcatctctgtgcaggaggagtggaagcagttccaccacctgtgctactgggagctgatgtggatcaacgtgttccagcagaactggatgcaggcctactactacagcgacctgctgtgcaaggagagcaagtggagcaaggccacctacgtgttcctgaaggccgccatcctgtccatgctgcctgaggaggatgtggtggccaccaatgaaaatgtggtgaccctcttccggcaggtggacagcctgaagcagagaattgctgggaagagcatccccacagagaagtttgctgtgaggaaggcccggcgctacagcgccagcctgcctgcccctgtgaagctgatcctgcctgccctggagatgatgtatgtgtggaatggcttcagcatcgtgtccaagaggaaggacctgtctgagaacctgctggtgacagtggagaaggccgaggccgccctgcagagccagaacttcaacagcttctctgtggatgatgagtgcctggtgaagctgctgaagggctgctgcctgaagaacctgcagaggcccctgcaggccgagctgtgctacaaccacgtggtggagagcgagaagctgctgaagtatgaccactacctggtgcccttcaccctgtttgagctggccagcctgtacaagagccagggcgagattgacaaggccatcaagttcctggagacagccaggaacaactacaaggactacagcctggagagccggctgcacttccgcatccaggccgccctgcacctgtggaggaagcccagcagtgactag

SEQ ID NO: 173080 - DNA, 585 bp, synthetic construct
  misc_feature 1..585: note = Description of Artificial Sequence: Synthetic coding sequence
  source 1..585: mol_type = other DNA
atggccctgctgggcagcagagctgagctggaggctgatgaagatgtgtttgaagatgccctggagaccatcagcatcagcagccacagcgacatggccaccagcagcctgcactttgccagctgtgacacccagcaggccccccggcagagaggagccagcacagtgagcagcagcagcagcaccaaggtggacctgaagagcggcctggaggagtgtgctgtggccctgaacctcttcctgagcaacaagttcacagatgccctggagctgctgcggccctgggccaaggagagcatgtaccacgccctgggctacagcaccatcgtggtgctgcaggccgtgctgacctttgagcagcaggacatccagaatggcatcagcgccatgaaggatgccctgcagacctgccagaagtacaggaagaagtacacagtggtggagagcttcagcagcctgctgagccggggcagcctggagcagctgtctgaggaggagatgcatgctgagatctgctacgcagaatgtctgctgcagaaggccgccctgacctttgtgcagaggatgtccttctacccagcctag

SEQ ID NO: 173081 - DNA, 1164 bp, synthetic construct
  misc_feature 1..1164: note = Description of Artificial Sequence: Synthetic coding sequence
  source 1..1164: mol_type = other DNA
atggagcagcccggccaggaccccaccagtgatgatgtgatggacagcttcctggagaagttccagagccagccctaccggggcggcttccacgaggaccagtgggagaaggagtttgagaaggtgcccctcttcatgagccgggcccccagcgagattgaccccagagaaaatccagacctggcctgcctgcagagcatcatctttgatgaggagaggagccctgaggagcaggccaagacctacaaggatgagggcaatgactacttcaaggagaaggactacaagaaggccgtcatctcctacacagagggcctgaagaagaagtgtgccgaccctgacctgaatgctgtgctgtacaccaacagagctgctgcccagtactacctgggcaacttccgcagcgccctgaatgatgtgacagctgccaggaagctgaagccctgccacctgaaggccatcatccggggggccctgtgccacctggagctgaagcactttgctgaggccgtgaactggtgtgatgagggcctgcagattgatgccaaggagaagaagctgctggagatgagggccaaggctgacaagctgaagagaattgagcagagagatgtgaggaaggccaacctgaaggagaagaaggagaggaaccagaatgaggccctgctgcaggccatcaaggccaggaacatccggctgtctgaggccgcctgtgaagatgaagattctgccagcgagggcctgggggagctgttcctggatggcctgagcacagagaacccccacggggcccggctgagcctggatggccagggccgcctgtcctggcctgtgctcttcctgtacccagaatatgcccagagcgacttcatcagcgccttccacgaggacagccgcttcatcgaccacctgatggtgatgtttggagagacccccagctgggacctggagcagaagtactgcccagacaacctggaggtgtactttgaagatgaggacagagctgagctgtacagagtgcctgccaagagcaccctgctgcaggtgctgcagcaccagcgctactttgtgaaggccctgaccccagccttcctggtgtgtgtgggcagcagccccttctgcaagaacttcctgcggggcaggaaggtgtaccagatcagatag

SEQ ID NO: 173082 - DNA, 1515 bp, synthetic construct
  misc_feature 1..1515: note = Description of Artificial Sequence: Synthetic coding sequence
  source 1..1515: mol_type = other DNA
atggccaccagagatgtggtgctgagccgggtgcctgagcaggaggaggacagaacagtgtccctgcagaatgctgctgccatctatgacctgctgagcatcaccctgggccggcggggccagtatgtgatgctgtctgaatgtctggagcgggccatgaagtttgcctttggagagttccacctgtggtaccaggtggccctgtccatggtggcctgtgggaagagcgcctatgctgtgtccctgctgagagaatgtgtgaagctgcggcccagcgaccccaccgtgcccctgatggccgccaaggtgtgcatcggcagcctgcgctggctggaggaggccgagcactttgccatgatggtgatcagcctgggggaggaggccggggagttcctgcccaagggctacctggccctgggcctgacctacagcctgcaggccacagatgccaccctgaagagcaagcaggatgagctgcacaggaaggccctgcagaccctggagcgggcccagcagctggcccccagcgacccccaggtgatcctgtatgtgtccctgcagctggccctggtgcggcagatcagcagcgccatggagcagctgcaggaggccctgaaggtgaggaaggatgatgcccacgccctgcacctgctggccctgctcttcagcgcccagaagcaccaccagcacgccctggatgtggtgaacatggccatcacagagcaccctgagaacttcaacctgatgttcaccaaggtgaagctggagcaggtgctgaagggccctgaggaggccctggtgacctgccggcaggtgctgcggctgtggcagaccctgtacagcttcagccagctgggcggcctggagaaggatggcagctttggagagggcctgaccatgaagaagcagagcggcatgcacctgaccctgcctgatgcccatgatgctgacagcggcagcagaagagccagcagcattgctgccagccggctggaggaggccatgtctgagctgaccatgcccagctctgtgctgaagcagggccccatgcagctgtggaccaccctggagcagatctggctgcaggccgctgagctgttcatggagcagcagcacctgaaggaggccggcttctgcatccaggaggccgccggcctcttccccaccagccacagcgtgctgtacatgaggggccgcctggccgaggtgaagggcaacctggaggaggccaagcagctgtacaaggaggccctgactgtgaacccagatggagtgcgcatcatgcacagcctgggcctgatgctgagccggctgggccacaagagcctggcccagaaggtgctgagagatgctgtggagcggcagagcacctgccacgaggcctggcagggcctgggggaggtgctgcaggcccagggccagaatgaagctgctgtggactgcttcctgacagccctggagctggaggccagcagccctgtgctgcccttcagcatcatcccccgggagctgtag

SEQ ID NO: 173083 - DNA, 2577 bp, synthetic construct
  misc_feature 1..2577: note = Description of Artificial Sequence: Synthetic coding sequence
  source 1..2577: mol_type = other DNA
atggccgccaagggggcccacggcagctacctgaaggtggagagcgagctggagcgctgcagagctgagggccactgggacaggatgcctgagctggtgcggcagctgcagaccctgtccatgcctgggggcggcggcaacagaagaggcagccccagcgctgccttcaccttcccagacacagatgactttgggaagctgctgctggccgaggccctgctggagcagtgcctgaaggagaaccacgccaagatcaaggacagcatgcccctgctggagaagaatgagcccaagatgtctgaggccaagaactacctgagcagcatcctgaaccacggccgcctgagcccccagtacatgtgtgaggccatgctgatcctgggcaagctgcactacgtggagggcagctacagagatgccatctccatgtatgcccgggccggcattgatgacatgtccatggagaacaagcccctgtaccagatgaggctgctgtctgaggcctttgtgatcaagggcctgagcctggagcggctgcccaacagcatcgccagccgcttccggctgacagagcgggaggaggaggtgatcacctgctttgagcgggcctcctggatcgcccaggtgttcctgcaggagctggagaagaccaccaacaacagcaccagccgccacctgaagggctgccaccccctggactatgagctgacctacttcctggaggccgccctgcagagcgcctacgtgaagaacctgaagaagggcaacatcgtgaagggcatgagggagctgcgggaggtgctgaggacagtggagaccaaggccacccagaacttcaaggtgatggccgccaagcacctggccggcgtgctgctgcacagcctgtctgaggagtgctactggagccccctgagccaccccctgcctgagttcatgggcaaggaggagagcagctttgccacccaggccctgaggaagccccacctgtatgaaggagacaacctgtactgccccaaggacaacatcgaggaggccctgctgctgctgctgatcagcgagagcatggccaccagagatgtggtgctgagccgggtgcctgagcaggaggaggacagaacagtgtccctgcagaatgctgctgccatctatgacctgctgagcatcaccctgggccggcggggccagtatgtgatgctgtctgaatgtctggagcgggccatgaagtttgcctttggagagttccacctgtggtaccaggtggccctgtccatggtggcctgtgggaagagcgcctatgctgtgtccctgctgagagaatgtgtgaagctgcggcccagcgaccccaccgtgcccctgatggccgccaaggtgtgcatcggcagcctgcgctggctggaggaggccgagcactttgccatgatggtgatcagcctgggggaggaggccggggagttcctgcccaagggctacctggccctgggcctgacctacagcctgcaggccacagatgccaccctgaagagcaagcaggatgagctgcacaggaaggccctgcagaccctggagcgggcccagcagctggcccccagcgacccccaggtgatcctgtatgtgtccctgcagctggccctggtgcggcagatcagcagcgccatggagcagctgcaggaggccctgaaggtgaggaaggatgatgcccacgccctgcacctgctggccctgctcttcagcgcccagaagcaccaccagcacgccctggatgtggtgaacatggccatcacagagcaccctgagaacttcaacctgatgttcaccaaggtgaagctggagcaggtgctgaagggccctgaggaggccctggtgacctgccggcaggtgctgcggctgtggcagaccctgtacagcttcagccagctgggcggcctggagaaggatggcagctttggagagggcctgaccatgaagaagcagagcggcatgcacctgaccctgcctgatgcccatgatgctgacagcggcagcagaagagccagcagcattgctgccagccggctggaggaggccatgtctgagctgaccatgcccagctctgtgctgaagcagggccccatgcagctgtggaccaccctggagcagatctggctgcaggccgctgagctgttcatggagcagcagcacctgaaggaggccggcttctgcatccaggaggccgccggcctcttccccaccagccacagcgtgctgtacatgaggggccgcctggccgaggtgaagggcaacctggaggaggccaagcagctgtacaaggaggccctgactgtgaacccagatggagtgcgcatcatgcacagcctgggcctgatgctgagccggctgggccacaagagcctggcccagaaggtgctgagagatgctgtggagcggcagagcacctgccacgaggcctggcagggcctgggggaggtgctgcaggcccagggccagaatgaagctgctgtggactgcttcctgacagccctggagctggaggccagcagccctgtgctgcccttcagcatcatcccccgggagctgtag

SEQ ID NO: 173084 - DNA, 2058 bp, synthetic construct
  misc_feature 1..2058: note = Description of Artificial Sequence: Synthetic coding sequence
  source 1..2058: mol_type = other DNA
aagaagaagatcaacttcttcaagaagccccacagcctgagcctgaggaagaagcgggaggaggaggtgatcacctgctttgagcgggcctcctggatcgcccaggtgttcctgcaggagctggagaagaccaccaacaacagcaccagccgccacctgaagggctgccaccccctggactatgagctgacctacttcctggaggccgccctgcagagcgcctacgtgaagaacctgaagaagggcaacatcgtgaagggcatgagggagctgcgggaggtgctgaggacagtggagaccaaggccacccagaacttcaaggtgatggccgccaagcacctggccggcgtgctgctgcacagcctgtctgaggagtgctactggagccccctgagccaccccctgcctgagttcatgggcaaggaggagagcagctttgccacccaggccctgaggaagccccacctgtatgaaggagacaacctgtactgccccaaggacaacatcgaggaggccctgctgctgctgctgatcagcgagagcatggccaccagagatgtggtgctgagccgggtgcctgagcaggaggaggacagaacagtgtccctgcagaatgctgctgccatctatgacctgctgagcatcaccctgggcagaagaggccagtatgtgatgctgtctgagtgcctggagcgggccatgaagtttgccttcggggagttccacctgtggtaccaggtggccctgtccatggtggcctgtgggaagagcgcctatgctgtgtccctgctgcgggagtgtgtgaagctgcggcccagcgaccccaccgtgcccctgatggccgccaaggtgtgcatcggcagcctgcgctggctggaggaggccgagcactttgccatgatggtgatcagcctgggggaggaggccggggagttcctgcccaagggctacctggccctgggcctgacctacagcctgcaggccacagatgccaccctgaagagcaagcaggatgagctgcacaggaaggccctgcagaccctggagcgggcccagcagctggcccccagcgacccccaggtgatcctgtatgtgtccctgcagctggccctggtgcggcagatcagcagcgccatggagcagctgcaggaggccctgaaggtgaggaaggatgatgcccacgccctgcacctgctggccctgctcttcagcgcccagaagcaccaccagcacgccctggatgtggtgaacatggccatcacagagcaccctgagaacttcaacctgatgttcaccaaggtgaagctggagcaggtgctgaagggccctgaggaggccctggtgacctgccggcaggtgctgcggctgtggcagaccctgtacagcttcagccagctgggcggcctggagaaggatggcagctttggagagggcctgaccatgaagaagcagagcggcatgcacctgaccctgcctgatgcccatgatgctgacagcggcagccggcgggccagcagcattgctgccagccggctggaggaggccatgtctgagctgaccatgcccagctctgtgctgaagcagggccccatgcagctgtggaccaccctggagcagatctggctgcaggccgctgagctgttcatggagcagcagcacctgaaggaggccggcttctgcatccaggaggccgccggcctcttccccaccagccacagcgtgctgtacatgaggggccgcctggccgaggtgaagggcaacctggaggaggccaagcagctgtacaaggaggccctgactgtgaacccagatggagtgcgcatcatgcacagcctgggcctgatgctgagccggctgggccacaagagcctggcccagaaggtgctgagagatgctgtggagcggcagagcacctgccacgaggcctggcagggcctgggggaggtgctgcaggcccagggccagaatgaggccgctgtggactgcttcctgacagccctggagctggaggccagcagccctgtgctgcccttcagcatcatcccccgggagctgtag

SEQ ID NO: 173085 - DNA, 441 bp, synthetic construct
  misc_feature 1..441: note = Description of Artificial Sequence: Synthetic coding sequence
  source 1..441: mol_type = other DNA
atggccgccaagggggcccacggcagctacctgaaggtggagagcgagctggagcgctgcagagctgagggccactgggacaggatgcctgagctggtgcggcagctgcagaccctgtccatgcctgggggcggcggcaacagaagaggcagccccagcgctgccttcaccttcccagacacagatgactttgggaagctgctgctggccgaggccctgctggagcagtgcctgaaggagaaccacgccaagatcaaggacagcatgcccctgctggagaagaatgagcccaagatgtctgaggccaagaactacctgagcagcatcctgaaccacggccgcctgagcggcctggccgtgctgctgcggctggtgagcaacagctgggcccaggccatcctgctgctgcagcccccagaggccctgggcctgcaggagtag

SEQ ID NO: 173086 - DNA, 1596 bp, synthetic construct
  misc_feature 1..1596: note = Description of Artificial Sequence: Synthetic coding sequence
  source 1..1596: mol_type = other DNA
atgagcagcgagatggagcccctgctgctggcctggagctacttcagaagaaggaagttccagctgtgtgccgacctgtgcacccagatgctggagaagagcccctatgaccaggccgcctggatcctgaaggcccgggccctgacagagatggtgtacattgatgaaattgatgtggaccaggagggcattgctgagatgatgctggatgaaaatgccatcgcccaggtgccccggcccggcaccagcctgaagctgcccggcaccaaccagacaggaggccccagccaggccgtgcggcccatcacccaggccggccggcccatcaccggcttcctgcggcccagcacccagagcggccggcccggcaccatggagcaggccatccgcacccccaggacagcctacacagcccggcccatcaccagcagcagcggccgctttgtgcggctgggcacagcctccatgctgaccagcccagatggccccttcatcaacctgagccggctgaacctgaccaagtacagccagaagcccaagctggccaaggccctgtttgagtacatcttccaccatgaaaatgatgtgaagaccatccacctggaggatgtggtgctgcacctgggcatctaccccttcctgctgaggaacaagaaccacatcgagaagaatgccctggacctggccgccctgagcacagagcacagccagtacaaggactggtggtggaaggtgcagatcggcaagtgctactaccgcctgggcatgtaccgggaggccgagaagcagttcaagagcgccctgaagcagcaggagatggtggacaccttcctgtacctggccaaggtgtatgtgtccctggaccagcctgtgacagccctgaacctcttcaagcagggcctggacaagtttcctggagaggtgaccctgctgtgtggcatcgcccgcatctatgaggagatgaacaacatgagcagcgctgctgagtactacaaggaggtgctgaagcaggacaacacccacgtggaggccatcgcctgcatcggcagcaaccacttctacagcgaccagcctgagatcgccctgcgcttctaccgccgcctgctgcagatgggcatctacaacggccagctgttcaacaacctgggcctgtgctgcttctacgcccagcagtatgacatgaccctgaccagctttgagcgggccctgagcctggctgaaaatgaggaggaggccgcagatgtgtggtacaacctgggccacgtggccgtgggcatcggggacaccaacctggcccaccagtgcttccggctggccctggtgaacaacaacaaccacgccgaggcctacaacaacctggccgtgctggagatgaggaagggccacgtggagcaggcccgggccctgctgcagacagccagcagcctggccccccacatgtatgagccccacttcaactttgccaccatcagtgacaagatcggggacctgcagaggagctatgtggccgcccagaagtctgaggccgccttcccagaccacgtggacacccagcacctgatcaagcagctgcggcagcactttgccatgctgtag

SEQ ID NO: 173087 - DNA, 636 bp, synthetic construct
  misc_feature 1..636: note = Description of Artificial Sequence: Synthetic coding sequence
  source 1..636: mol_type = other DNA
atgagcagcgagatggagcccctgctgctggcctggagctacttcagaagaaggaagttccagctgtgtgccgacctgtgcacccagatgctggagaagagcccctatgaccagaagatctcctgggcctggtggcacgtgcctgtgatcccagccacctgggaggccgaggccggggagctgctggagcccaggaagaggcggctgcagcaggccgagatcacccccctgtacagcagcctgggcaacaagagcaagacccccagccagaaggccgcctggatcctgaaggcccgggccctgacagagatggtgtacattgatgaaattgatgtggaccaggagggcattgctgagatgatgctggatgaaaatgccatcgcccaggtgcccaggcctggcaccagcctgaagctgcccggcaccaaccagacaggaggccccagccaggccgccaaccacacctcctggaagacccactaccgcttcccccaggcccagcacgccgagtggaaggcccggcactacggcaccggctaccagaacacccagaaccggctgcacagccccccctaccaccagctgctgaggaagatctgccaggccggaaatggcttccacgcctacaagagctag

SEQ ID NO: 173088 - DNA, 1518 bp, synthetic construct
  misc_feature 1..1518: note = Description of Artificial Sequence: Synthetic coding sequence
  source 1..1518: mol_type = other DNA
atgagcagcgagatggagcccctgctgctggcctggagctacttcagaagaaggaagttccagctgtgtgccgacctgtgcacccagatgctggagaagagcccctatgaccaggccgcctggatcctgaaggcccgggccctgacagagatggtgtacattgatgaaattgatgtggaccaggagggcattgctgagatgatgctggatgaaaatgccatcgcccaggtgccccggcccggcaccagcctgaagctgcccggcaccaaccagacaggaggccccagccaggccgtgcggcccatcacccaggccggccggcccatcaccggcttcctgcggcccagcacccagagcggccggcccggcaccatggagcaggccatccgcacccccaggacagcctacacagcccggcccatcaccagcagcagcggccgctttgtgcggctgggcacagcctccatgctgaccagcccagatggccccttcatcaacctgagccggctgaacctgaccaagtacagccagaagcccaagctggccaaggccctgtttgagtacatcttccaccatgaaaatgatgtgaagacagccctggacctggccgccctgagcacagagcacagccagtacaaggactggtggtggaaggtgcagatcggcaagtgctactaccgcctgggcatgtaccgggaggccgagaagcagttcaagagcgccctgaagcagcaggagatggtggacaccttcctgtacctggccaaggtgtatgtgtccctggaccagcctgtgacagccctgaacctcttcaagcagggcctggacaagtttcctggagaggtgaccctgctgtgtggcatcgcccgcatctatgaggagatgaacaacatgagcagcgctgctgagtactacaaggaggtgctgaagcaggacaacacccacgtggaggccatcgcctgcatcggcagcaaccacttctacagcgaccagcctgagatcgccctgcgcttctaccgccgcctgctgcagatgggcatctacaacggccagctgttcaacaacctgggcctgtgctgcttctacgcccagcagtatgacatgaccctgaccagctttgagcgggccctgagcctggctgaaaatgaggaggaggccgcagatgtgtggtacaacctgggccacgtggccgtgggcatcggggacaccaacctggcccaccagtgcttccggctggccctggtgaacaacaacaaccacgccgaggcctacaacaacctggccgtgctggagatgaggaagggccacgtggagcaggcccgggccctgctgcagacagccagcagcctggccccccacatgtatgagccccacttcaactttgccaccatcagtgacaagatcggggacctgcagaggagctatgtggccgcccagaagtctgaggccgccttcccagaccacgtggacacccagcacctgatcaagcagctgcggcagcactttgccatgctgtag

SEQ ID NO: 173089 - DNA, 1428 bp, synthetic construct
  misc_feature 1..1428: note = Description of Artificial Sequence: Synthetic coding sequence
  source 1..1428: mol_type = other DNA
atgagcagcgagatggagcccctgctgctggcctggagctacttcagaagaaggaagttccagctgtgtgccgacctgtgcacccagatgctggagaagagcccctatgaccaggccgcctggatcctgaaggcccgggccctgacagagatggtgtacattgatgaaattgatgtggaccaggagggcattgctgagatgatgctggatgaaaatgccatcgcccaggtgccccggcccggcaccagcctgaagctgcccggcaccaaccagacaggaggccccagccaggccgtgcggcccatcacccaggccggccggcccatcaccggcttcctgcggcccagcacccagagcggccggcccggcaccatggagcaggccatccgcacccccaggacagcctacacagcccggcccatcaccagcagcagcggccgctttgtgcggctgggcacagccctgtttgagtacatcttccaccatgaaaatgatgtgaagacagccctggacctggccgccctgagcacagagcacagccagtacaaggactggtggtggaaggtgcagatcggcaagtgctactaccgcctgggcatgtaccgggaggccgagaagcagttcaagagcgccctgaagcagcaggagatggtggacaccttcctgtacctggccaaggtgtatgtgtccctggaccagcctgtgacagccctgaacctcttcaagcagggcctggacaagtttcctggagaggtgaccctgctgtgtggcatcgcccgcatctatgaggagatgaacaacatgagcagcgctgctgagtactacaaggaggtgctgaagcaggacaacacccacgtggaggccatcgcctgcatcggcagcaaccacttctacagcgaccagcctgagatcgccctgcgcttctaccgccgcctgctgcagatgggcatctacaacggccagctgttcaacaacctgggcctgtgctgcttctacgcccagcagtatgacatgaccctgaccagctttgagcgggccctgagcctggctgaaaatgaggaggaggccgcagatgtgtggtacaacctgggccacgtggccgtgggcatcggggacaccaacctggcccaccagtgcttccggctggccctggtgaacaacaacaaccacgccgaggcctacaacaacctggccgtgctggagatgaggaagggccacgtggagcaggcccgggccctgctgcagacagccagcagcctggccccccacatgtatgagccccacttcaactttgccaccatcagtgacaagatcggggacctgcagaggagctatgtggccgcccagaagtctgaggccgccttcccagaccacgtggacacccagcacctgatcaagcagctgcggcagcactttgccatgctgtag

SEQ ID NO: 173090 - DNA, 753 bp, synthetic construct
  misc_feature 1..753: note = Description of Artificial Sequence: Synthetic coding sequence
  source 1..753: mol_type = other DNA
atgagcagcgagatggagcccctgctgctggcctggagctacttcagaagaaggaagttccagctgtgtgccgacctgtgcacccagatgctggagaagagcccctatgaccaggagatgaacaacatgagcagcgctgctgagtactacaaggaggtgctgaagcaggacaacacccacgtggaggccatcgcctgcatcggcagcaaccacttctacagcgaccagcctgagatcgccctgcgcttctacagaaggctgctgcagatgggcatctacaacggccagctgttcaacaacctgggcctgtgctgcttctacgcccagcagtatgacatgaccctgaccagctttgagcgggccctgagcctggccgagaatgaggaggaggccgcagatgtgtggtacaacctgggccacgtggccgtgggcattggagacaccaacctggcccaccagtgcttccggctggccctggtgaacaacaacaaccacgccgaggcctacaacaacctggccgtgctggagatgaggaaaggacatgtggagcaggcccgggccctgctgcagacagccagcagcctggccccccacatgtatgagccccacttcaactttgccaccatcagtgacaagattggagacctgcagaggagctatgtggccgcccagaagtctgaggccgccttcccagaccacgtggacacccagcacctgatcaagcagctgcggcagcactttgccatgctgtag

SEQ ID NO: 173091 - DNA, 954 bp, synthetic construct
  misc_feature 1..954: note = Description of Artificial Sequence: Synthetic coding sequence
  source 1..954: mol_type = other DNA
atgatcctgtcctatgaagtcatcctgcacgccctggacctggccgccctgagcacagagcacagccagtacaaggactggtggtggaaggtgcagatcggcaagtgctactaccgcctgggcatgtaccgggaggccgagaagcagttcaagagcgccctgaagcagcaggagatggtggacaccttcctgtacctggccaaggtgtatgtgtccctggaccagcctgtgacagccctgaacctcttcaagcagggcctggacaagtttcctggagaggtgaccctgctgtgtggcatcgcccgcatctatgaggagatgaacaacatgagcagcgctgctgagtactacaaggaggtgctgaagcaggacaacacccacgtggaggccatcgcctgcatcggcagcaaccacttctacagcgaccagcctgagatcgccctgcgcttctaccgccgcctgctgcagatgggcatctacaacggccagctgttcaacaacctgggcctgtgctgcttctacgcccagcagtatgacatgaccctgaccagctttgagcgggccctgagcctggctgaaaatgaggaggaggccgcagatgtgtggtacaacctgggccacgtggccgtgggcatcggggacaccaacctggcccaccagtgcttccggctggccctggtgaacaacaacaaccacgccgaggcctacaacaacctggccgtgctggagatgaggaagggccacgtggagcaggcccgggccctgctgcagacagccagcagcctggccccccacatgtatgagccccacttcaactttgccaccatcagtgacaagatcggggacctgcagaggagctatgtggccgcccagaagtctgaggccgccttcccagaccacgtggacacccagcacctgatcaagcagctgcggcagcactttgccatgctgtag

SEQ ID NO: 173092 - DNA, 1548 bp, synthetic construct
  misc_feature 1..1548: note = Description of Artificial Sequence: Synthetic coding sequence
  source 1..1548: mol_type = other DNA
atgagcagcgagatggagcccctgctgctggcctggagctacttcagaagaaggaagttccagctgtgtgccgacctgtgcacccagatgctggagaagagcccctatgaccaggagccagaccctgagctgcctgtgcaccaggccgcctggatcctgaaggcccgggccctgacagagatggtgtacattgatgaaattgatgtggaccaggagggcattgctgagatgatgctggatgaaaatgccatcgcccaggtgccccggcccggcaccagcctgaagctgcccggcaccaaccagacaggaggccccagccaggccgtgcggcccatcacccaggccggccggcccatcaccggcttcctgcggcccagcacccagagcggccggcccggcaccatggagcaggccatccgcacccccaggacagcctacacagcccggcccatcaccagcagcagcggccgctttgtgcggctgggcacagcctccatgctgaccagcccagatggccccttcatcaacctgagccggctgaacctgaccaagtacagccagaagcccaagctggccaaggccctgtttgagtacatcttccaccatgaaaatgatgtgaagacagccctggacctggccgccctgagcacagagcacagccagtacaaggactggtggtggaaggtgcagatcggcaagtgctactaccgcctgggcatgtaccgggaggccgagaagcagttcaagagcgccctgaagcagcaggagatggtggacaccttcctgtacctggccaaggtgtatgtgtccctggaccagcctgtgacagccctgaacctcttcaagcagggcctggacaagtttcctggagaggtgaccctgctgtgtggcatcgcccgcatctatgaggagatgaacaacatgagcagcgctgctgagtactacaaggaggtgctgaagcaggacaacacccacgtggaggccatcgcctgcatcggcagcaaccacttctacagcgaccagcctgagatcgccctgcgcttctaccgccgcctgctgcagatgggcatctacaacggccagctgttcaacaacctgggcctgtgctgcttctacgcccagcagtatgacatgaccctgaccagctttgagcgggccctgagcctggctgaaaatgaggaggaggccgcagatgtgtggtacaacctgggccacgtggccgtgggcatcggggacaccaacctggcccaccagtgcttccggctggccctggtgaacaacaacaaccacgccgaggcctacaacaacctggccgtgctggagatgaggaagggccacgtggagcaggcccgggccctgctgcagacagccagcagcctggccccccacatgtatgagccccacttcaactttgccaccatcagtgacaagatcggggacctgcagaggagctatgtggccgcccagaagtctgaggccgccttcccagaccacgtggacacccagcacctgatcaagcagctgcggcagcactttgccatgctgtag

SEQ ID NO: 173093 - DNA, 831 bp, synthetic construct
  misc_feature 1..831: note = Description of Artificial Sequence: Synthetic coding sequence
  source 1..831: mol_type = other DNA
atgtaccgggaggccgagaagcagttcaagagcgccctgaagcagcaggagatggtggacaccttcctgtacctggccaaggtgtatgtgtccctggaccagcctgtgacagccctgaacctcttcaagcagggcctggacaagtttcctggagaggtgaccctgctgtgtggcatcgcccgcatctatgaggagatgaacaacatgagcagcgctgctgagtactacaaggaggtgctgaagcaggacaacacccacgtggaggccatcgcctgcatcggcagcaaccacttctacagcgaccagcctgagatcgccctgcgcttctacagaaggctgctgcagatgggcatctacaacggccagctgttcaacaacctgggcctgtgctgcttctacgcccagcagtatgacatgaccctgaccagctttgagcgggccctgagcctggccgagaatgaggaggaggccgcagatgtgtggtacaacctgggccacgtggccgtgggcattggagacaccaacctggcccaccagtgcttccggctggccctggtgaacaacaacaaccacgccgaggcctacaacaacctggccgtgctggagatgaggaaaggacatgtggagcaggcccgggccctgctgcagacagccagcagcctggccccccacatgtatgagccccacttcaactttgccaccatcagtgacaagattggagacctgcagaggagctatgtggccgcccagaagtctgaggccgccttcccagaccacgtggacacccagcacctgatcaagcagctgcggcagcactttgccatgctgtag

SEQ ID NO: 173094 - DNA, 348 bp, synthetic construct
  misc_feature 1..348: note = Description of Artificial Sequence: Synthetic coding sequence
  source 1..348: mol_type = other DNA
atgagcagccccagcagccccttccgggagcagagcttcctgtgtgccgctggagatgctggggaggagagccgggtgcaggtgctgaagaatgaggtgcggcggggcagccctgtgctgctgggctgggtggagcaggcctatgctgacaagtgtgtgtgtggccccagcgcccccccagcccccaccccacccagcctgagccagagggtgatgtgcaatgacctcttcaaggtgaaccccttccagctgcagcagttccgggctgaccccagcacagccagcctgctgctgtgccctgggggcctggaccacaagctgaacctgcggggcaaggcctggggctag

SEQ ID NO: 173095 - DNA, 348 bp, synthetic construct; identical to SEQ ID NO: 173094
  misc_feature 1..348: note = Description of Artificial Sequence: Synthetic coding sequence
  source 1..348: mol_type = other DNA

SEQ ID NO: 173096 - DNA, 357 bp, synthetic construct
  misc_feature 1..357: note = Description of Artificial Sequence: Synthetic coding sequence
  source 1..357: mol_type = other DNA
atggagggcggggcctacggggccggcaaggccggcggggcctttgacccctacaccctggtgcggcagccccacaccatcctgcgggtggtgtcctggctgttcagcatcgtggtgtttggcagcatcgtgaatgaaggctacctgaacagcgccagcgagggggaggagttctgcatctacaacagaaaccccaatgcctgcagctatggagtggccgtgggcgtgctggccttcctgacctgcctgctgtacctggccctggatgtgtacttcccccagatcagctctgtgaaggacaggaagaaggctgtgctgagtgacattggagtgtctgcctgggagatgcacagctag

SEQ ID NO: 173097 - DNA, 1389 bp, synthetic construct
  misc_feature 1..1389: note = Description of Artificial Sequence: Synthetic coding sequence
  source 1..1389: mol_type = other DNA
atggccgcccagaggaggagcctgctgcagagcgagcagcagcccagctggacagatgacctgcccctgtgccacctgtctggagtgggcagcgccagcaacagaagctacagcgcagatggcaagggcacagagagccaccccccagaggacagctggctgaagttccgctctgagaacaactgcttcctgtatggagtcttcaacggctatgatggcaacagagtgaccaactttgtggcccagaggctgtctgctgagctgctgctgggccagctgaatgctgagcacgccgaggctgatgtgagaagagtgctgctgcaggcctttgatgtggtggagaggagcttcctggagagcattgatgatgccctggccgagaaggccagcctgcagagccagctgcctgagggcgtgccccagcaccagctgcccccccagtaccagaagatcctggagcggctgaagaccctggagcgggagatctctggaggagccatggctgtggtggccgtgctgctgaacaacaagctgtatgtggccaacgtgggcaccaacagagccctgctgtgcaagagcacagtggatggcctgcaggtgacccagctgaatgtggaccacaccacagaaaatgaagatgagctgttccggctgagccagctgggcctggatgctgggaagatcaagcaggtgggcatcatctgtggccaggagagcaccaggagaattggagactacaaggtgaagtatggctacacagacatcgacctgctgtctgctgccaagagcaagcccatcatcgccgagcctgagatccatggagcccagcccctggatggagtgacaggcttcctggtgctgatgtctgagggcctgtacaaggccctggaggccgcccacggccctggccaggccaaccaggagattgctgccatgattgacacagaatttgccaagcagaccagcctggatgctgtggcccaggccgtggtggacagagtgaagaggatccacagcgacacctttgccagcggcggggagcgggcccgcttctgccccaggcatgaggacatgaccctgctggtgaggaactttggctaccccctgggggagatgagccagcccacccccagccctgccccagctgctgggggccgggtgtaccctgtgtctgtgccctacagcagcgcccagagcaccagcaagacctctgtgaccctgagcctggtgatgcccagccagggccagatggtgaatggagcccacagcgccagcaccctggatgaggccacccccaccctgaccaaggaccccagcaggcctgccagtgacctgacagccatcccccagtgccagctgaacctgctgggcagcctgaccccaggatag

SEQ ID NO: 173098 - DNA, 2082 bp, synthetic construct
  misc_feature 1..2082: note = Description of Artificial Sequence: Synthetic coding sequence
  source 1..2082: mol_type = other DNA
atggcccagggcagccaccagattgacttccaggtgctgcatgacctgcggcagaagtttcctgaggtgcctgaggtggtggtgagccgctgcatgctgcagaacaacaacaacctggatgcctgctgtgctgtgctgagccaggagagcacccgctacctgtatggagagggggacctgaacttcagtgatgacagcggcatcagcggcctgaggaaccacatgaccagcctgaacctggacctgcagagccagaacatctaccaccacggccgggagggcagcaggatgaatggcagcaggaccctgacccacagcatcagtgatggccagctgcagggcggccagagcaacagcgagctgttccagcaggagccccagacagccccagcccaggtgccccagggcttcaacgtgtttggcatgagcagcagcagcggggccagcaacagcgccccccacctgggcttccacctgggcagcaagggcaccagcagcctgagccagcagaccccccgcttcaaccccatcatggtgaccctggcccccaacatccagacaggaagaaacacccccaccagcctgcacatccacggcgtgcccccacctgtgctgaacagcccccagggcaacagcatctacatccggccctacatcaccacccctgggggcaccacccggcagacccagcagcacagcggctgggtgtcccagttcaaccccatgaacccccagcaggtgtaccagcccagccagcccggcccctggaccacctgcccagccagcaaccccctgagccacaccagcagccagcagcccaaccagcagggccaccagaccagccacgtgtacatgcccatcagcagccccaccaccagccagccccccaccatccacagcagcggcagcagccagagcagcgcccacagccagtacaacatccagaacatcagcacaggccccaggaagaaccagatcgagatcaagctggagcccccccagaggaacaacagcagcaagctgcggagcagcggccccaggaccagcagcaccagcagctctgtgaacagccagaccctgaacagaaaccagcccaccgtgtacatcgccgccagcccccccaacacagatgagctgatgagccgcagccagcccaaggtgtacatcagcgccaatgctgccactggagatgagcaggtgatgaggaaccagcccaccctcttcatcagcaccaacagcggggccagcgctgccagcaggaacatgagcggccaggtgtccatgggccctgccttcatccaccaccacccccccaagagccgggccatcggcaacaacagcgccaccagcccccgggtggtggtgacccagcccaacaccaagtacaccttcaagatcaccgtgagccccaacaagcccccagctgtgtcccctggggtggtgagccccacctttgagctgaccaacctgctgaaccacccagaccactacgtggagacagagaacatccagcacctgacagaccccaccctggcccacgtggaccgcatcagcgagaccaggaagctgtccatgggcagtgatgatgctgcctacacccaggccctgctggtgcaccagaaggccaggatggagcggctgcagcgggagctggagatccagaagaagaagctggacaagctgaagtctgaggtgaatgagatggagaacaacctgacccggcggcggctgaagaggagcaacagcatcagccagatccccagcctggaggagatgcagcagctgcggagctgcaaccggcagctgcagattgacatcgactgcctgaccaaggagattgacctcttccaggcccggggcccccacttcaaccccagcgccatccacaacttctatgacaacattggatttgtgggccctgtgccccccaagcccaaggaccagaggagcatcatcaagacccccaagacccaggacacagaagatgatgaaggagcccagtggaactgcacagcctgcaccttcctgaaccacccagccctgatccgctgtgagcagtgtgagatgcccaggcacttctag

SEQ ID NO: 173099 - DNA, 2082 bp, synthetic construct; identical to SEQ ID NO: 173098
  misc_feature 1..2082: note = Description of Artificial Sequence: Synthetic coding sequence
  source 1..2082: mol_type = other DNA

SEQ ID NO: 173100 - DNA, 1611 bp, synthetic construct
  misc_feature 1..1611: note = Description of Artificial Sequence: Synthetic coding sequence
  source 1..1611: mol_type = other DNA
atggcccagggcagccaccagattgacttccaggtgctgcatgacctgcggcagaagtttcctgaggtgcctgaggtggtggtgagccgctgcatgctgcagaacaacaacaacctggatgcctgctgtgctgtgctgagccaggagagcacccgctacctgtatggagagggggacctgaacttcagtgatgacagcggcatcagcggcctgaggaaccacatgaccagcctgaacctggacctgcagagccagaacatctaccaccacggccgggagggcagcaggatgaatggcagcaggaccctgacccacagcatcagtgatggccagctgcagggcggccagagcaacagcgagctgttccagcaggagccccagacagccccagcccaggtgccccagggcttcaacgtgtttggcatgagcagcagcagcggggccagcaacagcgccccccacctgggcttccacctgggcagcaagggcaccagcagcctgagccagcagaccccccgcttcaaccccatcatggtgaccctggcccccaacatccagacaggaagaaacacccccaccagcctgcacatccacggcgtgcccccacctgtgctgaacagcccccagggcaacagcatctacatccggccctacatcaccacccctgggggcaccacccggcagacccagcagcacagcggctgggtgtcccagttcaaccccatgaacccccagcaggtgtaccagcccagccagcccggcccctggaccacctgcccagccagcaaccccctgagccacaccagcagccagcagcccaaccagcagggccaccagaccagccacgtgtacatgcccatcagcagccccaccaccagccagccccccaccatccacagcagcggcagcagccagagcagcgcccacagccagtacaacatccagaacatcagcacaggccccaggaagaaccagatcgagatcaagctggagcccccccagaggaacaacagcagcaagctgcggagcagcggccccaggaccagcagcaccagcagctctgtgaacagccagaccctgaacagaaaccagcccaccgtgtacatcgccgccagcccccccaacacagatgagctgatgagccgcagccagcccaaggtgtacatcagcgccaatgctgccactggagatgagcaggtgatgaggaaccagcccaccctcttcatcagcaccaacagcggggccagcgctgccagcaggaacatgagcggccaggtgtccatgggccctgccttcatccaccaccacccccccaagagccgggccatcggcaacaacagcgccaccagcccccgggtggtggtgacccagcccaacaccaagtacaccttcaagatcaccgtgagccccaacaagcccccagctgtgtcccctggggtggtgagccccacctttgagctgaccaacctgctgaaccacccagaccactacgtggagacagagaacatccagcacctgacagaccccaccctggcccacgtggaccgcatcagcgagaccaggaagctgtccatgggcagtgatgatgctgcctacacccaggacatctag

SEQ ID NO: 173101 - DNA, 1986 bp, synthetic construct
  misc_feature 1..1986: note = Description of Artificial Sequence: Synthetic coding sequence
  source 1..1986: mol_type = other DNA
atgcagaacaacaacaacctggatgcctgctgtgctgtgctgagccaggagagcacccgctacctgtatggagagggggacctgaacttcagtgatgacagcggcatcagcggcctgaggaaccacatgaccagcctgaacctggacctgcagagccagaacatctaccaccacggccgggagggcagcaggatgaatggcagcaggaccctgacccacagcatcagtgatggccagctgcagggcggccagagcaacagcgagctgttccagcaggagccccagacagccccagcccaggtgccccagggcttcaacgtgtttggcatgagcagcagcagcggggccagcaacagcgccccccacctgggcttccacctgggcagcaagggcaccagcagcctgagccagcagaccccccgcttcaaccccatcatggtgaccctggcccccaacatccagacaggaagaaacacccccaccagcctgcacatccacggcgtgcccccacctgtgctgaacagcccccagggcaacagcatctacatccggccctacatcaccacccctgggggcaccacccggcagacccagcagcacagcggctgggtgtcccagttcaaccccatgaacccccagcaggtgtaccagcccagccagcccggcccctggaccacctgcccagccagcaaccccctgagccacaccagcagccagcagcccaaccagcagggccaccagaccagccacgtgtacatgcccatcagcagccccaccaccagccagccccccaccatccacagcagcggcagcagccagagcagcgcccacagccagtacaacatccagaacatcagcacaggccccaggaagaaccagatcgagatcaagctggagcccccccagaggaacaacagcagcaagctgcggagcagcggccccaggaccagcagcaccagcagctctgtgaacagccagaccctgaacagaaaccagcccaccgtgtacatcgccgccagcccccccaacacagatgagctgatgagccgcagccagcccaaggtgtacatcagcgccaatgctgccactggagatgagcaggtgatgaggaaccagcccaccctcttcatcagcaccaacagcggggccagcgctgccagcaggaacatgagcggccaggtgtccatgggccctgccttcatccaccaccacccccccaagagccgggccatcggcaacaacagcgccaccagcccccgggtggtggtgacccagcccaacaccaagtacaccttcaagatcaccgtgagccccaacaagcccccagctgtgtcccctggggtggtgagccccacctttgagctgaccaacctgctgaaccacccagaccactacgtggagacagagaacatccagcacctgacagaccccaccctggcccacgtggaccgcatcagcgagaccaggaagctgtccatgggcagtgatgatgctgcctacacccaggccctgctggtgcaccagaaggccaggatggagcggctgcagcgggagctggagatccagaagaagaagctggacaagctgaagtctgaggtgaatgagatggagaacaacctgacccggcggcggctgaagaggagcaacagcatcagccagatccccagcctggaggagatgcagcagctgcggagctgcaaccggcagctgcagattgacatcgactgcctgaccaaggagattgacctcttccaggcccggggcccccacttcaaccccagcgccatccacaacttctatgacaacattggatttgtgggccctgtgccccccaagcccaaggaccagaggagcatcatcaagacccccaagacccaggacacagaagatgatgaaggagcccagtggaactgcacagcctgcaccttcctgaaccacccagccctgatccgctgtgagcagtgtgagatgcccaggcacttctag

SEQ ID NO: 173102 - DNA, 2082 bp, synthetic construct; identical to SEQ ID NO: 173098
  misc_feature 1..2082: note = Description of Artificial Sequence: Synthetic coding sequence
  source 1..2082: mol_type = other DNA

SEQ ID NO: 173103 - DNA, 714 bp, synthetic construct
  misc_feature 1..714: note = Description of Artificial Sequence: Synthetic coding sequence
  source 1..714: mol_type = other DNA
atgtctgacagcgacctgggggaggatgagggcctgctgagcctggccggcaagaggaagagaagaggcaacctgcccaaggagagcgtgaagatcctgcgggactggctgtacctgcaccgctacaatgcctaccccagcgagcaggagaagctgagcctgagcggccagaccaacctgtctgtgctgcagatctgcaactggttcatcaatgcccggcggcggctgctgcctgacatgctgaggaaggatggcaaggaccccaaccagttcaccatcagcagaagaggaggcaaggccagtgatgtggccctgccccggggcagcagccccagcgtgctggccgtgtctgtgcctgcccccaccaacgtgctgagcctgtctgtgtgcagcatgcccctgcacagcggccagggcgagaagccagctgcccccttccccagaggagagctggagagccccaagcccctggtgaccccaggcagcaccctgaccctgctgaccagggctgaggccggcagccccaccggcggcctcttcaacaccccaccacccaccccacctgagcaggacaaggaggacttcagcagcttccagctgctggtggaggtggccctgcagagagctgctgagatggagctgcagaagcagcaggaccccagcctgcccctgctgcacacccccatccccctggtgtctgagaacccccagtag

SEQ ID NO: 173104 - DNA, 714 bp, synthetic construct; identical to SEQ ID NO: 173103
  misc_feature 1..714: note = Description of Artificial Sequence: Synthetic coding sequence
  source 1..714: mol_type = other DNA

SEQ ID NO: 173105 - DNA, 525 bp, synthetic construct
  misc_feature 1..525: note = Description of Artificial Sequence: Synthetic coding sequence
  source 1..525: mol_type = other DNA
atgtctgacagcgacctgggggaggatgagggcctgctgagcctggccggcaagaggaagagaagaggcaacctgcccaaggagagcgtgaagatcctgcgggactggctgtacctgcaccgctacaatgcctaccccagcgagcaggagaagctgagcctgagcggccagaccaacctgtctgtgctgcagatctgcaactggttcatcaatgcccggcggcggctgctgcctgacatgctgaggaaggatggcaaggaccccaaccagttcaccatcagcagaagaggaggcaaggccagtgatgtggccctgccccggggcagcagccccagcgtgctggccgtgtctgtgcctgcccccaccaacgtgctgagcctgtctgtgtgcagcatgcccctgcacagcggccagggcgagaagccagctgcccccttccccagaggagagctggagagccccaagcccctggtgaccccaggcagcaccctgaccctgctgaccagggctgaggccggcagctag

SEQ ID NO: 173106 - DNA, 714 bp, synthetic construct; identical to SEQ ID NO: 173103
  misc_feature 1..714: note = Description of Artificial Sequence: Synthetic coding sequence
  source 1..714: mol_type = other DNA

SEQ ID NO: 173107 - DNA, 726 bp, synthetic construct
  misc_feature 1..726: note = Description of Artificial Sequence: Synthetic coding sequence
  source 1..726: mol_type = other DNA
atggaggccgctgctgatggccctgctgagacccagagccctgtggagaaggacagccctgccaagacccagagccctgcccaggacaccagcatcatgagcagaaataatgctgacaccggccgggtgctggccctgcctgagcacaagaagaagaggaagggcaacctgcctgctgagagcgtgaagatcctgcgggactggatgtacaagcaccgcttcaaggcctaccccagcgaggaggagaagcagatgctgtctgagaagaccaacctgagcctgctgcagatcagcaactggttcatcaatgcccggcggcgcatcctgcctgacatgctgcagcagaggagaaatgaccccatcatcggccacaagacaggcaaggatgcccacgccacccacctgcagagcacagaggcctctgtgcctgccaagagcggccccagcggccctgacaacgtgcagagcctgcccctgtggcccctgcccaagggccagatgagccgggagaagcagcctgaccctgagagcgcccccagccagaagctgaccggcatcgcccagcccaagaagaaggtgaaggtgtctgtgaccagccccagcagccctgagctggtgtccccagaggagcacgccgacttcagcagcttcctgctgctggtggatgctgctgtgcagagagctgctgagctggagctggagaagaagcaggagcccaacccctag

SEQ ID NO: 173108 - DNA, 726 bp, synthetic construct; identical to SEQ ID NO: 173107
  misc_feature 1..726: note = Description of Artificial Sequence: Synthetic coding sequence
  source 1..726: mol_type = other DNA

SEQ ID NO: 173109 - DNA, 558 bp, synthetic construct
  misc_feature 1..558: note = Description of Artificial Sequence: Synthetic coding sequence
  source 1..558: mol_type = other DNA
atggaggccgctgctgatggccctgctgagacccagagccctgtggagaaggacagccctgccaagacccagagccctgcccaggacaccagcatcatgagcagaaataatgctgacaccggccgggtgctggccctgcctgagcacaagaagaagaggaagggcaacctgcctgctgagagcgtgaagatcctgcgggactggatgtacaagcaccgcttcaaggcctaccccagcgaggaggagaagcagatgctgtctgagaagaccaacctgagcctgctgcgcatcagcaactggttcatcaatgcccggcggcgcatcctgcctgacatgctgcagcagaggagaaatgaccccatcatcggccacaagacaggcaaggatgcccacgccacccacctgcagagcacagaggcctctgtgcctgccaagagcggccctgtggtgcagaccatgtacaaggcctgcccctgtggcccctgccagagggcccgctgccaggagaggagcaaccagatccgcagccggcccctggcccggagcagccctgagtag

SEQ ID NO: 173110 - DNA, 558 bp, synthetic construct; identical to SEQ ID NO: 173109
  misc_feature 1..558: note = Description of Artificial Sequence: Synthetic coding sequence
  source 1..558: mol_type = other DNA

SEQ ID NO: 173111 - DNA, 1773 bp, synthetic construct
  misc_feature 1..1773: note = Description of Artificial Sequence: Synthetic coding sequence
  source 1..1773: mol_type = other DNA
atggccggggctgtgcctggggccatcatggatgaggactactacggcagcgctgctgagtggggagatgaagcagatggcggccagcaggaggatgacagcggggagggggaggatgatgctgaggtgcagcaggagtgcctgcacaagttcagcacccgggactacatcatggagcccagcatcttcaacaccctgaagcgctacttccaggccggcggcagcccagaaaatgtcatccagctgctgtctgagaactacacagctgtggcccagacagtgaacctgctggccgagtggctgatccagacaggagtggagcctgtgcaggtgcaggagaccgtggagaaccacctgaagagcctgctgatcaagcactttgaccccaggaaggctgacagcatcttcacagaggagggggagaccccagcctggctggagcagatgattgcccacaccacctggagggacctcttctacaagctggccgaggcccacccagactgcctgatgctgaacttcaccgtgaagctgatcagtgatgctggctaccagggcgagatcacctctgtgtccacagcctgccagcagctggaggtgttcagccgggtgctgcggaccagcctggccaccatcctggatggaggagaggagaacctggagaagaacctgcctgagtttgccaagatggtgtgccacggggagcacacctacctgtttgcccaggccatgatgtctgtgctggcccaggaggagcagggcggcagcgctgtgagaagaattgcccaggaggtgcagagatttgcccaggagaagggccatgatgccagccagatcaccctggccctgggcacagctgccagctacccccgggcctgccaggccctgggcgccatgctgagcaagggggccctgaacccagctgacatcaccgtgctcttcaagatgttcacctccatggaccccccacctgtggagctgatccgggtgcctgccttcctggacctcttcatgcagagcctcttcaagccaggggcccgcatcaaccaggaccacaagcacaagtacatccacatcctggcctatgctgcctctgtggtggagacctggaagaagaacaagagggtgtccatcaacaaggatgagctgaagagcaccagcaaggctgtggagaccgtgcacaacctgtgctgcaatgaaaacaagggggccagcgagctggtggccgagctgagcaccctgtaccagtgcatccgcttccctgtggtggccatgggcgtgctgaagtgggtggactggacagtgtctgagccccgctacttccagctgcagacagaccacacccctgtgcacctggccctgctggatgagatcagcacctgccaccagctgctgcacccccaggtgctgcagctgctggtgaagctgtttgaaacagagcacagccagctggatgtgatggagcagctggagctgaagaagaccctgctggacaggatggtgcacctgctgagccggggctacgtgctgcctgtggtgtcctacatcaggaagtgcctggagaagctggacacagacatcagcctcatccgctactttgtgacagaggtgctggatgtgattgccccaccctacaccagtgactttgtgcagctgttcctgcccatcctggagaatgacagcattgctggcaccatcaagacagaaggagaacatgaccctgtgacagagttcatcgcccactgcaagagcaacttcatcatggtgaactag

SEQ ID NO: 173112 - DNA, 1773 bp, synthetic construct; identical to SEQ ID NO: 173111
  misc_feature 1..1773: note = Description of Artificial Sequence: Synthetic coding sequence
  source 1..1773: mol_type = other DNA

SEQ ID NO: 173113 - DNA, 774 bp, synthetic construct
  misc_feature 1..774: note = Description of Artificial Sequence: Synthetic coding sequence
  source 1..774: mol_type = other DNA
atgcctgcccgctgtgtggccgcccactgcggcaacaccaccaagagcggcaagagcctcttccgcttccccaaggacagagctgtgcggctgctgtgggacagatttgtgcggggctgcagagctgactggtatggaggaaatgacagaagtgtcatctgcagcgaccactttgccccagcctgctttgatgtgtcctctgtcatccagaagaacctgcgcttcagccagaggctgcggctggtggccggggctgtgcccaccctgcaccgggtgcctgccccagcccccaagagaggagaggagggggaccaggccggccgcctggacaccagaggagagctgcaggccgcccggcacagcgaggccgcccctggccctgtgtcctgcacccggcccagggctgggaagcaggccgccgccagccagatcacctgtgaaaatgagctggtgcagacccagccccatgctgacaaccccagcaacacagtgacctctgtgcccacccactgtgaggagggccctgtgcacaagagcacccagatcagcctgaagaggcccaggcacaggtctgtgggcatccaggccaaggtgaaggccttcggcaagaggctgtgcaatgccaccacccagacagaggagctgtggagcaggaccagcagcctgtttgacatctacagcagtgacagcgagacagacacagactgggacatcaagtctgagcagagcgacctgagctacatggctgtgcaggtgaaggaggagacctgctag

SEQ ID NO: 173114 - DNA, 498 bp, synthetic construct
  misc_feature 1..498: note = Description of Artificial Sequence: Synthetic coding sequence
  source 1..498: mol_type = other DNA
atggagccccccaagatgaaccctgtggtggagcccctgtcctggatgctgggcacctggctgagtgaccccccaggagctggcacctaccccaccctgcagcccttccagtacctggaggaggtgcacatcagccacgtgggccagcccatgctgaacttctccttcaacagcttccacccagacaccaggaagcccatgcaccgggagtgtggcttcatccggctgaagccagacaccaacaaggtggcctttgtgtctgcccagaacacaggagtggtggaggtggaggagggggaggtgaatggccaggagctgtgcatcgccagccacagcatcgcccgcatcagctttgccaaggagccccacgtggagcagatcaccaggaagttccggctgaacagcgagggcaagctggagcagacagtgtccatggccaccaccacccagcccatgacccagcacctgcacgtgacctacaagaaggtgaccccctag

SEQ ID NO: 173115 - DNA, 1734 bp, synthetic construct
  misc_feature 1..1734: note = Description of Artificial Sequence: Synthetic coding sequence
  source 1..1734: mol_type = other DNA
atggtgatctgctgtgccgctgtgaactgcagcaaccggcagggcaagggggagaagagagctgtgtccttccaccgcttccccctgaaggacagcaagaggctcatccagtggctgaaggctgtgcagagggacaactggacccccaccaagtacagcttcctgtgcagcgagcacttcaccaaggacagcttcagcaagaggctggaggaccagcaccggctgctgaagcccacagctgtgcccagcatcttccacctgacagagaagaagagaggagctgggggccacggccgcaccaggaggaaggatgccagcaaggccactggaggagtgcggggccacagcagcgctgccaccagcagaggagctgctggctggagccccagcagcagcggcaaccccatggccaagccagagagccggcggctgaagcaggccgccctgcagggcgaggccacccccagggctgcccaggaggccgccagccaggagcaggcccagcaggccctggagaggaccccaggagatggcctggccaccatggtggccggcagccagggcaaggccgaggccagcgccacagatgctggagatgaaagtgccaccagcagcattgagggcggcgtgacagacaagagcggcatctccatggatgacttcaccccacctggcagcggggcctgcaagttcatcggcagcctgcacagctacagcttcagcagcaagcacacccgggagcggcccagcgtgccccgggagcccatcgacaggaagaggctgaagaaggatgtggagcccagctgcagcggcagcagcctgggccctgacaagggcctggcccagagcccccccagcagcagcctgacagccaccccccagaagcccagccagagccccagcgcccccccagcagatgtgacccccaagccagccacagaagctgtgcagagcgagcacagtgatgccagccccatgagcatcaatgaagtcatcctgagcgccagcggggcctgcaagctgattgacagcctgcacagctactgcttcagcagccggcagaacaagagccaggtgtgctgcctgcgggagcaggtggagaagaagaatggagagctgaagagcctgcggcagagggtgtccagaagtgacagccaggtgaggaagctgcaggagaagctggatgagctgcggcgggtgtctgtgccctaccccagcagcctgctgagccccagccgggagccccccaagatgaaccctgtggtggagcccctgtcctggatgctgggcacctggctgagtgaccccccaggagctggcacctaccccaccctgcagcccttccagtacctggaggaggtgcacatcagccacgtgggccagcccatgctgaacttctccttcaacagcttccacccagacaccaggaagcccatgcaccgggagtgtggcttcatccggctgaagccagacaccaacaaggtggcctttgtgtctgcccagaacacaggagtggtggaggtggaggagggggaggtgaatggccaggagctgtgcatcgccagccacagcatcgcccgcatcagctttgccaaggagccccacgtggagcagatcaccaggaagttccggctgaacagcgagggcaagctggagcagacagtgtccatggccaccaccacccagcccatgacccagcacctgcacgtgacctacaagaaggtgaccccctag

SEQ ID NO: 173116 - DNA, 510 bp, synthetic construct
  misc_feature 1..510: note = Description of Artificial Sequence: Synthetic coding sequence
  source 1..510: mol_type = other DNA
atgagcatcaatgaggtgatcctgagcgccagcggggcctgcaagctgattgacagcctgcacagctactgcttcagcagccggcagaacaagagccaggtgtgctgcctgcgggagcaggtggagaagaagaatggagagctgaagagcctgcggcagagggtgtccagaagtgacagccaggtgaggaagctgcaggagaagctggatgagctgcggcgggtgtctgtgccctaccccagcagcctgctgagccccagccgggagccccccaagatgaaccctgtggtggagcccctgtcctggatgctgggcacctggctgagtgaccccccaggggccggcacctaccccaccctgcagcccttccagtacctggaggaggtgcacatcagccacgtgggccagcccatgctgaacttctccttcaacagcttccacccagacaccaggaagcccatgcacagagaatgtggcttcatccggctgaagccaggcagcagcggctag

SEQ ID NO: 173117 - DNA, 1062 bp, synthetic construct
  misc_feature 1..1062: note = Description of Artificial Sequence: Synthetic coding sequence
  source 1..1062: mol_type = other DNA
atgaagagggacagctgggtgcccagcaagtaccagttcctgtgcagcgaccacttcaccccagacagcctggacatccgctggggcatccgctacctgaagcagacagctgtgcccaccatcttcagcctgcctgaggacaaccagggcaaggaccccagcaagaagaagagccagaagaagaacctggaggatgagaaggaggtgtgccccaaggccaagtctgaggagagctttgtgctgaatgagaccaagaagaacatcgtgaacacagatgtgccccaccagcaccctgagctgctgcacagcagcagcctggtgaagcccccagcccccaagacaggcagcatccagaacaacatgctgaccctgaacctggtgaagcagcacacaggcaagccagagagcaccctggagacctctgtgaaccaggacaccggccggggcggcttccacacctgctttgagaacctgaacagcaccaccatcaccctgaccaccagcaacagcgagagcatccaccagagcctggagacccaggaggtgctggaggtgaccaccagccacctggccaaccccaacttcaccagcaacagcatggagatcaagagcgcccaggagaaccccttcctgttcagcaccatcaaccagacagtggaggagctgaacaccaacaaggagagcgtcatcgccatctttgtgcctgctgagaacagcaagcccagcgtgaacagcttcatcagcgcccagaaggagaccacagagatggaggacacagacatcgaggacagcctgtacaaggatgtggactatggaacagaggtgctgcagatcgagcacagctactgccggcaggacatcaacaaggagcacctgtggcagaaggtgtccaagctgcacagcaagatcaccctgctggagctgaaggagcagcagaccctgggccgcctgaagagcctggaggccctgatccggcagctgaagcaggagaactggctgtctgaggagaatgtgaagatcatcgagaaccacttcaccacctatgaggtgaccatgatctag

SEQ ID NO: 173118 - DNA, 1188 bp, synthetic construct
  misc_feature 1..1188: note = Description of Artificial Sequence: Synthetic coding sequence
  source 1..1188: mol_type = other DNA
atgccccgctactgtgccgccatctgctgcaagaacagaagaggaagaaacaacaaggacaggaagctgtccttctaccccttccccctgcatgacaaggagcggctggagaagtggctgaagaacatgaagagggacagctgggtgcccagcaagtaccagttcctgtgcagcgaccacttcaccccagacagcctggacatccgctggggcatccgctacctgaagcagacagctgtgcccaccatcttcagcctgcctgaggacaaccagggcaaggaccccagcaagaagaagagccagaagaagaacctggaggatgagaaggaggtgtgccccaaggccaagtctgaggagagctttgtgctgaatgagaccaagaagaacatcgtgaacacagatgtgccccaccagcaccctgagctgctgcacagcagcagcctggtgaagcccccagcccccaagacaggcagcatccagaacaacatgctgaccctgaacctggtgaagcagcacacaggcaagccagagagcaccctggagacctctgtgaaccaggacaccggccggggcggcttccacacctgctttgagaacctgaacagcaccaccatcaccctgaccaccagcaacagcgagagcatccaccagagcctggagacccaggaggtgctggaggtgaccaccagccacctggccaaccccaacttcaccagcaacagcatggagatcaagagcgcccaggagaaccccttcctgttcagcaccatcaaccagacagtggaggagctgaacaccaacaaggagagcgtcatcgccatctttgtgcctgctgagaacagcaagcccagcgtgaacagcttcatcagcgcccagaaggagaccacagagatggaggacacagacatcgaggacagcctgtacaaggatgtggactatggaacagaggtgctgcagatcgagcacagctactgccggcaggacatcaacaaggagcacctgtggcagaaggtgtccaagctgcacagcaagatcaccctgctggagctgaaggagcagcagaccctgggccgcctgaagagcctggaggccctgatccggcagctgaagcaggagaactggctgtctgaggagaatgtgaagatcatcgagaaccacttcaccacctatgaggtgaccatgatctag

SEQ ID NO: 173119 - DNA, 669 bp, synthetic construct
  misc_feature 1..669: note = Description of Artificial Sequence: Synthetic coding sequence
  source 1..669: mol_type = other DNA
atggtgaagtgctgcagcgccatcggctgtgccagccgctgcctgcccaacagcaagctgaagggcctgaccttccacgtgttccccacagatgagaacatcaagaggaagtgggtgctggccatgaagaggctggatgtgaatgctgctggcatctgggagcccaagaagggagatgtgctgtgcagccgccacttcaagaagacagactttgacagaagtgcccccaacatcaagctgaagccaggagtcatccccagcatctttgacagcccctaccacctgcagggcaagcgggagaagctgcactgcaggaagaacttcaccctgaagacagtgcctgccaccaactacaaccaccacctggtgggcgccagcagctgcatcgaggagttccagagccagttcatctttgagcacagctacagcgtgatggacagccccaagaagctgaagcacaagctggaccacgtgattggagagctggaggacaccaaggagagcctgagaaatgtgctggaccgggagaagcgcttccagaagagcctgaggaagaccatccgggagctgaaggatgaatgtctcatcagccaggagacagccaaccggctggacaccttctgctgggactgctgccaggagagcattgagcaggactacatctcctag

SEQ ID NO: 173120 - DNA, 99 bp, synthetic construct
  misc_feature 1..99: note = Description of Artificial Sequence: Synthetic coding sequence
  source 1..99: mol_type = other DNA
atggtgaagtgctgcagcgccatcggctgtgccagccgctgcctgcccaacagcaagctgaagggcctgaccttccacgtgttccccacagatgaatag

SEQ ID NO: 173121 - DNA, 243 bp, synthetic construct
  misc_feature 1..243: note = Description of Artificial Sequence: Synthetic coding sequence
  source 1..243: mol_type = other DNA
atggtgaagtgctgcagcgccatcggctgtgccagccgctgcctgcccaacagcaagctgaagggcctgaccttccacgtgttccccacagatgagaacatcaagaggaagtgggtgctggccatgaagaggctggatgtgaatgctgctggcatctgggagcccaagaagggagatgtgctgtgcagccgccacttcaagaagacagactttgacagaagtgcccccaacatcaagctgtag

SEQ ID NO: 173122 - DNA, 669 bp, synthetic construct; identical to SEQ ID NO: 173119
  misc_feature 1..669: note = Description of Artificial Sequence: Synthetic coding sequence
  source 1..669: mol_type = other DNA

SEQ ID NO: 173123 - DNA, 825 bp, synthetic construct
  misc_feature 1..825: note = Description of Artificial Sequence: Synthetic coding sequence
  source 1..825: mol_type = other DNA
atgcccaagtactgccgggcccccaactgcagcaacacagctggccgcctgggcgctgacaacagacctgtgtccttctacaagttccccctgaaggatggcccccggctgcaggcctggctgcagcacatgggctgtgagcactgggtgcccagctgccaccagcacctgtgcagcgagcacttcacccccagctgcttccagtggcgctggggcgtgcgctacctgcggccagatgctgtgcccagcatcttcagccggggccccccagccaagagccagaggaggaccaggagcacccagaagcctgtgagccccccaccacccctgcagaagaacacccccctgccccagagccctgccatccctgtgtctggccctgtgcggctggtggtgctgggccccaccagcggcagccccaagacagtggccaccatgctgctgacccccctggccccagcccccaccccagagaggagccagcctgaggtgcctgcccagcaggcccagacaggcctgggccctgtgctgggcgccctgcagaggagagtgcggcggctgcagcgctgccaggagcggcaccaggcccagctgcaggccctggagcggctggcccagcagctgcatggagagagcctgctggcccgggcccggcggggcctgcagaggctgaccacagcccagaccctgggccctgaggagagccagaccttcaccatcatctgtggcggccctgacatcgccatggtgctggcccaggaccctgccccagccaccgtggatgccaagccagagctgctggacacccgcatccccagcgcctag

SEQ ID NO: 173124 - DNA, 825 bp, synthetic construct; identical to SEQ ID NO: 173123
  misc_feature 1..825: note = Description of Artificial Sequence: Synthetic coding sequence
  source 1..825: mol_type = other DNA

SEQ ID NO: 173125 - DNA, 390 bp, synthetic construct
  misc_feature 1..390: note = Description of Artificial Sequence: Synthetic coding sequence
  source 1..390: mol_type = other DNA
atgctgctgacccccctggccccagcccccaccccagagaggagccagcctgaggtgcctgcccagcaggcccagacaggcctgggccctgtgctgggcgccctgcagaggagagtgcggcggctgcagcgctgccaggagcggcaccaggcccagctgcaggccctggagcggctggcccagcagctgcacggggagagcctgctggcccgggcccggcggggcctgcagaggctgaccacagcccagaccctgggccctgaggagagccagaccttcaccatcatctgtggcggccctgacatcgccatggtgctggcccaggaccctgccccagccaccgtggatgccaagccagagctgctggacacccgcatccccagcgcctag

SEQ ID NO: 173126 - DNA, 2712 bp, synthetic construct
  misc_feature 1..2712: note = Description of Artificial Sequence: Synthetic coding sequence
  source 1..2712: mol_type = other DNA
atgaccaggagctgcagcgctgtgggctgcagcacccgggacacagtgctgagccgggagcggggcctgtccttccaccagttccccacagacaccatccagaggagcaagtggatccgggctgtgaacagagtggaccccaggagcaagaagatctggatccctggccctggggccatcctgtgcagcaagcacttccaggagagtgactttgagagctatggcatccggaggaagctgaagaagggagctgtgcccagcgtgtccctgtacaagatcccccagggcgtgcacctgaagggcaaggcccggcagaagatcctgaagcagcccctgcctgacaacagccaggaggtggccacagaggaccacaactacagcctgaagacccccctgaccatcggggctgagaagctggccgaggtgcagcagatgctgcaggtgtccaagaagaggctcatctctgtgaagaactacaggatgatcaagaagaggaagggcctgcggctgattgatgccctggtggaggagaagctgctgtctgaggagacagaatgtctgctgcgggcccagttcagtgacttcaagtgggagctgtacaactggagggagacagatgagtacagcgctgagatgaagcagtttgcctgcaccctgtacctgtgcagcagcaaggtgtatgactatgtgaggaagatcctgaagctgccccacagcagcatcctgcggacctggctgagcaagtgccagcccagccctggcttcaacagcaacatcttctccttcctgcagaggagagtggagaatggagaccagctgtaccagtactgcagcctgctgatcaagtccatgcccctgaagcagcagctgcagtgggaccccagcagccacagcctgcagggcttcatggactttggcctgggcaagctggatgctgatgagacccccctggccagcgagaccgtgctgctgatggctgtgggcatcttcggccactggaggacccccctgggctacttctttgtgaacagagccagcggctacctgcaggcccagctgctgcggctgaccatcggcaagctgagtgacatcggcatcaccgtgctggccgtgaccagtgatgccacagcccacagcgtgcagatggccaaggccctgggcatccacattgatggagatgacatgaagtgcaccttccagcaccccagcagcagcagccagcagatcgcctacttctttgacagctgccacctgctgcggctcatcagaaatgccttccagaacttccagagcatccagttcatcaatggcatcgcccactggcagcacctggtggagctggtggccctggaggagcaggagctgagcaacatggagcgcatccccagcaccctggccaacctgaagaaccacgtgctgaaggtgaacagcgccacccagctgttcagcgagagcgtggccagcgccctggagtacctgctgagcctggacctgccccccttccagaactgcatcggcaccatccacttcctgcggctcatcaacaacctgtttgacatcttcaacagcaggaactgctacggcaagggcctgaagggccccctgctgcctgagacctacagcaagatcaaccacgtgctgattgaggccaagaccatctttgtgaccctgagtgacaccagcaacaaccagatcatcaagggcaagcagaagctgggcttcctgggcttcctgctgaatgctgagagcctgaagtggctgtaccagaactacgtgttccccaaggtgatgcccttcccctacctgctgacctacaagttcagccatgaccacctggagctgttcctgaagatgctgcggcaggtgctggtgaccagcagcagccccacctgcatggccttccagaaggcctactacaacctggagacccgctacaagttccaggatgaggtgttcctgagcaaggtgtccatctttgacatcagcatcgcccggaggaaggacctggccctgtggacagtgcagaggcagtatggagtgtctgtgaccaagacagtgttccacgaggagggcatctgccaggactggagccactgcagcctgtctgaggccctgctggacctgagtgaccacagaagaaacctgatctgctacgccggctacgtggccaacaagctgagcgccctgctgacctgtgaggactgcatcacagccctgtatgccagtgacctgaaggccagcaagattggcagcctgctgtttgtgaagaagaagaatggcctgcacttccccagcgagagcctgtgcagggtcatcaacatctgtgagcgggtggtgaggacccacagcaggatggccatctttgagctggtgtccaagcagcgggagctgtacctgcagcagaagatcctgtgtgagctgagcggccacatcaacctgtttgtggatgtgaacaagcacctgtttgatggagaggtgtgtgccatcaaccactttgtgaagctgctgaaggacatcatcatctgcttcctgaacatccgggccaagaatgtggcccagaaccccctgaagcaccacagcgagaggacagacatgaagaccctgagcaggaagcactggagctctgtgcaggactacaagtgcagcagctttgccaacaccagcagcaagttccgccacctgctgagcaatgatggctaccccttcaagtag

SEQ ID NO: 173127 - DNA, 2712 bp, synthetic construct; identical to SEQ ID NO: 173126
  misc_feature 1..2712: note = Description of Artificial Sequence: Synthetic coding sequence
  source 1..2712: mol_type = other DNA

SEQ ID NO: 173128 - DNA, 642 bp, synthetic construct
  misc_feature 1..642: note = Description of Artificial Sequence: Synthetic coding sequence
  source 1..642: mol_type = other DNA
atggtgcagagctgcagcgcctacggctgcaagaacagatatgacaaggacaagcctgtgtccttccacaagttccccctgacccggcccagcctgtgcaaggagtgggaggccgctgtgcggaggaagaacttcaagcccaccaagtacagcagcatctgcagcgagcacttcaccccagactgcttcaagcgggagtgcaacaacaagctgctgaaggaaaatgctgtgcccaccatcttcctgtgcacagagccccatgacaagaaggaggacctgctggagccccaggagcagctgcccccaccacccctgcccccacctgtgtcccaggtggatgctgccatcggcctgctgatgccacccctgcagacccctgtgaacctgagcgtcttctgtgaccacaactacacagtggaggacaccatgcaccagaggaagaggatccaccagctggagcagcaggtggagaagctgaggaagaagctgaagacagcccagcagcgctgccggcggcaggagcggcagctggagaagctgaaggaggtggtgcacttccagaaggagaaggatgatgtgtctgagcggggctacgtgatcctgcccaatgactactttgagatcgtggaggtgcctgcctag

SEQ ID NO: 173129 - DNA, 162 bp, synthetic construct
  misc_feature 1..162: note = Description of Artificial Sequence: Synthetic coding sequence
  source 1..162: mol_type = other DNA
atggtgcagagctgcagcgcctacggctgcaagaacagatatgacaaggacaagcctgtgtccttccacaagaagaagatcttctggagccacaggaacagcttcccccacctgctgtaccgcctgctcttcccccggctgatgctgctgctggactactag

SEQ ID NO: 173130 - DNA, 687 bp, synthetic construct
  misc_feature 1..687: note = Description of Artificial Sequence: Synthetic coding sequence
  source 1..687: mol_type = other DNA
atgcccaccaactgtgccgccgccggctgtgccaccacctacaacaagcacatcaacatctccttccaccgcttccccctggaccccaagaggaggaaggagtgggtgcggctggtgcggaggaagaactttgtgcctgggaagcacaccttcctgtgcagcaagcactttgaggccagctgctttgacctgaccggccagacccggcggctgaagatggatgctgtgcccaccatctttgacttctgcacccacatcaagtccatgaagctgaagagcaggaacctgctgaagaagaacaacagctgcagccctgctggccccagcaacctgaagagcaacatcagcagccagcaggtgctgctggagcacagctatgccttcaggaaccccatggaggccaagaagaggatcatcaagctggagaaggagatcgccagcctgcggaggaagatgaagacctgcctgcagaaggagcggcgggccacccggcgctggatcaaggccacctgcctggtgaagaacctggaggccaacagcgtgctgcccaagggcaccagcgagcacatgctgcccacagccctgagcagcctgcccctggaggacttcaagatcctggagcaggaccagcaggacaagaccctgctgagcctgaacctgaagcagaccaagagcaccttcatctag

SEQ ID NO: 173131 - DNA, 720 bp, synthetic construct
  misc_feature 1..720: note = Description of Artificial Sequence: Synthetic coding sequence
  source 1..720: mol_type = other DNA
atgcccaagagctgtgccgcccggcagtgctgcaaccgctacagcagcaggaggaagcagctgaccttccaccgcttccccttcagcaggcctgagctgctgaaggagtgggtgctgaacatcggccggggcaacttcaagcccaagcagcacacagtcatctgcagcgagcacttccggcctgagtgcttcagcgcctttggaaacaggaagaacctgaagcacaatgctgtgcccaccgtgtttgccttccaggaccccacccagcaggtgagagaaaatacagatcctgccagcgagagaggaaatgccagcagcagccagaaggagaaggtgctgcctgaggccggggccggggaggacagccctggaagaaacatggacacagccctggaggagctgcagctgcccccaaatgctgagggccacgtgaagcaggtgagcccccggcggccccaggccacagaagctgtgggccggcccaccggccctgctggcctgcggaggacccccaacaagcagcccagcgaccacagctatgccctgctggacctggacagcctgaagaagaagctgttcctgaccctgaaggaaaatgagaagctgaggaagaggctgcaggcccagaggctggtgatgaggaggatgagcagccggctgcgggcctgcaagggccaccagggcctgcaggcccggctgggccctgagcagcagagctag

SEQ ID NO: 173132 - DNA, 717 bp, synthetic construct
  misc_feature 1..717: note = Description of Artificial Sequence: Synthetic coding sequence
  source 1..717: mol_type = other DNA
atgcccaagagctgtgccgcccggcagtgctgcaaccgctacagcagcaggaggaagcagctgaccttccaccgcttccccttcagcaggcctgagctgctgaaggagtgggtgctgaacatcggccggggcaacttcaagcccaagcagcacacagtcatctgcagcgagcacttccggcctgagtgcttcagcgcctttggaaacaggaagaacctgaagcacaatgctgtgcccaccgtgtttgccttccaggaccccacccaggtgcgggagaacacagatcctgccagcgagagaggaaatgccagcagcagccagaaggagaaggtgctgcctgaggccggggccggggaggacagccctggcaggaacatggacacagccctggaggagctgcagctgcccccaaatgctgagggccacgtgaagcaggtgagcccccggcggccccaggccacagaggccgtgggccggcccactggacctgctggcctgcggaggacccccaacaagcagcccagcgaccacagctatgccctgctggacctggacagcctgaagaagaagctgttcctgaccctgaaggaaaatgagaagctgaggaagaggctgcaggcccagaggctggtgatgaggaggatgagcagccggctgcgggcctgcaagggccaccagggcctgcaggcccggctgggccctgagcagcagagctag

SEQ ID NO: 173133 - DNA, 528 bp, synthetic construct
  misc_feature 1..528: note = Description of Artificial Sequence: Synthetic coding sequence
  source 1..528: mol_type = other DNA
atgcccaagagctgtgccgcccggcagtgctgcaaccgctacagcagcaggaggaagcagctgaccttccaccgcttccccttcagcaggcctgagctgctgaaggagtgggtgctgaacatcggccggggcaacttcaagcccaagcagcacacagtcatctgcagcgagcacttccggcctgagtgcttcagcgcctttggaaacaggaagaacctgaagcacaatgctgtgcccaccgtgtttgccttccaggaccccacccagcaggtgagagaaaatacagatcctgccagcgagagaggaaatgccagcagcagccagaaggagaagaccagcccctgccgcagccaggtgctgcctgaggccggggccggggaggacagccctggcaggaacatggacacagccctggaggagctgcagctgcccccaaatgctgagggccacgtgaagcaggccatgctgttcaacgtggagaatggcaccccagccagccgggaggccctgtggctgtctgaggagtag

SEQ ID NO: 173134 - DNA, 732 bp, synthetic construct
  misc_feature 1..732: note = Description of Artificial Sequence: Synthetic coding sequence
  source 1..732: mol_type = other DNA
atggagcacgccttcacccccctggagcccctgctgagcacaggcaacctgaagtactgcctggtgatcctgaaccagcccctggacaactacttccgccacctgtggaacaaggccctgctgcgggcctgtgctgatggaggagccaaccggctgtatgacatcacagaaggagagcgggagagcttcctgcctgagttcatcaatggagactttgacagcatccggcctgaggtgcgggagtactatgccaccaagggctgtgagctgatcagcaccccagaccaggaccacacagacttcaccaagtgcctgaagatgctgcagaagaagattgaggagaaggacctgaaggtggatgtgattgtgaccctgggcggcctggccggccgctttgaccagatcatggcctctgtgaacaccctcttccaggccacccacatcacccccttccccatcatcatcatccaggaggagagcctcatctacctgctgcagcccgggaagcaccggctgcacgtggacaccggcatggagggggactggtgtggcctcatccctgtgggccagccctgcatgcaggtgaccaccaccggcctgaagtggaacctgaccaatgatgtgctggccttcggcaccctggtgtccaccagcaacacctatgatggcagcggcgtggtgacagtggagacagaccaccccctgctgtggaccatggccatcaagagctag

SEQ ID NO: 173135 - DNA, 585 bp, synthetic construct
  misc_feature 1..585: note = Description of Artificial Sequence: Synthetic coding sequence
  source 1..585: mol_type = other DNA
atggagcacgccttcacccccctggagcccctgctgagcacaggcaacctgaagtactgcctggtgatcctgaaccagcccctggacaactacttccgccacctgtggaacaaggccctgctgcgggcctgtgctgatggaggagccaaccggctgtatgacatcacagaaggagagcgggagagcttcctgcctgagttcatcaatggagactttgacagcatccggcctgaggtgcgggagtactatgccaccaagggctgtgagctgatcagcaccccagaccaggaccacacagacttcaccaagtgcctgaagatgctgcagaagaagattgaggagaaggacctgaagggcaagcaccggctgcacgtggacaccggcatggagggggactggtgtggcctcatccctgtgggccagccctgcatgcaggtgaccaccaccggcctgaagtggaacctgaccaatgatgtgctggccttcggcaccctggtgtccaccagcaacacctatgatggcagcggcgtggtgacagtggagacagaccaccccctgctgtggaccatggccatcaagagctag

SEQ ID NO: 173136 - DNA, 375 bp, synthetic construct
  misc_feature 1..375: note = Description of Artificial Sequence: Synthetic coding sequence
  source 1..375: mol_type = other DNA
atggtggatgtgattgtgaccctgggcggcctggccggccgctttgaccagatcatggcctctgtgaacaccctcttccaggccacccacatcacccccttccccatcatcatcatccaggaggagagcctcatctacctgctgcagcccgggaagcaccggctgcacgtggacaccggcatggagggggactggtgtggcctcatccctgtgggccagccctgcatgcaggtgaccaccaccggcctgaagtggaacctgcggacctgtgactacaccaggaccacctggatcgccaaggacaaccctgtgcccaggctcatccgcctcatccggctgaaccacatctgcaaggtgcccctggccatcaagtag

SEQ ID NO: 173137 - DNA, 504 bp, synthetic construct
  misc_feature 1..504: note = Description of Artificial Sequence: Synthetic coding sequence
  source 1..504: mol_type = other DNA
atggagcacgccttcacccccctggagcccctgctgagcacaggcaacctgaagtactgcctggtgatcctgaaccagcccctggacaactacttccgccacctgtggaacaaggccctgctgcgggcctgtgctgatggaggagccaaccggctgtatgacatcacagaaggagagcgggagagcttcctgcctgagttcatcaatggagactttgacagcatccggcctgaggtgcgggagtactatgccaccaagggctgtgagctgatcagcaccccagaccaggaccacacagacttcaccaagtgcctgaagatgctgcagaagaagattgaggagaaggacctgaaggtggatgtgattgtgaccctgggcggcctggccggccgctttgaccagatcatggcctctgtgaacaccctcttccaggccacccacatcacccccttccccatcatcatcatccaggaggagagcctcatctacctgctgcagccctag

SEQ ID NO: 173138 - DNA, 693 bp, synthetic construct
  misc_feature 1..693: note = Description of Artificial Sequence: Synthetic coding sequence
  source 1..693: mol_type = other DNA
atggcccagggcctcatcgaggtggagaggaagttcctgcccggccctggaacagaggagcggctgcaggagctgggcggcaccctggagtacagagtgaccttccgggacacctactatgacaccccagagctgagcctgatgcaggccgaccactggctgcggcggcgggaggacagcggctgggagctgaagtgccctggagctgctggggtgctgggcccccacacagagtacaaggagctgacagctgagcccaccatcgtggcccagctgtgcaaggtgctgcgggcagatggcctgggcgctggagatgtggccgctgtgctgggccccctgggcctgcaggaggtggccagctttgtgaccaagaggtctgcctggaagctggtgctgctgggcgcagatgaggaggagccccagctgcgggtggacctggacacagctgactttggctatgctgtgggggaggtggaggccctggtgcatgaggaggccgaggtgcccacagccctggagaagatccaccggctgagctccatgctgggcgtgcctgcccaggagacagccccagccaagctgattgtgtacctgcagcgcttccggccccaggactaccagaggctgctggaggtgaacagcagccgggagcggccccaggagacagaagatcctgaccactgcctgggctag

SEQ ID NO: 173139 - DNA, 693 bp, synthetic construct; identical to SEQ ID NO: 173138
  misc_feature 1..693: note = Description of Artificial Sequence: Synthetic coding sequence
  source 1..693: mol_type = other DNA

SEQ ID NO: 173140 - DNA, 372 bp, synthetic construct
  misc_feature 1..372: note = Description of Artificial Sequence: Synthetic coding sequence
  source 1..372: mol_type = other DNA
atggcccagggcctcatcgaggtggagaggaagttcctgcccggccctggaacagaggagcggctgcaggagctgggcggcaccctggagtacagagtgaccttccgggacacctactatgacaccccagagctgagcctgatgcaggccgaccactggctgcggcggcgggaggacagcggctgggagctgaagtgccctggagctgctggggtgctgggcccccacacagagtacaaggagctgacagctgagcccaccatcgtggcccagctgtgcaaggtgctgcgggcagatggcctgggcgctggagatgtggccgctgtgctgggccccctgggcctgcaggaggtggccagctttgtgacctag

SEQ ID NO: 173141 - DNA, 2070 bp, synthetic construct
  misc_feature 1..2070: note = Description of Artificial Sequence: Synthetic coding sequence
  source 1..2070: mol_type = other DNA
atgaagcccccagctgcctgtgccggggacatggctgatgctgccagcccctgcagcgtggtgaatgacctgcgctgggacctgagcgcccagcagatcgaggagaggacccgggagctgattgagcagaccaagagggtgtatgaccaggtgggcacccaggagtttgaagatgtgtcctatgagagcaccctgaaggccctggctgatgtggaggtgacctacacagtgcagaggaacatcctggacttcccccagcacgtgagccccagcaaggacatcagaacagccagcacagaagctgacaagaagctgtctgaatttgatgtggagatgtccatgagagaagatgtgtaccagagaattgtgtggctgcaggagaaggtgcagaaggacagcctgcggcctgaggccgcccgctacctggagcggctcatcaagctgggcagaagaaatggcctgcacctgccccgggagacccaggagaacatcaagaggatcaagaagaagctgagcctgctgtgcatcgacttcaacaagaacctgaatgaagacaccaccttcctgcccttcaccctgcaggagctgggcggcctgcctgaggacttcctgaacagcctggagaagatggaggatggcaagctgaaggtgaccctgaagtacccccactacttccccctgctgaagaagtgccacgtgcctgagaccaggaggaaggtggaggaggccttcaactgccgctgcaaggaggagaactgtgccatcctgaaggagctggtgaccctgcgggcccagaagagccggctgctgggcttccacacccacgccgactatgtgctggagatgaacatggccaagaccagccagacagtggccaccttcctggatgagctggcccagaagctgaagcccctgggggagcaggagagagctgtgatcctggagctgaagagagcagaatgtgaaagaagaggcctgccctttgatggccgcatccgggcctgggacatgagatactacatgaaccaggtggaggagacccgctactgtgtggaccagaacctgctgaaggagtacttccctgtgcaggtggtgacccacggcctgctgggcatctaccaggagctgctgggcctggccttccaccacgaggagggcgccagcgcctggcatgaagatgtgcggctgtacacagccagagatgctgccagcggggaggtggtgggcaagttctacctggacctgtacccccgggagggcaagtatggccatgctgcctgcttcggcctgcagcccggctgcctgcggcaggacggcagccggcagatcgccatcgccgccatggtggccaacttcaccaagcccacagcagatgcccccagcctgctgcagcatgatgaggtggagacctacttccatgaatttggacatgtgatgcaccagctgtgcagccaggccgagtttgccatgttcagcggcacccacgtggagcgggactttgtggaggcccccagccagatgctggagaactgggtgtgggagcaggagcccctgctgaggatgagccgccactacagaactggatctgctgtgccccgggagctgctggagaagctgattgagagccggcaggccaacacaggcctcttcaacctgcggcagatcgtgctggccaaggtggaccaggccctgcacacccagacagatgctgaccctgctgaggagtatgcccggctgtgccaggagatcctgggcgtgcctgccaccccaggcaccaacatgcctgccaccttcggccacctggccggcggctatgatgcccagtactacggctacctgtggagcgaggtgtacagcatggacatgttccacacccgcttcaagcaggagggcgtgctgaacagcaaggtgggcatggactaccgcagctgcatcctgcggcctgggggctctgaagatgccagcgccatgctgcggcgcttcctgggccgggaccccaagcaggatgccttcctgctgagcaagggcctgcaggtgggcggctgtgagcctgagccccaggtgtgctag

SEQ ID NO: 173142 - DNA, 777 bp, synthetic construct
  misc_feature 1..777: note = Description of Artificial Sequence: Synthetic coding sequence
  source 1..777: mol_type = other DNA
atgttttctggcacccacgtggagcgggactttgtggaggcccccagccagatgctggagaactgggtgtgggagcaggagcccctgctgaggatgagccgccactacagaacaggcagcgctgtgccccgggagctgctggagaagctgattgagagccggcaggccaacacaggcctcttcaacctgcggcagatcgtgctggccaaggtggaccaggccctgcacacccagacagatgctgaccctgctgaggagtatgcccggctgtgccaggagatcctgggcgtgcctgccaccccaggcaccaacatgcctgccaccttcggccacctggccggcggctatgatgcccagtactacggctacctgtggagcgaggtgtacagcatggacatgttccacacccgcttcaagcaggagggcgtgctgaacagcaagttcccccactatgaggtgcggcccctgcggcacgtgtccctgtgcctgcccctgacctggtgtgaccccggcagcggccagcccccagagagcctgaccaggaaccgctggctgcctgccctgcgggccggccctgccctgcccggctgcaacatcgccctgggcagcctgcaggtgggcatggactaccgcagctgcatcctgcggcctgggggctctgaagatgccagcgccatgctgcggcgcttcctgggccgggaccccaagcaggatgccttcctgctgagcaagggcctgcaggtgggcggctgtgagcctgagccccaggtgtgctag

SEQ ID NO: 173143 - DNA, 738 bp, synthetic construct
  misc_feature 1..738: note = Description of Artificial Sequence: Synthetic coding sequence
  source 1..738: mol_type = other DNA
atggatggcaccaggaccagcctggacatcgaggagtacagcgacacagaggtgcagaagaaccaggtgctgaccctggaggagtggcaggacaagtgggtgaatggcaagacagccttccaccaggagcagggccaccagctgctgaagaagcacctggacaccttcctgaagggcaagagcggcctgcgggtcttcttccccctgtgtgggaaggctgtggagatgaagtggtttgctgaccggggccacagcgtggtgggcgtggagatcagcgagctgggcatccaggagttcttcacagagcagaacctgagctacagcgaggagcccatcacagagatccctggcaccaaggtgttcaagagcagcagcggcaacatcagcctgtactgctgcagcatctttgacctgcccaggaccaacatcggcaagtttgacatgatctgggacagaggagccctggtggccatcaaccctggggacaggaagtgctatgctgacaccatgttcagcctgctgggcaagaagttccagtacctgctgtgtgtgctgtcctatgaccccaccaagcaccctggcccccccttctacgtgccccacgccgagattgaaagactctttgggaagatctgcaacatccgctgcctggagaaggtggatgcctttgaggagcggcacaagtcctggggcatcgactgcctgtttgagaagctgtacctgctgacagagaagtag

SEQ ID NO: 173144 - DNA, 519 bp, synthetic construct
  misc_feature 1..519: note = Description of Artificial Sequence: Synthetic coding sequence
  source 1..519: mol_type = other DNA
atggagacccggccccggctgggcgccacctgcctgctgggcttctccttcctgctgctggtgatcagcagtgatggccacaacggcctgggcaagggctttggagaccacatccactggaggaccctggaggatggcaagaaggaggccgccgccagcggcctgcccctgatggtgatcatccacaagtcctggtgtggggcctgcaaggccctgaagcccaagtttgctgagagcacagagatcagcgagctgagccacaactttgtgatggtgaacctggaggatgaggaggagcccaaggatgaggacttctccccagatggcggctacatcccccgcatcctcttcctggaccccagcggcaaggtgcaccctgagatcatcaatgaaaatggaaaccccagctacaagtacttctacgtgtctgctgagcaggtggtgcagggcatgaaggaggcccaggagcggctgactggagatgccttcaggaagaagcacctggaggatgagctgtag

SEQ ID NO: 173145 - DNA, 1767 bp, synthetic construct
  misc_feature 1..1767: note = Description of Artificial Sequence: Synthetic coding sequence
  source 1..1767: mol_type = other DNA
atggccagcaagaagcgggaggtgcagctgcagaccgtcatcaacaaccagagcctgtgggatgagatgctgcagaacaagggcctgactgtgattgatgtgtaccaggcctggtgtggcccctgccgggccatgcagcccctcttcaggaagctgaagaatgagctgaatgaagatgagatcctgcactttgctgtggccgaggccgacaacatcgtgaccctgcagcccttccgggacaagtgtgagcccgtcttcctgttctctgtgaatggcaagatcatcgagaagatccagggcgccaatgcccccctggtgaacaagaaggtgatcaacctgattgatgaggagaggaagattgctgctggggagatggcccggccccagtacccagagatccccctggtggacagcgacagcgaggtgtctgaggagagcccctgtgagagcgtgcaggagctgtacagcatcgccatcatcaagccagatgctgtgatcagcaagaaggtgctggagatcaagaggaagatcaccaaggccggcttcatcatcgaggccgagcacaagacagtgctgacagaggagcaggtggtgaacttctacagcagaattgctgaccagtgtgactttgaggagtttgtgtccttcatgaccagcggcctgagctacatcctggtggtgtcccagggcagcaagcacaaccccccatctgaggagacagagccccagacagacacagagcccaatgaaagaagtgaggaccagcctgaggtggaggcccaggtgaccccaggcatgatgaagaacaagcaggacagcctgcaggagtacctggagcggcagcacctggcccagctgtgtgacattgaagaagatgctgccaacgtggccaagttcatggatgccttcttcccagacttcaagaagatgaagtccatgaagctggagaagaccctggccctgctgcggcccaacctcttccacgagaggaaggatgatgtgctgcgcatcatcaaggatgaggacttcaagatcctggagcagaggcaggtggtgctgtctgagaaggaggcccaggccctgtgcaaggagtatgaaaatgaagactacttcaacaagctgattgagaacatgaccagcggccccagcctggccctggtgctgctgcgggacaatggcctgcagtactggaagcagctgctgggccccaggacagtggaggaggccatcgagtacttccctgagagcctgtgtgcccagtttgccatggacagcctgcctgtgaaccagctgtatggcagtgacagcctggagacagctgagcgggagatccagcacttcttccccctgcagagcaccctgggcctcatcaagccccacgccaccagcgagcagcgggagcagatcctgaagatcgtgaaggaggccggctttgacctgacccaggtgaagaagatgttcctgaccccagagcagatcgagaagatctaccccaaggtgacaggcaaggacttctacaaggacctgctggagatgctgtctgtgggccccagcatggtgatgatcctgaccaagtggaatgctgtggccgagtggaggcggctgatgggccccacagatcctgaggaggccaagctgctgagcccagacagcatccgggcccagtttggcatcagcaagctgaagaacatcgtgcacggggccagcaatgcctatgaggccaaggaggtggtgaacagactctttgaagatcctgaagaaaattag

SEQ ID NO: 173146 - DNA, 1767 bp, synthetic construct; identical to SEQ ID NO: 173145
  misc_feature 1..1767: note = Description of Artificial Sequence: Synthetic coding sequence
  source 1..1767: mol_type = other DNA

SEQ ID NO: 173147 - DNA, 681 bp, synthetic construct
  misc_feature 1..681: note = Description of Artificial Sequence: Synthetic coding sequence
  source 1..681: mol_type = other DNA
atggaggctgatgcctctgtggacatgttcagcaaggtgctggagcaccagctgctgcagaccaccaagctggtggaggagcacctggacagcgagatccagaagctggaccagatggatgaagatgagctggagcggctgaaggagaagaggctgcaggccctgaggaaggcccagcagcagaagcaggagtggctgagcaagggccacggggagtaccgggagatccccagcgagcgggacttcttccaggaggtgaaggagagtgaaaatgtggtgtgccacttctacagagacagcaccttccgctgcaagatcctggacagacacctggccatcctgagcaagaagcacctggagaccaagttcctgaagctgaatgtggagaaggcccccttcctgtgtgagcggctgcacatcaaggtgatccccaccctggccctgctgaaggatggcaagacccaggactatgtggtgggcttcacagacctgggcaacacagatgacttcaccacagagaccctggagtggaggctgggcagcagtgacatcctgaactacagcggcaacctgatggagccccccttccagaaccagaagaagtttggcaccaacttcaccaagctggagaagaagaccatccggggcaagaagtatgacagcgacagtgatgatgactag

SEQ ID NO: 173148 - DNA, 408 bp, synthetic construct
  misc_feature 1..408: note = Description of Artificial Sequence: Synthetic coding sequence
  source 1..408: mol_type = other DNA
atggaggctgatgcctctgtggacatgttcagcaaggtgctggagcaccagctgctgcagaccaccaagctggtggaggagcacctggacagcgagatccagaagctggaccagatggatgaagatgagctggagcggctgaaggagaagaggctgcaggccctgaggaaggcccagcagcagaagcaggagtggctgagcaagggccacggggagtaccgggagatccccagcgagcgggacttcttccaggaggtgaaggagagtgaaaatgtggtgtgccacttctacagagacagcaccttccgctgcaagatcctggacagacacctggccatcctgagcaagaagcacctggagaccaagttcctgaagctgaatgtggagaaggcccccttcctgtgctag

SEQ ID NO: 173149 - DNA, 627 bp, synthetic construct
  misc_feature 1..627: note = Description of Artificial Sequence: Synthetic coding sequence
  source 1..627: mol_type = other DNA
atgagccagaagagcctggccccccggctgaacagcgtgccctttggaaggatggaggctgatgcctctgtggacatgttcagcaaggtgctggagcaccagctgctgcagaccaccaagctggtggaggagcacctggacagcgagatccagaagctggaccagatggatgaagatgagctggagcggctgaaggagaagaggctgcaggccctgaggaaggcccagcagcagaagcaggagtggctgagcaaaggacatggagagtaccgggagatccccagcgagcgggacttcttccaggaggtgaaggagagtgaaaatgtggtgtgccacttctacagagacagcaccttccgctgcaagatcctggacagacacctggccatcctgagcaagaagcacctggagaccaagttcctgaagctgaatgtggagaaggcccccttcctgtgtgagcggctgcacatcaaggtgatccccaccctggccctgctgaaggatggcaagacccaggactatgtggtgggcttcacagacctgggcaacacagatgacttcaccacagagaccctggagtggaggctgggcagcagtgacatcctgaactaccgctggtggccctag

SEQ ID NO: 173150 - DNA, 1017 bp, synthetic construct
  misc_feature 1..1017: note = Description of Artificial Sequence: Synthetic coding sequence
  source 1..1017: mol_type = other DNA
atggccgccatggctgtggccctgcggggcctgggcggccgcttccgctggaggacccaggccgtggccggcggcgtgagaggagctgcccggggagctgctgctggccagagggactatgacctgctggtggtgggcggcggcagcggcggcctggcctgtgccaaggaggccgcccagctgggcaggaaggtggccgtggtggactatgtggagcccagcccccagggcacccgctggggcctgggcggcacctgtgtgaatgtgggctgcatccccaagaagctgatgcaccaggccgccctgctgggcggcctcatccaggatgcccccaactacggctgggaggtggcccagcctgtgccccatgactggaggaagatggccgaggccgtgcagaaccacgtgaagagcctgaactggggccaccgggtgcagctgcaggacaggaaggtgaagtacttcaacatcaaggccagctttgtggatgagcacacagtgtgtggggtggccaagggcggcaaggagatcctgctgtctgctgaccacatcatcatcgccaccggcggccggccccgctaccccacccacatcgagggcgccctggagtatggcatcaccagtgatgacatcttctggctgaaggagagccctgggaagaccctggtggtgggcgccagctatgtggccctggagtgtgccggcttcctgaccggcatcggcctggacaccaccatcatgatgaggagcatccccctgcggggctttgaccagcagatgagctccatggtgattgagcacatggccagccacggcacccgcttcctgcggggctgtgcccccagccgggtgcggcggctgcctgatggccagctgcaggtgacctgggaggacagcaccaccgggaaggaggacaccggcacctttgacacagtgctgtgggccatcgccccctgcatcagcgcctgcctgcccaccaccgtgggccatgctgggaagaaccagaggcgggactag

SEQ ID NO: 173151 - DNA, 1479 bp, synthetic construct
  misc_feature 1..1479: note = Description of Artificial Sequence: Synthetic coding sequence
  source 1..1479: mol_type = other DNA
atggaggaccaggccggccagagggactatgacctgctggtggtgggcggcggcagcggcggcctggcctgtgccaaggaggccgcccagctgggcaggaaggtggccgtggtggactatgtggagcccagcccccagggcacccgctggggcctgggcggcacctgtgtgaatgtgggctgcatccccaagaagctgatgcaccaggccgccctgctgggcggcctcatccaggatgcccccaactacggctgggaggtggcccagcctgtgccccatgactggaggaagatggccgaggccgtgcagaaccacgtgaagagcctgaactggggccaccgggtgcagctgcaggacaggaaggtgaagtacttcaacatcaaggccagctttgtggatgagcacacagtgtgtggggtggccaagggcggcaaggagatcctgctgtctgctgaccacatcatcatcgccaccggcggccggccccgctaccccacccacatcgagggcgccctggagtatggcatcaccagtgatgacatcttctggctgaaggagagccctgggaagaccctggtggtgggcgccagctatgtggccctggagtgtgccggcttcctgaccggcatcggcctggacaccaccatcatgatgaggagcatccccctgcggggctttgaccagcagatgagctccatggtgattgagcacatggccagccacggcacccgcttcctgcggggctgtgcccccagccgggtgcggcggctgcctgatggccagctgcaggtgacctgggaggacagcaccaccgggaaggaggacaccggcacctttgacacagtgctgtgggccatcggccgggtgcctgacaccaggagcctgaacctggagaaggccggcgtggacaccagcccagacacccagaagatcctggtggacagccgggaggccacctctgtgccccacatctatgccatcggagatgtggtggagggccggcctgagctgacccccatcgccatcatggccggccgcctgctggtgcagaggctgtttggaggcagcagtgacctgatggactatgacaacgtgcccaccaccgtcttcacccccctggagtatggctgtgtgggcctgtctgaggaggaggccgtggcccggcacggccaggagcacgtggaggtgtaccacgcccactacaagcccctggagttcaccgtggccggcagagatgccagccagtgctacgtgaagatggtgtgcctgcgggagcccccccagctggtgctgggcctgcacttcctgggccccaatgctggggaggtgacccagggctttgccctgggcatcaagtgtggggccagctatgcccaggtgatgaggacagtgggcatccaccccacctgcagcgaggaggtggtgaagctgcgcatcagcaagaggagcggcctggaccccaccgtgacaggctgctag

SEQ ID NO: 173152 - DNA, 1569 bp, synthetic construct
  misc_feature 1..1569: note = Description of Artificial Sequence: Synthetic coding sequence
  source 1..1569: mol_type = other DNA
atggccgccatggctgtggccctgcggggcctgggcggccgcttccgctggaggacccaggccgtggccggcggcgtgagaggagctgcccggggagctgctgctggccagagggactatgacctgctggtggtgggcggcggcagcggcggcctggcctgtgccaaggaggccgcccagctgggcaggaaggtggccgtggtggactatgtggagcccagcccccagggcacccgctggggcctgggcggcacctgtgtgaatgtgggctgcatccccaagaagctgatgcaccaggccgccctgctgggcggcctcatccaggatgcccccaactacggctgggaggtggcccagcctgtgccccatgactggaggaagatggccgaggccgtgcagaaccacgtgaagagcctgaactggggccaccgggtgcagctgcaggacaggaaggtgaagtacttcaacatcaaggccagctttgtggatgagcacacagtgtgtggggtggccaagggcggcaaggagatcctgctgtctgctgaccacatcatcatcgccaccggcggccggccccgctaccccacccacatcgagggcgccctggagtatggcatcaccagtgatgacatcttctggctgaaggagagccctgggaagaccctggtggtgggcgccagctatgtggccctggagtgtgccggcttcctgaccggcatcggcctggacaccaccatcatgatgaggagcatccccctgcggggctttgaccagcagatgagctccatggtgattgagcacatggccagccacggcacccgcttcctgcggggctgtgcccccagccgggtgcggcggctgcctgatggccagctgcaggtgacctgggaggacagcaccaccgggaaggaggacaccggcacctttgacacagtgctgtgggccatcggccgggtgcctgacaccaggagcctgaacctggagaaggccggcgtggacaccagcccagacacccagaagatcctggtggacagccgggaggccacctctgtgccccacatctatgccatcggagatgtggtggagggccggcctgagctgacccccatcgccatcatggccggccgcctgctggtgcagaggctgtttggaggcagcagtgacctgatggactatgacaacgtgcccaccaccgtcttcacccccctggagtatggctgtgtgggcctgtctgaggaggaggccgtggcccggcacggccaggagcacgtggaggtgtaccacgcccactacaagcccctggagttcaccgtggccggcagagatgccagccagtgctacgtgaagatggtgtgcctgcgggagcccccccagctggtgctgggcctgcacttcctgggccccaatgctggggaggtgacccagggctttgccctgggcatcaagtgtggggccagctatgcccaggtgatgaggacagtgggcatccaccccacctgcagcgaggaggtggtgaagctgcgcatcagcaagaggagcggcctggaccccaccgtgacaggctgctag

SEQ ID NO: 173153 - DNA, 1566 bp, synthetic construct
  misc_feature 1..1566: note = Description of Artificial Sequence: Synthetic coding sequence
  source 1..1566: mol_type = other DNA
atggccgccatggctgtggccctgcggggcctgggcggccgcttccgctggaggacccaggccgtggccggcggcgtgagaggagctgcccggggagctgctggccagagggactatgacctgctggtggtgggcggcggcagcggcggcctggcctgtgccaaggaggccgcccagctgggcaggaaggtggccgtggtggactatgtggagcccagcccccagggcacccgctggggcctgggcggcacctgtgtgaatgtgggctgcatccccaagaagctgatgcaccaggccgccctgctgggcggcctcatccaggatgcccccaactacggctgggaggtggcccagcctgtgccccatgactggaggaagatggccgaggccgtgcagaaccacgtgaagagcctgaactggggccaccgggtgcagctgcaggacaggaaggtgaagtacttcaacatcaaggccagctttgtggatgagcacacagtgtgtggggtggccaagggcggcaaggagatcctgctgtctgctgaccacatcatcatcgccactggaggccggccccgctaccccacccacattgaaggagccctggagtatggcatcaccagtgatgacatcttctggctgaaggagagccctgggaagaccctggtggtgggcgccagctatgtggccctggagtgtgccggcttcctgactggaattggcctggacaccaccatcatgatgaggagcatccccctgcggggctttgaccagcagatgagctccatggtgattgagcacatggccagccacggcacccgcttcctgcggggctgtgcccccagccgggtgcggcggctgcctgatggccagctgcaggtgacctgggaggacagcaccaccgggaaggaggacaccggcacctttgacacagtgctgtgggccatcggccgggtgcctgacaccaggagcctgaacctggagaaggccggcgtggacaccagcccagacacccagaagatcctggtggacagccgggaggccacctctgtgccccacatctatgccatcggagatgtggtggagggccggcctgagctgacccccatcgccatcatggccggccgcctgctggtgcagaggctgtttggaggcagcagtgacctgatggactatgacaacgtgcccaccaccgtcttcacccccctggagtatggctgtgtgggcctgtctgaggaggaggccgtggcccggcacggccaggagcacgtggaggtgtaccacgcccactacaagcccctggagttcaccgtggccggcagagatgccagccagtgctacgtgaagatggtgtgcctgcgggagcccccccagctggtgctgggcctgcacttcctgggccccaatgctggggaggtgacccagggctttgccctgggcatcaagtgtggggccagctatgcccaggtgatgaggacagtgggcatccaccccacctgcagcgaggaggtggtgaagctgcgcatcagcaagaggagcggcctggaccccaccgtgacaggctgctag

SEQ ID NO: 173154 - DNA, 1569 bp, synthetic construct
  misc_feature 1..1569: note = Description of Artificial Sequence: Synthetic coding sequence
  source 1..1569: mol_type = other DNA
atggccgccatggctgtggccctgcggggcctgggcggccgcttccgctggaggacccaggccgtggccggcggcgtgagaggagctgcccggggagctgctgctggccagagggactatgacctgctggtggtgggcggcggcagcggcggcctggcctgtgccaaggaggccgcccagctgggcaggaaggtggccgtggtggactatgtggagcccagcccccagggcacccgctggggcctgggcggcacctgtgtgaatgtgggctgcatccccaagaagctgatgcaccaggccgccctgctgggcggcctcatccaggatgcccccaactacggctgggaggtggcccagcctgtgccccatgactggaggaagatggccgaggccgtgcagaaccacgtgaagagcctgaactggggccaccgggtgcagctgcaggacaggaaggtgaagtacttcaacatcaaggccagctttgtggatgagcacacagtgtgtggggtggccaagggcggcaaggagatcctgctgtctgctgaccacatcatcatcgccaccggcggccggccccgctaccccacccacatcgagggcgccctggagtatggcatcaccagtgatgacatcttctggctgaaggagagccctgggaagaccctgcctgtgtctgtgtcctatgtggccctggagtgtgccggcttcctgaccggcatcggcctggacaccaccatcatgatgaggagcatccccctgcggggctttgaccagcagatgagctccatggtgattgagcacatggccagccacggcacccgcttcctgcggggctgtgcccccagccgggtgcggcggctgcctgatggccagctgcaggtgacctgggaggacagcaccaccgggaaggaggacaccggcacctttgacacagtgctgtgggccatcggccgggtgcctgacaccaggagcctgaacctggagaaggccggcgtggacaccagcccagacacccagaagatcctggtggacagccgggaggccacctctgtgccccacatctatgccatcggagatgtggtggagggccggcctgagctgacccccatcgccatcatggccggccgcctgctggtgcagaggctgtttggaggcagcagtgacctgatggactatgacaacgtgcccaccaccgtcttcacccccctggagtatggctgtgtgggcctgtctgaggaggaggccgtggcccggcacggccaggagcacgtggaggtgtaccacgcccactacaagcccctggagttcaccgtggccggcagagatgccagccagtgctacgtgaagatggtgtgcctgcgggagcccccccagctggtgctgggcctgcacttcctgggccccaatgctggggaggtgacccagggctttgccctgggcatcaagtgtggggccagctatgcccaggtgatgaggacagtgggcatccaccccacctgcagcgaggaggtggtgaagctgcgcatcagcaagaggagcggcctggaccccaccgtgacaggctgctag

SEQ ID NO: 173155 - DNA, 1281 bp, synthetic construct
  misc_feature 1..1281: note = Description of Artificial Sequence: Synthetic coding sequence
  source 1..1281: mol_type = other DNA
atgcaccaggccgccctgctgggcggcctcatccaggatgcccccaactacggctgggaggtggcccagcctgtgccccatgactggaggaagatggccgaggccgtgcagaaccacgtgaagagcctgaactggggccaccgggtgcagctgcaggacaggaaggtgaagtacttcaacatcaaggccagctttgtggatgagcacacagtgtgtggggtggccaagggcggcaaggagatcctgctgtctgctgaccacatcatcatcgccaccggcggccggccccgctaccccacccacatcgagggcgccctggagtatggcatcaccagtgatgacatcttctggctgaaggagagccctgggaagacctgtgtggtggcccacgcctacgtggccctggagtgtgccggcttcctgaccggcatcggcctggacaccaccatcatgatgaggagcatccccctgcggggctttgaccagcagatgagctccatggtgattgagcacatggccagccacggcacccgcttcctgcggggctgtgcccccagccgggtgcggcggctgcctgatggccagctgcaggtgacctgggaggacagcaccaccgggaaggaggacaccggcacctttgacacagtgctgtgggccatcggccgggtgcctgacaccaggagcctgaacctggagaaggccggcgtggacaccagcccagacacccagaagatcctggtggacagccgggaggccacctctgtgccccacatctatgccatcggagatgtggtggagggccggcctgagctgacccccatcgccatcatggccggccgcctgctggtgcagaggctgtttggaggcagcagtgacctgatggactatgacaacgtgcccaccaccgtcttcacccccctggagtatggctgtgtgggcctgtctgaggaggaggccgtggcccggcacggccaggagcacgtggaggtgtaccacgcccactacaagcccctggagttcaccgtggccggcagagatgccagccagtgctacgtgaagatggtgtgcctgcgggagcccccccagctggtgctgggcctgcacttcctgggccccaatgctggggaggtgacccagggctttgccctgggcatcaagtgtggggccagctatgcccaggtgatgaggacagtgggcatccaccccacctgcagcgaggaggtggtgaagctgcgcatcagcaagaggagcggcctggaccccaccgtgacaggctgctag

SEQ ID NO: 173156 - DNA, 1479 bp, synthetic construct; identical to SEQ ID NO: 173151
  misc_feature 1..1479: note = Description of Artificial Sequence: Synthetic coding sequence
  source 1..1479: mol_type = other DNA

SEQ ID NO: 173157 - DNA, 429 bp, synthetic construct
  misc_feature 1..429: note = Description of Artificial Sequence: Synthetic coding sequence
  source 1..429: mol_type = other DNA
atgagctacatgctgccccacctgcacaacggctggcaggtggaccaggccatcctgtctgaggaggacagagtggtggtgatccgcttcggccatgactgggaccccacctgcatgaagatggatgaggtgctgtacagcattgctgagaaggtgaagaactttgctgtgatctacctggtggacatcacagaggtgcctgacttcaacaagatgtatgagctgtatgacccctgcaccgtgatgttcttcttcaggaacaagcacatcatgattgacctgggcaccggcaacaacaacaagatcaactgggccatggaggacaagcaggagatggtggacatcatcgagaccgtgtacagaggagccaggaagggccggggcctggtggtgagccccaaggactacagcaccaagtaccgctactag

SEQ ID NO: 173158 - DNA, 276 bp, synthetic construct
  misc_feature 1..276: note = Description of Artificial Sequence: Synthetic coding sequence
  source 1..276: mol_type = other DNA
atgagctacatgctgccccacctgcacaacggctggcaggtggaccaggccatcctgtctgaggaggacagagtggtggtgatccgcttcggccatgactgggaccccacctgcatgaagatggatgaggtgctgtacagcattgctgagaaggtgaagaactttgctgtgatctacctggtggacatcacagaggtgcctgacttcaacaagatgtatgagctgtatgacccctgcaccgtgatgttcttcttctcctaccaccggggctggtag

SEQ ID NO: 173159 - DNA, 894 bp, synthetic construct
  misc_feature 1..894: note = Description of Artificial Sequence: Synthetic coding sequence
  source 1..894: mol_type = other DNA
atggtgcaccaggtgctgtaccgggccctggtgtccaccaagtggctggccgagagcatcagaacaggcaagctgggccctggcctgcgggtgctggatgcctcctggtacagccctggcacccgggaggccaggaaggagtacctggagcggcacgtgcctggggccagcttctttgatattgaagaatgtcgggacacagccagcccctatgagatgatgctgcccagcgaggccggctttgctgaatatgtgggccgcctgggcatcagcaaccacacccacgtggtggtgtatgatggagagcacctgggcagcttctacgccccccgggtgtggtggatgttccgggtgtttggccacaggacagtgtctgtgctgaatggaggcttcaggaactggctgaaggagggccaccctgtgaccagcgagcccagcaggcctgagcctgctgtgttcaaggccaccctggacaggagcctgctgaagacctatgagcaggtgctggagaacctggagagcaagcgcttccagctggtggacagccgcagccagggccgcttcctgggcacagagcctgagccagatgctgtgggcctggacagcggccacatcagaggagctgtgaacatgcccttcatggacttcctgacagaagatggctttgagaagggccctgaggagctgcgggccctcttccagaccaagaaggtggacctgagccagcccctgattgccacctgcaggaagggcgtgacagcctgccacgtggccctggccgcctacctgtgtgggaagccagatgtggccgtgtatgatggctcctggagcgagtggttcagaagagcccctcctgagagccgggtgtcccagggcaagtctgagaaggcctag

SEQ ID NO: 173160 - DNA, 894 bp, synthetic construct; identical to SEQ ID NO: 173159
  misc_feature 1..894: note = Description of Artificial Sequence: Synthetic coding sequence
  source 1..894: mol_type = other DNA

SEQ ID NO: 173161 - DNA, 735 bp, synthetic construct
  misc_feature 1..735: note = Description of Artificial Sequence: Synthetic coding sequence
  source 1..735: mol_type = other DNA
atggtgcaccaggtgctgtaccgggccctggtgtccaccaagtggctggccgagagcatcagaacaggcaagctgggccctggcctgcgggtgctggatgcctcctggtacagccctggcacccgggaggccaggaaggagtacctggagcggcacgtgcctggggccagcttctttgatattgaagaatgtcgggacacagccagcccctatgagatgatgctgcccagcgaggccggctttgctgaatatgtgggccgcctgggcatcagcaaccacacccacgtggtggtgtatgatggagagcacctgggcagcttctacgccccccgggtgtggtggatgttccgggtgtttggccacaggacagtgtctgtgctgaatggaggcttcaggaactggctgaaggagggccaccctgtgaccagcgagcccagcaggcctgagcctgctgtgttcaaggccaccctggacaggagcctgctgaagacctatgagcaggtgctggagaacctggagagcaagcgcttccagctggtggacagccgcagccagggccgcttcctgggcacagagcctgagccagatgctgtgggcctggacagcggccacatcagaggagctgtgaacatgcccttcatggacttcctgacagaagatggctcctggagcgagtggttccggcgggcccctcctgagagccgggtgtcccagggcaagtctgagaaggcctag

SEQ ID NO: 173162 - DNA, 375 bp, synthetic construct
  misc_feature 1..375: note = Description of Artificial Sequence: Synthetic coding sequence
  source 1..375: mol_type = other DNA
atggtgcaccaggtgctgtaccgggccctggtgtccaccaagtggctggccgagagcatcagaacaggcaagctgggccctggcctgcgggtgctggatgcctcctggtacagccctggcacccgggaggccaggaaggagtacctggagcggcacgtgcctggggccagcttctttgatattgaagaatgtcgggacacagccagcccctatgagatgatgctgcccagcgaggccggctttgctgaatatgtgggccgcctgggcatcagcaaccacacccacgtggtggtgtatgatggagagcacctgggcagcttctacgccccccgggtgtggtggatgttccgggtgtttggccacaggacagtgtag

SEQ ID NO: 173163 - DNA, 1974 bp, synthetic construct
  misc_feature 1..1974: note = Description of Artificial Sequence: Synthetic coding sequence
  source 1..1974: mol_type = other DNA
atgagccccaccccacccctcttcagcctgcctgaggcccggacccgcttcaccaagagcacccgggaggccctgaacaacaagaacatcaagcccctgctgagcaccttcagccaggtgcccggctctgaaaatgagaagaagtgcaccctggaccaggccttccggggcatcctggaggaggagatcatcaaccacagcagctgtgaaaatgtgctggccatcatcagcctggccatcggcggcgtgacagagggcatctgcacagccagcaccccatttgtgctgctgggagatgtgctggactgcctgcccctggaccagtgtgacaccatcttcacctttgtggagaagaatgtggccacctggaagagcaacaccttctacagcgctgggaagaactacctgctgaggatgtgcaatgacctgctgcggcggctgagcaagagccagaacacagtgttctgtggccgcatccagctgttcctggcccggctcttccccctgtctgagaagagcggcctgaacctgcagagccagttcaacctggagaatgtgacagtgttcaacaccaatgagcaggagagcaccctgggccagaagcacacagaggaccgggaggagggcatggatgtggaggagggggagatgggagatgaggaggcccccaccacctgcagcatccccatcgactacaacctgtacaggaagttctggagcctgcaggactacttcaggaaccctgtgcagtgctatgagaagatctcctggaagaccttcctgaagtacagcgaggaggtgctggccgtgttcaagagctacaagctggatgacacccaggccagcaggaagaagatggaggagctgaagacaggaggagaacatgtgtactttgccaagttcctgaccagcgagaagctgatggacctgcagctgagtgacagcaacttccgccgccacatcctgctgcagtacctgatcctcttccagtacctgaagggccaggtgaagttcaagagcagcaactacgtgctgacagatgagcagagcctgtggattgaggacaccaccaagtctgtgtaccagctgctgtctgagaaccccccagatggagagcgcttcagcaagatggtggagcacatcctgaacacagaggagaactggaacagctggaagaatgaaggctgccccagctttgtgaaggagaggaccagtgacaccaagcccacccgcatcatcaggaagaggacagcccctgaggacttcctgggcaagggccccaccaagaagatcctgatgggaaatgaggagctgacccggctgtggaacctgtgcccagacaacatggaggcctgcaagtctgagacccgggagcacatgcccaccctggaggagttctttgaggaggccatcgagcaggccgaccctgagaacatggtggagaatgagtacaaggctgtgaacaacagcaactacggctggagggccctgcggctgctggcccggcgcagcccccacttcttccagcccaccaaccagcagttcaagagcctgcctgagtacctggagaacatggtgatcaagctggccaaggagctgcccccaccttctgaggagatcaagacaggagaagatgaagatgaagaagataatgatgccctgctgaaggaaaatgaatctccagatgtgcggcgggacaagcctgtgactggagagcagatcgaggtgtttgccaacaagctgggggagcagtggaagatcctggccccctacctggagatgaaggacagcgagatccggcagattgaatgtgacagcgaggacatgaagatgagggccaagcagctgctggtggcctggcaggaccaggagggcgtgcacgccaccccagaaaatctcatcaatgccctgaacaagagcggcctgagtgacctggccgagagcctgaccaatgacaatgagaccaacagctag

SEQ ID NO: 173164 - DNA, 4782 bp, synthetic construct
  misc_feature 1..4782: note = Description of Artificial Sequence: Synthetic coding sequence
  source 1..4782: mol_type = other DNA
atggctgctgctgctgtggtggtgcctgctgagtggatcaagaactgggagaagagcggccgcggggagttcctgcacctgtgccgcatcctgtctgagaacaagagccatgacagcagcacctacagagacttccagcaggccctgtatgagctgagctaccacgtgatcaagggcaacctgaagcatgagcaggccagcaatgtgctgagtgacatcagcgagttccgggaggacatgcccagcatcctggctgatgtgttctgcatcctggacatcgagaccaactgcctggaggagaagagcaagagggactacttcacccagctggtgctggcctgcctgtacctggtgtctgacacagtgctgaaggagcggctggaccctgagaccctggagagcctgggcctcatcaagcagagccagcagttcaaccagaagtctgtgaagatcaagaccaagctgttctacaagcagcagaagttcaacctgctgcgggaggagaatgaaggctacgccaagctgattgctgagctgggccaggacctgagcggcagcatcaccagtgacctgatcctggagaacatcaagagcctcatcggctgcttcaacctggaccccaacagagtgctggatgtgatcctggaggtgtttgaatgtagacctgagcatgatgacttcttcatcagcctgctggagagctacatgtccatgtgtgagccccagaccctgtgccacatcctgggcttcaagttcaagttctaccaggagcccaatggagagacccccagcagcctgtacagagtggccgctgtgctgctgcagttcaacctgattgacctggatgacctgtatgtgcacctgctgcctgctgacaactgcatcatggatgagcacaagcgggagattgctgaggccaagcagatcgtgaggaagctgaccatggtggtgctgagcagcgagaagatggatgagcgggagaaggagaaggagaaggaggaggagaaggtggagaagcccccagacaaccagaagctgggcctgctggaggccctgctgaagattggagactggcagcacgcccagaacatcatggaccagatgccaccctactatgctgccagccacaagctgattgccctggccatctgcaagctgatccacatcaccatcgagcccctgtaccgccgggtgggcgtgcccaagggggccaagggcagccctgtgaatgccctgcagaacaagagggcccccaagcaggccgagagctttgaggacctgcggagagatgtgttcaacatgttctgctacctgggcccccacctgagccatgaccccatcctgtttgccaaggtggtgagaattggcaagagcttcatgaaggagttccagagtgatggcagcaagcaggaggacaaggagaagacagaggtgatcctgagctgcctgctgagcatcacagaccaggtgctgctgcccagcctgagcctgatggactgcaatgcctgcatgtctgaggagctgtggggcatgttcaagaccttcccctaccagcaccgctaccgcctgtatggccagtggaagaatgagacctacaacagccaccccctgctggtgaaggtgaaggcccagaccatcgaccgggccaagtacatcatgaagaggctgaccaaggaaaatgtgaagcccagcggccggcagatcggcaagctgagccacagcaaccccaccatcctgtttgactacatcctgagccagatccagaagtatgacaacctgatcacccctgtggtggacagcctgaagtacctgaccagcctgaactatgatgtgctggcctactgcatcatcgaggccctggccaaccctgagaaggagaggatgaagcatgatgacaccaccatcagctcctggctgcagagcctggccagcttctgtggggctgtgttcaggaagtaccccatcgacctggccggcctgctgcagtatgtggccaaccagctgaaggccggcaagagctttgacctgctgatcctgaaggaggtggtgcagaagatggccggcatcgagatcacagaggagatgaccatggagcagctggaggccatgactggaggagagcagctgaaggccgagggcggctacttcggccagatccggaacaccaagaagagcagccagaggctgaaggatgccctgctggaccatgacctggccctgcccctgtgcctgctgatggcccagcagagaaatggagtcatcttccaggagggcggggagaagcacctgaagctggtgggcaagctgtatgaccagtgccacgacaccctggtgcagtttggaggcttcctggccagcaacctgagcacagaggactacatcaagagggtgcccagcattgatgtgctgtgcaatgagttccacacccctcatgatgctgccttcttcctgagccggcccatgtatgcccaccacatcagcagcaaatatgatgagctgaagaagtctgagaagggcagcaagcagcagcacaaggtgcacaagtacatcaccagctgtgagatggtgatggcccctgtgcatgaagctgtggtgtccctgcacgtgtccaaggtgtgggatgacatcagcccccagttctacgccaccttctggagcctgaccatgtatgacctggccgtgccccacaccagctatgagcgggaggtgaacaagctgaaggtgcagatgaaggccattgatgacaaccaggagatgccacccaacaagaagaagaaggagaaggagcgctgcacagccctgcaggacaagctgctggaggaggagaagaagcagatggagcacgtgcagagggtgctgcagaggctgaagctggagaaggacaactggctgctggccaagagcaccaagaatgagaccatcaccaagttcctgcagctgtgcatcttcccccgctgcatcttcagcgccattgatgctgtgtactgtgccaggtttgtggagctggtgcaccagcagaagacccccaacttcagcaccctgctgtgctatgacagagtcttcagtgacatcatctacacagtggccagctgcacagaaaatgaggccagccgctatggccgcttcctgtgctgcatgctggagaccgtgacccgctggcacagcgaccgggccacctatgagaaggaatgtggcaactacccaggcttcctgaccatcctgcgggccactggatttgatggcggcaacaaggctgaccagctggactatgagaacttcagacatgtggtgcacaagtggcactacaagctgaccaaggcctctgtgcactgcctggagaccggggagtacacccacatccggaacatcctgattgtgctgaccaagatcctgccctggtaccccaaggtgctgaacctgggccaggccctggagcggcgggtgcacaagatctgccaggaggagaaggagaagaggccagacctgtatgccctggccatgggctacagcggccagctgaagagcaggaagagctacatgatcccagaaaatgagttccaccacaaggaccccccaccaagaaatgctgtggcctctgtgcagaatggacctgggggcggccccagcagcagcagcatcggcagcgccagcaagagtgatgagagcagcacagaggagacagacaagagccgggagaggagccagtgtggggtgaaggctgtgaacaaggccagcagcaccacccccaagggcaacagcagcaatggaaacagcggcagcaacagcaacaaggctgtgaaggaaaatgacaaggagaagggcaaggagaaggagaaggagaagaaggagaagaccccagccaccaccccagaggcccgggtgctgggcaaggatggcaaggagaagcccaaggaggagcggcccaacaaggatgagaaggcccgggagaccaaggagaggacccccaagagtgacaaggagaaggagaagttcaagaaggaggagaaggccaaggatgagaagttcaagaccaccgtgcccaatgctgagagcaagagcacccaggagcgggagcgggagaaggagcccagccgggagcgggacatcgccaaggagatgaagagcaaagaaaatgtgaagggcggggagaagacccctgtgtctggcagcctgaagagccctgtgcccaggagtgacatccctgagcctgagcgggagcagaagaggaggaagattgacacccaccccagccccagccacagcagcacagtgaaggacagcctgattgagctgaaggagagcagcgccaagctgtacatcaaccacaccccaccacccctgagcaagagcaaggagcgggagatggacaagaaggacctggacaagagccgggagaggagccgggagcgggagaagaaggatgagaaggacaggaaggagaggaagagggaccacagcaacaatgaccgggaggtgcccccagacctgaccaagaggaggaaggaggagaatggcaccatgggcgtgtccaagcacaagtctgagagcccctgtgagagcccctacccaaatgagaaggacaaggagaagaacaagagcaagagcagcggcaaggagaagggcagtgacagcttcaagtctgagaagatggacaagatcagcagcggcggcaagaaggagagcagacatgacaaggagaagattgagaagaaggagaagagggacagcagcggcggcaaggaggagaagaagcaccacaagagcagtgacaagcacaggtag

SEQ ID NO: 173165 - DNA, 4782 bp, synthetic construct; identical to SEQ ID NO: 173164
  misc_feature 1..4782: note = Description of Artificial Sequence: Synthetic coding sequence
  source 1..4782: mol_type = other DNA

SEQ ID NO: 173166 - DNA, 2547 bp, synthetic construct
  misc_feature 1..2547: note = Description of Artificial Sequence: Synthetic coding sequence
  source 1..2547: mol_type = other DNA
atgcccagcatcctggctgatgtgttctgcatcctggacatcgagaccaactgcctggaggagaagagcaagagggactacttcacccagctggtgctggcctgcctgtacctggtgtctgacacagtgctgaaggagcggctggaccctgagaccctggagagcctgggcctcatcaagcagagccagcagttcaaccagaagtctgtgaagatcaagaccaagctgttctacaagcagcagaagttcaacctgctgcgggaggagaatgaaggctacgccaagctgattgctgagctgggccaggacctgagcggcagcatcaccagtgacctgatcctggagaacatcaagagcctgattggctgcttcaacctggaccccaacagagtgctggatgtgatcctggaggtgtttgagtgcaggcctgagcatgatgacttcttcatcagcctgctggagagctacatgtccatgtgtgagccccagaccctgtgccacatcctgggcttcaagttcaagttctaccaggagcccaacggggagacccccagcagcctgtacagagtggccgctgtgctgctgcagttcaacctgattgacctggatgacctgtatgtgcacctgctgcctgctgacaactgcatcatggatgagcacaagcgggagattgctgaggccaagcagatcgtgaggaagctgaccatggtggtgctgagcagcgagaagatggatgagcgggagaaggagaaggagaaggaggaggagaaggtggagaagcccccagacaaccagaagctgggcctgctggaggccctgctgaagatcggggactggcagcacgcccagaacatcatggaccagatgccaccctactatgctgccagccacaagctgattgccctggccatctgcaagctgatccacatcaccatcgagcccctgtacagaagagtgggcgtgcccaagggggccaagggcagccctgtgaatgccctgcagaacaagagggcccccaagcaggccgagagctttgaggacctgcggagagatgtgttcaacatgttctgctacctgggcccccacctgagccatgaccccatcctgtttgccaaggtggtgcgcatcggcaagagcttcatgaaggagttccagagtgatggcagcaagcaggaggacaaggagaagacagaggtgatcctgagctgcctgctgagcatcacagaccaggtgctgctgcccagcctgagcctgatggactgcaatgcctgcatgtctgaggagctgtggggcatgttcaagaccttcccctaccagcaccgctaccgcctgtatggccagtggaagaatgagacctacaacagccaccccctgctggtgaaggtgaaggcccagaccatcgaccgggccaagtacatcatgaagaggctgaccaaggaaaatgtgaagcccagcggccggcagatcggcaagctgagccacagcaaccccaccatcctgtttgattatgtgtgctttgagatcctgagccagatccagaagtatgacaacctgatcacccctgtggtggacagcctgaagtacctgaccagcctgaactatgatgtgctggcctactgcatcatcgaggccctggccaaccctgagaaggagaggatgaagcatgatgacaccaccatcagctcctggctgcagagcctggccagcttctgtggggctgtgttcaggaagtaccccatcgacctggccggcctgctgcagtatgtggccaaccagctgaaggccggcaagagctttgacctgctgatcctgaaggaggtggtgcagaagatggccggcatcgagatcacagaggagatgaccatggagcagctggaggccatgactggaggagagcagctgaaggccgagggcggctacttcggccagatccggaacaccaagaagagcagccagaggctgaaggatgccctgctggaccatgacctggccctgcccctgtgcctgctgatggcccagcagagaaatggagtcatcttccaggagggcggggagaagcacctgaagctggtgggcaagctgtatgaccagtgccacgacaccctggtgcagtttggaggcttcctggccagcaacctgagcacagaggactacatcaagagggtgcccagcattgatgtgctgtgcaatgagttccacacccctcatgatgctgccttcttcctgagccggcccatgtatgcccaccacatcagcagcaaatatgatgagctgaagaagtctgagaagggcagcaagcagcagcacaaggtgcacaagtacatcaccagctgtgagatggtgatggcccctgtgcatgaggccgtggtgtccctgcacgtgtccaaggtgtgggatgacatcagcccccagttctacgccaccttctggagcctgaccatgtatgacctggccgtgccccacaccagctatgaaagagaggtgaacaagctgaaggtgcagatgaaggccattgatgacaaccaggagatgatccccccccagtag

SEQ ID NO: 173167 - DNA, 570 bp, synthetic construct
  misc_feature 1..570: note = Description of Artificial Sequence: Synthetic coding sequence
  source 1..570: mol_type = other DNA
tgagagcagaagaggaggaagattgacacccaccccagccccagccacagcagcacagtgaaggacagcctgattgagctgaaggagagcagcgccaagctgtacatcaaccacaccccaccacccctgagcaagagcaaggagcgggagatggacaagaaggacctggacaagagccgggagaggagccgggagcgggagaagaaggatgagaaggacaggaaggagaggaagagggaccacagcaacaatgaccgggaggtgcccccagacctgaccaagaggaggaaggaggagaatggcaccatgggcgtgtccaagcacaagtctgagagcccctgtgagagcccctacccaaatgagaaggacaaggagaagaacaagagcaagagcagcggcaaggagaagggcagtgacagcttcaagtctgagaagatggacaagatcagcagcggcggcaagaaggagagcagacatgacaaggagaagattgagaagaaggagaagagggacagcagcggcggcaaggaggagaagaagcaccacaagagcagtgacaagcacaggtag

SEQ ID NO: 173168 - DNA, 1056 bp, synthetic construct
  misc_feature 1..1056: note = Description of Artificial Sequence: Synthetic coding sequence
  source 1..1056: mol_type = other DNA
atggctgtgcctgctgctgccatgggccccagcgccctgggccagagcggccctggctccatggccccctggtgcagcgtgagcagcggccccagccgctacgtgctgggcatgcaggagctgttccggggccacagcaagacccgggagttcctggcccacagcgccaaggtgcacagcgtggcctggagctgtgatggccggcggctggccagcggcagctttgacaagacagccagcgtcttcctgctggagaaggaccggctggtgaaggagaacaactaccggggccacggggacagcgtggaccagctgtgctggcaccccagcaacccagacctgtttgtgacagccagcggggacaagaccatccgcatctgggatgtgaggaccaccaagtgcatcgccaccgtgaacaccaagggggagaacatcaacatctgctggagcccagatggccagaccatcgctgtgggcaacaaggatgatgtggtgaccttcattgatgccaagacccacaggagcaaggccgaggagcagttcaagtttgaggtgaatgagatctcctggaacaatgacaacaacatgttcttcctgaccaatggaaatggctgcatcaacatcctgagctacccagagctgaagcctgtgcagagcatcaatgcccaccccagcaactgcatctgcatcaagtttgaccccatgggcaagtactttgccactggatctgcagatgccctggtgtccctgtgggatgtggatgagctggtgtgtgtgcgctgcttcagccggctggactggcctgtgaggaccctgtccttcagccatgatggcaagatgctggccagcgccagcgaggaccacttcatcgacattgctgaggtggagactggagacaagctgtgggaggtgcagtgtgagagccccaccttcaccgtggcctggcaccccaagaggcccctgctggcctttgcctgtgatgacaaggatggcaagtatgacagcagccgggaggccggcaccgtgaagctgtttggcctgcccaatgacagctag

SEQ ID NO: 173169 - DNA, 2052 bp, synthetic construct
  misc_feature 1..2052: note = Description of Artificial Sequence: Synthetic coding sequence
  source 1..2052: mol_type = other DNA
atgagcagcgagagcagcaagaagaggaagcccaaggtgatccgcagtgatggagccccagctgagggcaagaggaacagaagtgacacagagcaggagggcaagtactacagcgaggaggccgaggtggacctgcgggaccccggccgggactatgagctgtacaagtacacctgccaggagctgcagaggctgatggccgagatccaggacctgaagagccggggcggcaaggatgtggccatcgagattgaggagcggcgcatccagagctgtgtgcacttcatgaccctgaagaagctgaaccggctggcccacatccggctgaagaagggccgggaccagacccatgaggccaagcagaaggtggatgcctaccacctgcagctgcagaacctgctgtatgaggtgatgcacctgcagaaggagatcaccaagtgcctggagttcaagagcaagcatgaggagattgacctggtgtccctggaggagttctacaaggaggcccccccagacatcagcaaggccgaggtgaccatgggagacccccaccagcagaccctggcccggctggactgggagctggagcagaggaagaggctggccgagaagtacagagaatgtctgagcaacaaggagaagatcctgaaggagattgaggtgaagaaggagtacctgagcagcctgcagccccggctgaacagcatcatgcaggccagcctgcctgtgcaggagtacctgttcatgccctttgaccaggcccacaagcagtatgaaacagcccggcacctgcccccacccctgtatgtgctgtttgtgcaggccacagcctacggccaggcctgtgacaagaccctgtctgtggccatcgagggctctgtggatgaggccaaggccctcttcaagcccccagaggacagccaggatgatgaaagtgacagtgatgctgaggaggagcagaccaccaagagaagaagacccaccctgggcgtgcagctggatgacaagaggaaggagatgctgaagaggcaccccctgtctgtgatgctggacctgaagtgcaaggatgacagcgtgctgcacctgaccttctactacctgatgaacctgaacatcatgacagtgaaggccaaggtgaccacagccatggagctgatcacccccatctctgctggggacctgctgagcccagattctgtgctgagctgcctgtacccaggggaccacggcaagaagacccccaacccagccaaccagtaccagtttgacaaggtgggcatcctgaccctgagtgactatgtgctggagctgggccacccctacctgtgggtgcagaagctgggcggcctgcacttccccaaggagcagccccagcagacagtgattgctgaccacagcctgagcgccagccacatggagaccaccatgaagctgctgaagaccagggtgcagagccggctggccctgcacaagcagtttgccagcctggagcacggcatcgtgcctgtgaccagtgactgccagtacctgtttcctgccaaggtggtgtcccggctggtgaagtgggtgacagtggcccacgaggactacatggagctgcacttcaccaaggacatcgtggatgctggcctggccggggacaccaacctgtactacatggccctgattgaaagaggaacagccaagctgcaggccgctgtggtgctgaaccctggctacagcagcatcccccctgtgttccagctgtgcctgaactggaagggggagaagaccaacagcaatgatgacaacatccgggccatggagggggaggtgaatgtgtgctacaaggagctgtgtggcccctggcccagccaccagctgctgaccaaccagctgcagaggctgtgtgtgctgctggatgtgtacctggagacagagagccatgatgattctgtggagggccccaaggagttcccccaggagaagatgtgcctgcggctcttccggggccccagcaggatgaagcccttcaagtacaaccacccccagggcttcttcagccacaggtag

SEQ ID NO: 173170 - DNA, 2052 bp, synthetic construct; identical to SEQ ID NO: 173169
  misc_feature 1..2052: note = Description of Artificial Sequence: Synthetic coding sequence
  source 1..2052: mol_type = other DNA

SEQ ID NO: 173171 - DNA, 2052 bp, synthetic construct; identical to SEQ ID NO: 173169
  misc_feature 1..2052: note = Description of Artificial Sequence: Synthetic coding sequence
  source 1..2052: mol_type = other DNA

SEQ ID NO: 173172 - DNA, 282 bp, synthetic construct
  misc_feature 1..282: note = Description of Artificial Sequence: Synthetic coding sequence
  source 1..282: mol_type = other DNA
atgagcagcgagagcagcaagaagaggaagcccaaggtgatccgcagtgatggagccccagctgagggcaagaggaacagaagtgacacagagcaggagggcaagtactacagcgaggaggccgaggtggacctgcgggaccccggccgggactatgagctgtacaagtacacctgccaggagctgcagaggctgatggccgagatccaggacctgaagagccggggcggcaaggatgtggccatcgagattgaggagcggcgcatccagagctgtgtgtag

SEQ ID NO: 173173 - DNA, 486 bp, synthetic construct
  misc_feature 1..486: note = Description of Artificial Sequence: Synthetic coding sequence
  source 1..486: mol_type = other DNA
atgagcagcgagagcagcaagaagaggaagcccaaggtgatccgcagtgatggagccccagctgagggcaagaggaacagaagtgacacagagcaggagggcaagtactacagcgaggaggccgaggtggacctgcgggaccccggccgggactatgagctgtacaagtacacctgccaggagctgcagaggctgatggccgagatccaggacctgaagagccggggcggcaaggatgtggccatcgagattgaggagcggcgcatccagagctgtgtgcacttcatgaccctgaagaagctgaaccggctggcccacatccggctgaagaagggccgggaccagacccatgaggccaagcagaaggtggatgcctaccacctgcagctgcagaacctgctgtatgaggtgatgcacctgcagaaggagatcaccaagtgcctggagttcaagagcaagcatgaggagattgacctggtgtcctag

SEQ ID NO: 173174 - DNA, 672 bp, synthetic construct
  misc_feature 1..672: note = Description of Artificial Sequence: Synthetic coding sequence
  source 1..672: mol_type = other DNA
atgagcagcgagagcagcaagaagaggaagcccaaggtgatccgcagtgatggagccccagctgagggcaagaggaacagaagtgacacagagcaggagggcaagtactacagcgaggaggccgaggtggacctgcgggaccccggccgggactatgagctgtacaagtacacctgccaggagctgcagaggctgatggccgagatccaggacctgaagagccggggcggcaaggatgtggccatcgagattgaggagcggcgcatccagagctgtgtgcacttcatgaccctgaagaagctgaaccggctggcccacatccggctgaagaagggccgggaccagacccatgaggccaagcagaaggtggatgcctaccacctgcagctgcagaacctgctgtatgaggtgatgcacctgcagaaggagatcaccaagtgcctggagttcaagagcaagcatgaggagattgacctggtgtccctggaggagttctacaaggaggcccccccagacatcagcaaggccgaggtgaccatgggagacccccaccagcagaccctggcccggctggactgggagctggagcagaggaagaggctggccgagaagtacagagaatgtctgagcaacaaggagaagatcctgaaggagattgaggtgaagaagtag

SEQ ID NO: 173175 - DNA, 2052 bp, synthetic construct; identical to SEQ ID NO: 173169
  misc_feature 1..2052: note = Description of Artificial Sequence: Synthetic coding sequence
  source 1..2052: mol_type = other DNA

SEQ ID NO: 173176 - DNA, 615 bp, synthetic construct
  misc_feature 1..615: note = Description of Artificial Sequence: Synthetic coding sequence
  source 1..615: mol_type = other DNA
atgggcgctgtgacagatgatgaagtcatcaggaagaggctgctgattgatggagatggagctggagatgaccggcgcatcaacctgctggtgaagagcttcatcaagtggtgcaacagcggcagccaggaggagggctacagccagtaccagaggatgctgagcaccctgagccagtgtgagttctccatgggcaagaccctgctggtgtatgacatgaacctgcgggagatggagaactatgagaagatctacaaggagattgaatgttccattgctggggcccacgagaagattgctgagtgcaagaagcagatcctgcaggccaagaggatcaggaagaaccggcaggagtatgatgccctggccaaggtgatccagcaccacccagacagacatgagaccctgaaggagctggaggccctgggcaaggagctggagcacctgagccacatcaaggagagcgtggaggacaagctggagctgcggaggaagcagttccacgtgctgctgagcaccatccacgagctgcagcagaccctggagaatgatgagaagctgtctgaggtggaggaggcccaggaggcctccatggagacagaccccaagccctag

SEQ ID NO: 173177 - DNA, 711 bp, synthetic construct
  misc_feature 1..711: note = Description of Artificial Sequence: Synthetic coding sequence
  source 1..711: mol_type = other DNA
atgtctgaggcccccagggctgagacctttgtgttcctggacctggaggccaccggcctgcccagcgtggagcctgagattgctgagctgagcctgtttgctgtgcacaggagcagcctggagaaccctgagcatgatgagagcggggccctggtgctgccccgggtgctggacaagctgaccctgtgcatgtgcccagagcggcccttcaccgccaaggccagcgagatcaccggcctgagcagcgagggcctggcccgctgcaggaaggccggctttgatggagctgtggtgaggaccctgcaggccttcctgagccggcaggccggccccatctgcctggtggcccacaacggctttgattatgacttccccctgctgtgtgccgagctgcggcggctgggcgcccggctgccccgggacacagtgtgcctggacaccctgcctgccctgcggggcctggaccgggcccacagccacggcacccgggcccggggccggcagggctacagcctgggcagcctcttccaccgctacttccgggcagagcccagcgctgcccacagcgcagaaggagatgtgcacaccctgctgctgatcttcctgcacagagctgctgagctgctggcctgggcagatgagcaggcccggggctgggcccacatcgagcccatgtacctgcccccagatgaccccagcctggaggcctag

SEQ ID NO: 173178 - DNA, 840 bp, synthetic construct
  misc_feature 1..840: note = Description of Artificial Sequence: Synthetic coding sequence
  source 1..840: mol_type = other DNA
atgggccgggccggcagccccctgcccaggagctcctggcccaggatggatgactgtggcagccgcagccgctgcagccccaccctgtgcagcagcctgcggacctgctacccccggggcaacatcaccatgtctgaggcccccagggctgagacctttgtgttcctggacctggaggccaccggcctgcccagcgtggagcctgagattgctgagctgagcctgtttgctgtgcacaggagcagcctggagaaccctgagcatgatgaaagtggggccctggtgctgccccgggtgctggacaagctgaccctgtgcatgtgcccagagcggcccttcaccgccaaggccagcgagatcaccggcctgagcagcgagggcctggcccgctgcaggaaggccggctttgatggagctgtggtgaggaccctgcaggccttcctgagccggcaggccggccccatctgcctggtggcccacaatggatttgattatgacttccccctgctgtgtgccgagctgcggcggctgggcgcccggctgccccgggacacagtgtgcctggacaccctgcctgccctgcggggcctggaccgggcccacagccacggcacccgggcccggggccggcagggctacagcctgggcagcctcttccaccgctacttccgggcagagcccagcgctgcccacagcgcagaaggagatgtgcacaccctgctgctgatcttcctgcacagagctgctgagctgctggcctgggcagatgagcaggcccggggctgggcccacatcgagcccatgtacctgcccccagatgaccccagcctggaggcctag

SEQ ID NO: 173179 - DNA, 711 bp, synthetic construct; identical to SEQ ID NO: 173177
  misc_feature 1..711: note = Description of Artificial Sequence: Synthetic coding sequence
  source 1..711: mol_type = other DNA

SEQ ID NO: 173180 - DNA, 711 bp, synthetic construct; identical to SEQ ID NO: 173177
  misc_feature 1..711: note = Description of Artificial Sequence: Synthetic coding sequence
  source 1..711: mol_type = other DNA

SEQ ID NO: 173181 - DNA, 840 bp, synthetic construct; identical to SEQ ID NO: 173178
  misc_feature 1..840: note = Description of Artificial Sequence: Synthetic coding sequence
  source 1..840: mol_type = other DNA

SEQ ID NO: 173182 - DNA, 711 bp, synthetic construct; identical to SEQ ID NO: 173177
  misc_feature 1..711: note = Description of Artificial Sequence: Synthetic coding sequence
  source 1..711: mol_type = other DNA

SEQ ID NO: 173183 - DNA, 840 bp, synthetic construct; identical to SEQ ID NO: 173178
  misc_feature 1..840: note = Description of Artificial Sequence: Synthetic coding sequence
  source 1..840: mol_type = other DNA

SEQ ID NO: 173184 - DNA, 837 bp, synthetic construct
  misc_feature 1..837: note = Description of Artificial Sequence: Synthetic coding sequence
  source 1..837: mol_type = other DNA
atgattgtggccgctgaggccgtggccgccccccgctgtgccctggtgggggacagaagtggagcagatgccccccgggccaagggccacagcctgcggacctgctacccccggggcaacatcaccatgtctgaggcccccagggctgagacctttgtgttcctggacctggaggccaccggcctgcccagcgtggagcctgagattgctgagctgagcctgtttgctgtgcacaggagcagcctggagaaccctgagcatgatgagagcggggccctggtgctgccccgggtgctggacaagctgaccctgtgcatgtgcccagagcggcccttcaccgccaaggccagcgagatcaccggcctgagcagcgagggcctggcccgctgcaggaaggccggctttgatggagctgtggtgaggaccctgcaggccttcctgagccggcaggccggccccatctgcctggtggcccacaacggctttgattatgacttccccctgctgtgtgccgagctgcggcggctgggcgcccggctgccccgggacacagtgtgcctggacaccctgcctgccctgcggggcctggaccgggcccacagccacggcacccgggcccggggccggcagggctacagcctgggcagcctcttccaccgctacttccgggcagagcccagcgctgcccacagcgcagaaggagatgtgcacaccctgctgctgatcttcctgcacagagctgctgagctgctggcctgggcagatgagcaggcccggggctgggcccacatcgagcccatgtacctgcccccagatgaccccagcctggaggcctag

SEQ ID NO: 173185 - DNA, 2172 bp, synthetic construct
  misc_feature 1..2172: note = Description of Artificial Sequence: Synthetic coding sequence
  source 1..2172: mol_type = other DNA
atgtttgaggagaaggccagcagccccagcggcaagatgggcggggaggagaagcccatcggggccggggaggagaagcagaaggagggcggcaagaagaagaacaaggagggcagcggagatggcggccgggcagagctgaacccctggccagagtacatctacacccggctggagatgtacaacatcctgaaggccgagcatgacagcatcctggccgagaaggccgagaaggacagcaagcccatcaaggtgaccctgcctgatggcaagcaggtggatgctgagagctggaagaccaccccctaccagatcgcctgtggcatcagccagggcctggccgacaacacagtgattgccaaggtgaacaacgtggtgtgggacctggaccggcccctggaggaggactgcaccctggagctgctgaagtttgaagatgaggaggcccaggccgtgtactggcacagcagcgcccacatcatgggagaggccatggagcgggtgtatggaggctgcctgtgctacggcccccccattgaaaatggcttctactatgacatgtacctggaggagggcggcgtgagcagcaatgacttcagcagcctggaggccctgtgcaagaagatcatcaaggagaagcaggcctttgagcggctggaggtgaagaaggagaccctgctggccatgttcaagtacaacaagttcaagtgccgcatcctgaatgagaaggtgaacacccccaccaccaccgtgtaccgctgtggccccctgattgacctgtgccggggcccccacgtgcgccacacaggcaagatcaaggccctgaagatccacaagaacagcagcacctactgggagggcaaggctgacatggagaccctgcagaggatctacggcatctccttcccagaccccaagatgctgaaggagtgggagaagttccaggaggaggccaagaacagagaccacaggaagattggccgggaccaggagctgtacttcttccacgagctgagccctggcagctgcttcttcctgcccaagggggcctacatctacaatgccctgattgagttcatccgctctgagtacaggaagaggggcttccaggaggtggtgacccccaacatcttcaacagccggctgtggatgaccagcggccactggcagcactacagcgagaacatgttctcctttgaggtggagaaggagctgtttgccctgaagcccatgaactgccccggccactgcctgatgtttgaccaccggcccaggtcctggagggagctgcccctgcggctggccgactttggagtgctgcacagaaatgagctgagcggggccctgaccggcctgaccagggtgcggcgcttccagcaggatgatgcccacatcttctgtgccatggagcagattgaagatgagatcaagggctgcctggacttcctgaggacagtgtacagcgtgtttggcttctccttcaagctgaacctgagcaccaggcctgagaagttcctgggggacatcgaggtgtgggaccaggccgagaagcagctggagaacagcctgaatgaatttggagagaagtgggagctgaacagcggagatggagccttctacggccccaagattgacatccagatcaaggatgccatcggccgctaccaccagtgtgccaccatccagctggacttccagctgcccatccgcttcaacctgacctacgtgtcccatgatggagatgacaagaagaggcctgtgattgtgcaccgggccatcctgggctctgtggagaggatgattgccatcctgacagagaactacggcggcaagtggcccttctggctgagcccccggcaggtgatggtggtgcctgtgggccccacctgtgatgaatatgcccagaaggtgcggcagcagttccatgatgccaagttcatggctgacatcgacctggaccccggctgcaccctgaacaagaagatcagaaatgcccagctggcccagtacaacttcatcctggtggtgggggagaaggagaagatctctggaacagtgaacatccgcacccgggacaacaaggtgcacggggagaggaccatcagcgagaccatcgagcggctgcagcagctgaaggagttccgcagcaagcaggccgaggaggagttctag

SEQ ID NO: 173186 - DNA, 1809 bp, synthetic construct
  misc_feature 1..1809: note = Description of Artificial Sequence: Synthetic coding sequence
  source 1..1809: mol_type = other DNA
atgatccccttctggcagaagaggcagaagaagatcgccagccagctgaagagcctgtgcctgatggtgaaccggctgatgaggaacctgggcaagctgcaccacatcaagctgcctgtggagctggccatggagcgggtgtatggaggctgcctgtgctacggcccccccattgaaaatggcttctactatgacatgtacctggaggagggcggcgtgagcagcaatgacttcagcagcctggaggccctgtgcaagaagatcatcaaggagaagcaggcctttgagcggctggaggtgaagaaggagaccctgctggccatgttcaagtacaacaagttcaagtgccgcatcctgaatgagaaggtgaacacccccaccaccaccgtgtaccgctgtggccccctgattgacctgtgccggggcccccacgtgcgccacacaggcaagatcaaggccctgaagatccacaagaacagcagcacctactgggagggcaaggctgacatggagaccctgcagaggatctacggcatctccttcccagaccccaagatgctgaaggagtgggagaagttccaggaggaggccaagaacagagaccacaggaagattggccgggaccaggagctgtacttcttccacgagctgagccctggcagctgcttcttcctgcccaagggggcctacatctacaatgccctgattgagttcatccgctctgagtacaggaagaggggcttccaggaggtggtgacccccaacatcttcaacagccggctgtggatgaccagcggccactggcagcactacagcgagaacatgttctcctttgaggtggagaaggagctgtttgccctgaagcccatgaactgccccggccactgcctgatgtttgaccaccggcccaggtcctggagggagctgcccctgcggctggccgactttggagtgctgcacagaaatgagctgagcggggccctgaccggcctgaccagggtgcggcgcttccagcaggatgatgcccacatcttctgtgccatggagcagattgaagatgagatcaagggctgcctggacttcctgaggacagtgtacagcgtgtttggcttctccttcaagctgaacctgagcaccaggcctgagaagttcctgggggacatcgaggtgtgggaccaggccgagaagcagctggagaacagcctgaatgaatttggagagaagtgggagctgaacagcggagatggagccttctacggccccaagattgacatccagatcaaggatgccatcggccgctaccaccagtgtgccaccatccagctggacttccagctgcccatccgcttcaacctgacctacgtgtcccatgatggagatgacaagaagaggcctgtgattgtgcaccgggccatcctgggctctgtggagaggatgattgccatcctgacagaaaattatggaggcaagtggcccttctggctgagcccccggcaggtgatggtggtgcctgtgggccccacctgtgatgaatatgcccagaaggtgcggcagcagttccatgatgccaagttcatggctgacatcgacctggaccccggctgcaccctgaacaagaagatcagaaatgcccagctggcccagtacaacttcatcctggtggtgggggagaaggagaagatcagcggcaccgtgaacatccgcacccgggacaacaaggtgcatggagagaggaccatcagcgagaccatcgagcggctgcagcagctgaaggagttccgcagcaagcaggccgaggaggagttctag

SEQ ID NO: 173187 - DNA, 2271 bp, synthetic construct
  misc_feature 1..2271: note = Description of Artificial Sequence: Synthetic coding sequence
  source 1..2271: mol_type = other DNA
atgtttgaggagaaggccagcagccccagcggcaagatgggcggggaggagaagcccatcggggccggggaggagaagcagaaggagggcggcaagaagaagaacaaggagggcagcggagatggcggccgggcagagctgaacccctggccagagtacatctacacccggctggagatgtacaacatcctgaaggccgagcatgacagcatcctggccgagaaggccgagaaggacagcaagcccatcaaggtgaccctgcctgatggcaagcaggtggatgctgagagctggaagaccaccccctaccagatcgcctgtggcatcagccacacagccagctgcaagaacctgagcagcctggccagcctgctggcctctgtggccatccccagcagcggcatgccctggccacccctcttcttcctgcagggcctggccgacaacacagtcatcgccaaggtgaacaacgtggtgtgggacctggaccggcccctggaggaggactgcaccctggagctgctgaagtttgaagatgaggaggcccaggccgtgtactggcacagcagcgcccacatcatgggagaggccatggagcgggtgtatggaggctgcctgtgctacggcccccccattgaaaatggcttctactatgacatgtacctggaggagggcggcgtgagcagcaatgacttcagcagcctggaggccctgtgcaagaagatcatcaaggagaagcaggcctttgagcggctggaggtgaagaaggagaccctgctggccatgttcaagtacaacaagttcaagtgccgcatcctgaatgagaaggtgaacacccccaccaccaccgtgtaccgctgtggccccctgattgacctgtgccggggcccccacgtgcgccacacaggcaagatcaaggccctgaagatccacaagaacagcagcacctactgggagggcaaggctgacatggagaccctgcagaggatctacggcatctccttcccagaccccaagatgctgaaggagtgggagaagttccaggaggaggccaagaacagagaccacaggaagattggccgggaccaggagctgtacttcttccacgagctgagccctggcagctgcttcttcctgcccaagggggcctacatctacaatgccctgattgagttcatccgctctgagtacaggaagaggggcttccaggaggtggtgacccccaacatcttcaacagccggctgtggatgaccagcggccactggcagcactacagcgagaacatgttctcctttgaggtggagaaggagctgtttgccctgaagcccatgaactgccccggccactgcctgatgtttgaccaccggcccaggtcctggagggagctgcccctgcggctggccgactttggagtgctgcacagaaatgagctgagcggggccctgaccggcctgaccagggtgcggcgcttccagcaggatgatgcccacatcttctgtgccatggagcagattgaagatgagatcaagggctgcctggacttcctgaggacagtgtacagcgtgtttggcttctccttcaagctgaacctgagcaccaggcctgagaagttcctgggggacatcgaggtgtgggaccaggccgagaagcagctggagaacagcctgaatgaatttggagagaagtgggagctgaacagcggagatggagccttctacggccccaagattgacatccagatcaaggatgccatcggccgctaccaccagtgtgccaccatccagctggacttccagctgcccatccgcttcaacctgacctacgtgtcccatgatggagatgacaagaagaggcctgtgattgtgcaccgggccatcctgggctctgtggagaggatgattgccatcctgacagaaaattatggaggcaagtggcccttctggctgagcccccggcaggtgatggtggtgcctgtgggccccacctgtgatgaatatgcccagaaggtgcggcagcagttccatgatgccaagttcatggctgacatcgacctggaccccggctgcaccctgaacaagaagatcagaaatgcccagctggcccagtacaacttcatcctggtggtgggggagaaggagaagatcagcggcaccgtgaacatccgcacccgggacaacaaggtgcatggagagaggaccatcagcgagaccatcgagcggctgcagcagctgaaggagttccgcagcaagcaggccgaggaggagttctag

SEQ ID NO: 173188 - DNA, 2172 bp, synthetic construct; identical to SEQ ID NO: 173185
  misc_feature 1..2172: note = Description of Artificial Sequence: Synthetic coding sequence
  source 1..2172: mol_type = other DNA

SEQ ID NO: 173189 - DNA, 390 bp, synthetic construct
  misc_feature 1..390: note = Description of Artificial Sequence: Synthetic coding sequence
  source 1..390: mol_type = other DNA
atgtttgaggagaaggccagcagccccagcggcaagatgggcggggaggagaagcccatcggggccggggaggagaagcagaaggagggcggcaagaagaagaacaaggagggcagcggagatggcggccgggcagagctgaacccctggccagagtacatctacacccggctggagatgtacaacatcctgaaggccgagcatgacagcatcctggccgagaaggccgagaaggacagcaagcccatcaaggtgaccctgcctgatggcaagcaggtggatgctgagagctggaagaccaccccctaccagatcgcctgtggcatcagccagggcctggccgacaacacagtgattgccaaggtgaacaacgtggtgtgggacctgtag

SEQ ID NO: 173190 - DNA, 1860 bp, synthetic construct
  misc_feature 1..1860: note = Description of Artificial Sequence: Synthetic coding sequence
  source 1..1860: mol_type = other DNA
atggaggtggagctgagccagggcctggccgacaacacagtgattgccaaggtgaacaacgtggtgtgggacctggaccggcccctggaggaggactgcaccctggagctgctgaagtttgaagatgaggaggcccaggccgtgtactggcacagcagcgcccacatcatgggagaggccatggagcgggtgtatggaggctgcctgtgctacggcccccccattgaaaatggcttctactatgacatgtacctggaggagggcggcgtgagcagcaatgacttcagcagcctggaggccctgtgcaagaagatcatcaaggagaagcaggcctttgagcggctggaggtgaagaaggagaccctgctggccatgttcaagtacaacaagttcaagtgccgcatcctgaatgagaaggtgaacacccccaccaccaccgtgtaccgctgtggccccctgattgacctgtgccggggcccccacgtgcgccacacaggcaagatcaaggccctgaagatccacaagaacagcagcacctactgggagggcaaggctgacatggagaccctgcagaggatctacggcatctccttcccagaccccaagatgctgaaggagtgggagaagttccaggaggaggccaagaacagagaccacaggaagattggccgggaccaggagctgtacttcttccacgagctgagccctggcagctgcttcttcctgcccaagggggcctacatctacaatgccctgattgagttcatccgctctgagtacaggaagaggggcttccaggaggtggtgacccccaacatcttcaacagccggctgtggatgaccagcggccactggcagcactacagcgagaacatgttctcctttgaggtggagaaggagctgtttgccctgaagcccatgaactgccccggccactgcctgatgtttgaccaccggcccaggtcctggagggagctgcccctgcggctggccgactttggagtgctgcacagaaatgagctgagcggggccctgaccggcctgaccagggtgcggcgcttccagcaggatgatgcccacatcttctgtgccatggagcagattgaagatgagatcaagggctgcctggacttcctgaggacagtgtacagcgtgtttggcttctccttcaagctgaacctgagcaccaggcctgagaagttcctgggggacatcgaggtgtgggaccaggccgagaagcagctggagaacagcctgaatgaatttggagagaagtgggagctgaacagcggagatggagccttctacggccccaagattgacatccagatcaaggatgccatcggccgctaccaccagtgtgccaccatccagctggacttccagctgcccatccgcttcaacctgacctacgtgtcccatgatggagatgacaagaagaggcctgtgattgtgcaccgggccatcctgggctctgtggagaggatgattgccatcctgacagagaactacggcggcaagtggcccttctggctgagcccccggcaggtgatggtggtgcctgtgggccccacctgtgatgaatatgcccagaaggtgcggcagcagttccatgatgccaagttcatggctgacatcgacctggaccccggctgcaccctgaacaagaagatcagaaatgcccagctggcccagtacaacttcatcctggtggtgggggagaaggagaagatctctggaacagtgaacatccgcacccgggacaacaaggtgcacggggagaggaccatcagcgagaccatcgagcggctgcagcagctgaaggagttccgcagcaagcaggccgaggaggagttctag

SEQ ID NO: 173191 - DNA, 1332 bp, synthetic construct
  misc_feature 1..1332: note = Description of Artificial Sequence: Synthetic coding sequence
  source 1..1332: mol_type = other DNA
atggagcacaaccccctgcccaccagccctgctgaccagttcaacacaggccgctactgcagcggccccagcacagaatatggcttctaccatgacttcttcctgggcaaggagcgctgtggcaccctggtggacctgtgccagggcccccacctgcggcacacaggccagatcggcggcctgaagctgctgtctgcagaatatgcccaccggggcttcagcgaggtgaagacccccaccctcttcagcaccaagctgtgggagcagagcggccactgggagcactaccaggaggacatgtttgctgtgcagcccccaggcagtgacaggcctcccagcagccagagtgatgacagcaccaggcacatcacagacaccctggccctgaagcccatgaactgcccagcccactgcctgatgtttgcccaccggcccaggtcctggagggagctgcccctgcggctggccgactttggagccctgcacagagctgaggccagcggcggcctgggcggcctgacccggctgcgctgcttccagcaggatgatgcccacatcttctgcaccacagaccagctggaggccgagatccagagctgcctggacttcctgcggtctgtgtatgctgtgctgggcttctccttccggctggccctgagcacccggcccagcggcttcctgggggacccctgcctgtgggaccaggccgagcaggtgctgaagcaggccctgaaggagtttggagagccctgggacctgaacagcggagatggagccttctacggccccaagattgatgtgcacctgcatgatgccctgggccggccccaccagtgtggcaccatccagctggacttccagctgcccctgcgctttgacctgcagtacaagggccaggccggggccctggagaggcctgtgctgatccacagagctgtgctgggctctgtggagcggctgctgggcgtgctggccgagagctgtggcggcaagtggcccctgtggctgagccccttccaggtggtggtgattcctgtgggcagcgagcaggaggagtatgccaaggaggcccagcagagcctgcgggccgccggcctggtgtctgacctggatgctgacagcggcctgaccctgagccgccgcatcagaagagcccagctggcccactacaacttccagtttgtggtgggccagaaggagcagagcaagaggacagtgaacatccgcacccgggacaacagaaggctgggggagtgggacctgcctgaggccgtgcagaggctggtggagctgcagaacaccagggtgcccaatgctgaggagatcttctag

SEQ ID NO: 173192 - DNA, 1332 bp, synthetic construct
  misc_feature 1..1332: note = Description of Artificial Sequence: Synthetic coding sequence
  source 1..1332: mol_type = other DNA
atggagcacaaccccctgcccaccagccctgctgaccagttcaacacaggccgctactgccggggccccagcacagaatatggcttctaccatgacttcttcctgggcaaggagcgctgtggcaccctggtggacctgtgccagggcccccacctgcggcacacaggccagatcggcggcctgaagctgctgtctgcagaatatgcccaccggggcttcagcgaggtgaagacccccaccctcttcagcaccaagctgtgggagcagagcggccactgggagcactaccaggaggacatgtttgctgtgcagcccccaggcagtgacaggcctcccagcagccagagtgatgacagcaccaggcacatcacagacaccctggccctgaagcccatgaactgcccagcccactgcctgatgtttgcccaccggcccaggtcctggagggagctgcccctgcggctggccgactttggagccctgcacagagctgaggccagcggcggcctgggcggcctgacccggctgcgctgcttccagcaggatgatgcccacatcttctgcaccacagaccagctggaggccgagatccagagctgcctggacttcctgcggtctgtgtatgctgtgctgggcttctccttccggctggccctgagcacccggcccagcggcttcctgggggacccctgcctgtgggaccaggccgagcaggtgctgaagcaggccctgaaggagtttggagagccctgggacctgaacagcggagatggagccttctacggccccaagattgatgtgcacctgcatgatgccctgggccggccccaccagtgtggcaccatccagctggacttccagctgcccctgcgctttgacctgcagtacaagggccaggccggggccctggagaggcctgtgctgatccacagagctgtgctgggctctgtggagcggctgctgggcgtgctggccgagagctgtggcggcaagtggcccctgtggctgagccccttccaggtggtggtgattcctgtgggcagcgagcaggaggagtatgccaaggaggcccagcagagcctgcgggccgccggcctggtgtctgacctggatgctgacagcggcctgaccctgagccgccgcatcagaagagcccagctggcccactacaacttccagtttgtggtgggccagaaggagcagagcaagaggacagtgaacatccgcacccgggacaacagaaggctgggggagtgggacctgcctgaggccgtgcagaggctggtggagctgcagaacaccagggtgcccaatgctgaggagatcttctag

SEQ ID NO: 173193 - DNA, 537 bp, synthetic construct
  misc_feature 1..537: note = Description of Artificial Sequence: Synthetic coding sequence
  source 1..537: mol_type = other DNA
atggccctgtaccagcgctggcgctgcctgcggctgcagggcctgcaggcctgccgcctgcacacagctgtggtgtccaccccaccccgctggctggccgagcggctgggcctgtttgaggagctgtgggccgcccaggtgaagaggctggcctccatggcccagaaggagcccaggaccatcaagatcagcctgcccggcggccagaagattgatgctgtggcctggaacaccaccccctaccagctggcccggcagatcagcagcaccctggccgacacagctgtggccgcccaggtgaatggagagccctatgacctggagcggcccctggagacagacagcgacctgcgcttcctgacctttgacagccctgagggcaaggctgtgtccttcttcctgatccggaacacagtgaccaccaagccccgggacatcgaggccggcaacagcaacatcctcttcttctgccgctccttcagcatctgctcctgggagggggacctgccccagacagtgctgaccatctctggatag

SEQ ID NO: 173194 - DNA, 1767 bp, synthetic construct
  misc_feature 1..1767: note = Description of Artificial Sequence: Synthetic coding sequence
  source 1..1767: mol_type = other DNA
atggccctgtaccagcgctggcgctgcctgcggctgcagggcctgcaggcctgccgcctgcacacagctgtggtgtccaccccaccccgctggctggccgagcggctgggcctgtttgaggagctgtgggccgcccaggtgaagaggctggcctccatggcccagaaggagcccaggaccatcaagatcagcctgcccggcggccagaagattgatgctgtggcctggaacaccaccccctaccagctggcccggcagatcagcagcaccctggccgacacagctgtggccgcccaggtgaatggagagccctatgacctggagcggcccctggagacagacagcgacctgcgcttcctgacctttgacagccctgagggcaaggctgtgttctggcacagcagcacccacgtgctgggcgctgctgctgagcagttcctgggcgctgtgctgtgccggggccccagcacagaatatggcttctaccatgacttcttcctgggcaaggagaggaccatccggggcagcgagctgcctgtgctggagcgcatctgccaggagctgacagctgctgcccggcccttccggcggctggaggccagccgggaccagctgcggcagctgttcaaggccgagtatgcccaccggggcttcagcgaggtgaagacccccaccctcttcagcaccaagctgtgggagcagagcggccactgggagcactaccaggaggacatgtttgctgtgcagcccccaggcagtgaccggccccccagcagccagagtgatgacagcaccaggcacatcacagacaccctggccctgaagcccatgaactgcccagcccactgcctgatgtttgcccaccggcccaggtcctggagggagctgcccctgcggctggccgactttggagccctgcacagagctgaggccagcggcggcctgggcggcctgacccggctgcgctgcttccagcaggatgatgcccacatcttctgcaccacagaccagctggaggccgagatccagagctgcctggacttcctgcggtctgtgtatgctgtgctgggcttctccttccggctggccctgagcacccggcccagcggcttcctgggggacccctgcctgtgggaccaggccgagcaggtgctgaagcaggccctgaaggagtttggagagccctgggacctgaacagcggagatggagccttctacggccccaagattgatgtgcacctgcatgatgccctgggccggccccaccagtgtggcaccatccagctggacttccagctgcccctgcgctttgacctgcagtacaagggccaggccggggccctggagaggcctgtgctgatccacagagctgtgctgggctctgtggagcggctgctgggcgtgctggccgagagctgtggcggcaagtggcccctgtggctgagccccttccaggtggtggtgattcctgtgggcagcgagcaggaggagtatgccaaggaggcccagcagagcctgcgggctgctggcctggtgtctgacctggatgctgacagcggcctgaccctgagccgccgcatccggcgggcccagctggcccactacaacttccagtttgtggtgggccagaaggagcagagcaagaggacagtgaacatccgcacccgggacaacagaaggctgggggagtgggacctgcctgaggccgtgcagaggctggtggagctgcagaacaccagggtgcccaatgctgaggagatcttctag

SEQ ID NO: 173195 - DNA, 2157 bp, synthetic construct
  misc_feature 1..2157: note = Description of Artificial Sequence: Synthetic coding sequence
  source 1..2157: mol_type = other DNA
atggccctgtaccagcgctggcgctgcctgcggctgcagggcctgcaggcctgccgcctgcacacagctgtggtgtccaccccaccccgctggctggccgagcggctgggcctgtttgaggagctgtgggccgcccaggtgaagaggctggcctccatggcccagaaggagcccaggaccatcaagatcagcctgcccggcggccagaagattgatgctgtggcctggaacaccaccccctaccagctggcccggcagatcagcagcaccctggccgacacagctgtggccgcccaggtgaatggagagccctatgacctggagcggcccctggagacagacagcgacctgcgcttcctgacctttgacagccctgagggcaaggctgtgttctggcacagcagcacccacgtgctgggcgctgctgctgagcagttcctgggcgctgtgctgtgccggggccccagcacagaatatggcttctaccatgacttcttcctgggcaaggagaggaccatccggggcagcgagctgcctgtgctggagcgcatctgccaggagctgacagctgctgcccggcccttccggcggctggaggccagccgggaccagctgcggcagctgttcaaggacaaccccttcaagctgcacctgattgaggagaaggtgacaggccccacagccaccgtgtatggctgcggcaccctggtggacctgtgccagggcccccacctgcggcacacaggccagattggaggcctgaagctgctgagcaacagcagcagcctgtggaggagcagcggggcccctgagaccctgcagagggtgtctggcatctccttccccaccacagagctgctgcgggtgtgggaggcctggagggaggaggccgagctgcgggaccacagaagaattggcaaggagcaggagctgttcttcttccacgagctgagccctggcagctgcttcttcctgccccggggcaccagggtgtacaatgccctggtggccttcatccgggcagaatatgcccaccggggcttcagcgaggtgaagacccccaccctcttcagcaccaagctgtgggagcagagcggccactgggagcactaccaggaggacatgtttgctgtgcagcccccaggcagtgaccggccccccagcagccagagtgatgacagcaccaggcacatcacagacaccctggccctgaagcccatgaactgcccagcccactgcctgatgtttgcccaccggcccaggtcctggagggagctgcccctgcggctggccgactttggagccctgcacagagctgaggccagcggcggcctgggcggcctgacccggctgcgctgcttccagcaggatgatgcccacatcttctgcaccacagaccagctggaggccgagatccagagctgcctggacttcctgcggtctgtgtatgctgtgctgggcttctccttccggctggccctgagcacccggcccagcggcttcctgggggacccctgcctgtgggaccaggccgagcaggtgctgaagcaggccctgaaggagtttggagagccctgggacctgaacagcggagatggagccttctacggccccaagattgatgtgcacctgcatgatgccctgggccggccccaccagtgtggcaccatccagctggacttccagctgcccctgcgctttgacctgcagtacaagggccaggccggggccctggagaggcctgtgctgatccacagagctgtgctgggctctgtggagcggctgctgggcgtgctggccgagagctgtggcggcaagtggcccctgtggctgagccccttccaggtggtggtgattcctgtgggcagcgagcaggaggagtatgccaaggaggcccagcagagcctgcgggctgctggcctggtgtctgacctggatgctgacagcggcctgaccctgagccgccgcatccggcgggcccagctggcccactacaacttccagtttgtggtgggccagaaggagcagagcaagaggacagtgaacatccgcacccgggacaacagaaggctgggggagtgggacctgcctgaggccgtgcagaggctggtggagctgcagaacaccagggtgcccaatgctgaggagatcttctag

SEQ ID NO: 173196 - DNA, 510 bp, synthetic construct
  misc_feature 1..510: note = Description of Artificial Sequence: Synthetic coding sequence
  source 1..510: mol_type = other DNA
atggccctgtaccagcgctggcgctgcctgcggctgcagggcctgcaggcctgccgcctgcacacagctgtggtgtccaccccaccccgctggctggccgagcggctgggcctgtttgaggagctgtgggccgcccaggtgaagaggctggcctccatggcccagaaggagcccaggaccatcaagatcagcctgcccggcggccagaagattgatgctgtggcctggaacaccaccccctaccagctggcccggcagatcagcagcaccctggccgacacagctgtggccgcccaggtgaatggagagccctatgacctggagcggcccctggagacagacagcgacctgcgcttcctgacctttgacagccctgagggcaaggctgacaaccctggcctgcgggccgcctgctttggagctgacctgcccggcacctacagctgctgcagcaccctgcctgaggcccggggcttcaccggcagcgccagccctgtggtgcagggctag

SEQ ID NO: 173197 - DNA, 4974 bp, synthetic construct
  misc_feature 1..4974: note = Description of Artificial Sequence: Synthetic coding sequence
  source 1..4974: mol_type = other DNA
atgggcctgcaggcccggcgctgggccagcggcagcagaggagctgctggccccaggagaggagtgctgcagctgctgcccctgcccctgcccctgcccctgctgctgctgctgctgctgcggcctggggccggccgggccgccgcccagggcgaggccgaggcccccaccctgtacctgtggaagacaggcccctggggccgctgcatgggagatgaatgtggccctgggggcatccagaccagggctgtgtggtgtgcccacgtggagggctggaccaccctgcacaccaactgcaagcaggccgagcggcccaacaaccagcagaactgcttcaaggtgtgtgactggcacaaggagctgtatgactggaggctgggcccctggaaccagtgccagcccgtcatcagcaagagcctggagaagcccctggagtgcatcaagggggaggagggcatccaggtgcgggagatcgcctgcatccagaaggacaaggacatcccagctgaggacatcatctgtgagtactttgagcccaagcccctgctggagcaggcctgcctgatcccctgccagcaggactgcatcgtgtctgagttcagcgcctggagcgaatgttccaagacctgtggcagcggcctgcagcacaggaccaggcatgtggtggccccaccccagtttggaggcagcggctgccccaacctgacagagttccaggtgtgccagagcagcccctgtgaggccgaggagctgcgctacagcctgcacgtgggcccctggagcacctgcagcatgccccacagccggcaggtgcggcaggcccggcggcggggcaagaacaaggagcgggagaaggacaggagcaaaggagtgaaggaccctgaggcccgggagctgatcaagaagaagaggaacagaaaccggcagaaccggcaggagaacaagtactgggacatccagatcggctaccagacccgggaggtgatgtgcatcaacaagacaggcaaggctgctgacctgtccttctgccagcaggagaagctgcccatgaccttccagagctgtgtgatcaccaaggagtgccaggtgtctgagtggagcgagtggagcccctgcagcaagacctgccacgacatggtgtccccagctggcaccagggtgaggaccaggaccatccggcagttccccatcggcagcgagaaggagtgcccagagtttgaggagaaggagccctgcctgagccagggagatggagtggtgccctgtgccacctacggctggaggaccacagagtggacagagtgccgggtggaccccctgctgagccagcaggacaagagaagaggcaaccagacagccctgtgtggcggcggcatccagacccgggaggtgtactgtgtgcaggccaatgaaaacctgctgagccagctgagcacccacaagaacaaggaggccagcaagcccatggacctgaagctgtgcaccggccccatccccaacaccacccagctgtgccacatcccctgccccacagaatgtgaggtgagcccctggagcgcctggggcccctgcacctatgagaactgcaatgaccagcagggcaagaagggcttcaagctgaggaagaggcgcatcaccaatgagcccaccggcggcagcggcgtgacaggcaactgcccccacctgctggaggccatcccctgtgaggagcccgcctgctatgactggaaggctgtgcggctgggcaactgtgagccagacaacgggaaggaatgtggccctggcacccaggtgcaggaggtggtgtgcatcaacagtgatggagaggaggtggaccggcagctgtgcagagatgccatcttccccatccctgtggcctgtgatgccccctgccccaaggactgtgtgctgagcacctggagcacctggagcagctgcagccacacctgcagcggcaagaccacagagggcaagcagatccgggcccggagcatcctggcctatgctggggaggagggcggcatccgctgccccaacagcagcgccctgcaggaggtgcgcagctgcaatgagcacccctgcaccgtgtaccactggcagacaggcccctggggccagtgcatcgaggacacctctgtgtcctccttcaacaccaccaccacctggaatggagaggccagctgcagcgtgggcatgcagaccaggaaggtgatctgtgtgcgggtgaatgtgggccaggtgggccccaagaagtgcccagagagcctgcggcctgagaccgtgcggccctgcctgctgccctgcaagaaggactgcatcgtgaccccctacagcgactggaccagctgccccagcagctgcaaggagggggacagcagcatcaggaagcagagccgccacagggtcatcatccagctgcctgccaatggaggccgggactgcacagaccccctgtatgaggagaaggcctgtgaggccccccaggcctgccagagctaccgctggaagacccacaagtggaggcgctgccagctggtgccctggagcgtgcagcaggacagccctggggcccaggagggctgcggccctggccggcaggcccgggccatcacctgcaggaagcaggacggcggccaggccggcatccacgagtgcctgcagtatgccggccctgtgcctgccctgacccaggcctgccagatcccctgccaggatgactgccagctgacctcctggagcaagttcagcagctgcaatggagactgtggggctgtgaggaccaggaagaggaccctggtgggcaagagcaagaagaaggagaagtgcaagaacagccacctgtaccccctgattgagacccagtactgcccctgtgacaagtacaatgcccagcctgtgggcaactggagcgactgcatcctgcctgagggcaaggtggaggtgctgctgggcatgaaggtgcagggcgacatcaaggaatgtggccagggctaccgctaccaggccatggcctgctatgaccagaatggccgcctggtggagaccagccgctgcaacagccacggctacatcgaggaggcctgcatcatcccctgccccagcgactgcaagctgtctgagtggagcaactggagccgctgcagcaagagctgtggcagcggcgtgaaggtgcgcagcaagtggctgcgggagaagccctacaacggcggccggccctgccccaagctggaccacgtgaaccagttccaggtgtatgaggtggtgccctgccacagcgactgcaaccagtacctgtgggtgacagagccctggagcatctgcaaggtgacctttgtgaacatgagggagaactgtggggagggcgtgcagaccaggaaggtgcgctgcatgcagaacacagcagatggccccagcgagcacgtggaggactacctgtgtgaccctgaggagatgcccctgggcagccgggtgtgcaagctgccctgcccagaggactgtgtgatcagcgagtggggcccctggacccagtgtgtgctgccctgcaaccagagcagcttccggcagaggtctgctgaccccatccggcagcctgcagatgagggccgcagctgccccaatgctgtggagaaggagccctgcaacctgaacaagaactgctaccactatgactacaacgtgacagactggagcacctgccagctgtctgagaaggctgtgtgtggaaatggcatcaagaccaggatgctggactgtgtgcggagtgatggcaagtctgtggacctgaagtactgtgaggccctgggcctggagaagaactggcagatgaacaccagctgcatggtggagtgccctgtgaactgccagctgagtgactggagcccctggagcgaatgttcccagacctgtggcctgaccgggaagatgatcagaagaagaacagtgacccagcccttccagggagatggccggccctgccccagcctgatggaccagagcaagccctgccctgtgaagccctgctaccgctggcagtatggccagtggagcccctgccaggtgcaggaggcccagtgtggggagggcaccaggaccaggaacatcagctgtgtggtgtctgatggcagcgcagatgacttcagcaaggtggtggatgaggagttctgtgccgacatcgagctgatcattgatggcaacaagaacatggtgctggaggagagctgcagccagccctgccctggggactgctacctgaaggactggagctcctggagcctgtgccagctgacctgtgtgaatggagaggacctgggctttggaggcatccaggtgcgcagcaggcctgtgatcatccaggagctggagaaccagcacctgtgcccagagcagatgctggagaccaagagctgctatgatggccagtgctatgagtacaagtggatggccagcgcctggaagggcagcagcaggacagtgtggtgccagaggagtgatggcatcaacgtgactggaggctgcctggtgatgagccagccagatgctgacaggagctgcaaccccccctgcagccagccccacagctactgcagcgagaccaagacctgccactgtgaggagggctacacagaggtgatgagcagcaacagcaccctggagcagtgcaccctcatccctgtggtggtgctgcccaccatggaggacaagagaggagatgtgaagaccagcagagctgtgcaccccacccagcccagcagcaacccagctggccggggccgcacctggttcctgcagcccttcggcccagatggccgcctgaagacctgggtgtatggagtggccgccggggcctttgtgctgctgatcttcatcgtgtccatgatctacctggcctgcaagaagcccaagaagccccagaggcggcagaacaaccggctgaagcccctgaccctggcctatgatggagatgctgacatgtag

SEQ ID NO: 173198 - DNA, 4974 bp, synthetic construct
  misc_feature 1..4974: note = Description of Artificial Sequence: Synthetic coding sequence
  source 1..4974: mol_type = other DNA
atgggcctgcaggcccggcgctgggccagcggcagcagaggagctgctggccccaggagaggagtgctgcagctgctgcccctgcccctgcccctgcccctgctgctgctgctgctgctgcggcctggggccggccgggccgccgcccagggcgaggccgaggcccccaccctgtacctgtggaagacaggcccctggggccgctgcatgggagatgaatgtggccctgggggcatccagaccagggctgtgtggtgtgcccacgtggagggctggaccaccctgcacaccaactgcaagcaggccgagcggcccaacaaccagcagaactgcttcaaggtgtgtgactggcacaaggagctgtatgactggaggctgggcccctggaaccagtgccagcccgtcatcagcaagagcctggagaagcccctggagtgcatcaagggggaggagggcatccaggtgcgggagatcgcctgcatccagaaggacaaggacatcccagctgaggacatcatctgtgagtactttgagcccaagcccctgctggagcaggcctgcctgatcccctgccagcaggactgcatcgtgtctgagttcagcgcctggagcgaatgttccaagacctgtggcagcggcctgcagcacaggaccaggcatgtggtggccccaccccagtttggaggcagcggctgccccaacctgacagagttccaggtgtgccagagcagcccctgtgaggccgaggagctgcgctacagcctgcacgtgggcccctggagcacctgcagcatgccccacagccggcaggtgcggcaggcccggcggcggggcaagaacaaggagcgggagaaggacaggagcaaaggagtgaaggaccctgaggcccgggagctgatcaagaagaagaggaacagaaaccggcagaaccggcaggagaacaagtactgggacatccagatcggctaccagacccgggaggtgatgtgcatcaacaagacaggcaaggctgctgacctgtccttctgccagcaggagaagctgcccatgaccttccagagctgtgtgatcaccaaggagtgccaggtgtctgagtggagcgagtggagcccctgcagcaagacctgccacgacatggtgtccccagctggcaccagggtgaggaccaggaccatccggcagttccccatcggcagcgagaaggagtgcccagagtttgaggagaaggagccctgcctgagccagggagatggagtggtgccctgtgccacctacggctggaggaccacagagtggacagagtgccgggtggaccccctgctgagccagcaggacaagagaagaggcaaccagacagccctgtgtggcggcggcatccagacccgggaggtgtactgtgtgcaggccaatgaaaacctgctgagccagctgagcacccacaagaacaaggaggccagcaagcccatggacctgaagctgtgcaccggccccatccccaacaccacccagctgtgccacatcccctgccccacagaatgtgaggtgagcccctggagcgcctggggcccctgcacctatgagaactgcaatgaccagcagggcaagaagggcttcaagctgaggaagaggcgcatcaccaatgagcccaccggcggcagcggcgtgacaggcaactgcccccacctgctggaggccatcccctgtgaggagcccgcctgctatgactggaaggctgtgcggctgggcaactgtgagccagacaacgggaaggaatgtggccctggcacccaggtgcaggaggtggtgtgcatcaacagtgatggagaggaggtggaccggcagctgtgcagagatgccatcttccccatccctgtggcctgtgatgccccctgccccaaggactgtgtgctgagcacctggagcacctggagcagctgcagccacacctgcagcggcaagaccacagagggcaagcagatccgggcccggagcatcctggcctatgctggggaggagggcggcatccgctgccccaacagcagcgccctgcaggaggtgcgcagctgcaatgagcacccctgcaccgtgtaccactggcagacaggcccctggggccagtgcatcgaggacacctctgtgtcctccttcaacaccaccaccacctggaatggagaggccagctgcagcgtgggcatgcagaccaggaaggtgatctgtgtgcgggtgaatgtgggccaggtgggccccaagaagtgcccagagagcctgcggcctgagaccgtgcggccctgcctgctgccctgcaagaaggactgcatcgtgaccccctacagcgactggaccagctgccccagcagctgcaaggagggggacagcagcatcaggaagcagagccgccacagggtcatcatccagctgcctgccaatggaggccgggactgcacagaccccctgtatgaggagaaggcctgtgaggccccccaggcctgccagagctaccgctggaagacccacaagtggaggcgctgccagctggtgccctggagcgtgcagcaggacagccctggggcccaggagggctgcggccctggccggcaggcccgggccatcacctgcaggaagcaggacggcggccaggccggcatccacgagtgcctgcagtatgccggccctgtgcctgccctgacccaggcctgccagatcccctgccaggatgactgccagctgacctcctggagcaagttcagcagctgcaatggagactgtggggctgtgaggaccaggaagaggaccctggtgggcaagagcaagaagaaggagaagtgcaagaacagccacctgtaccccctgattgagacccagtactgcccctgtgacaagtacaatgcccagcctgtgggcaactggagcgactgcatcctgcctgagggcaaggtggaggtgctgctgggcatgaaggtgcagggcgacatcaaggaatgtggccagggctaccgctaccaggccatggcctgctatgaccagaatggccgcctggtggagaccagccgctgcaacagccacggctacatcgaggaggcctgcatcatcccctgccccagcgactgcaagctgtctgagtggagcaactggagccgctgcagcaagagctgtggcagcggcgtgaaggtgcgcagcaagtggctgcgggagaagccctacaacggcggccggccctgccccaagctggaccacgtgaaccaggcccaggtgtatgaggtggtgccctgccacagcgactgcaaccagtacctgtgggtgacagagccctggagcatctgcaaggtgacctttgtgaacatgagggagaactgtggggagggcgtgcagaccaggaaggtgcgctgcatgcagaacacagcagatggccccagcgagcacgtggaggactacctgtgtgaccctgaggagatgcccctgggcagccgggtgtgcaagctgccctgcccagaggactgtgtgatcagcgagtggggcccctggacccagtgtgtgctgccctgcaaccagagcagcttccggcagaggtctgctgaccccatccggcagcctgcagatgagggccgcagctgccccaatgctgtggagaaggagccctgcaacctgaacaagaactgctaccactatgactacaacgtgacagactggagcacctgccagctgtctgagaaggctgtgtgtggaaatggcatcaagaccaggatgctggactgtgtgcggagtgatggcaagtctgtggacctgaagtactgtgaggccctgggcctggagaagaactggcagatgaacaccagctgcatggtggagtgccctgtgaactgccagctgagtgactggagcccctggagcgaatgttcccagacctgtggcctgaccgggaagatgatcagaagaagaacagtgacccagcccttccagggagatggccggccctgccccagcctgatggaccagagcaagccctgccctgtgaagccctgctaccgctggcagtatggccagtggagcccctgccaggtgcaggaggcccagtgtggggagggcaccaggaccaggaacatcagctgtgtggtgtctgatggcagcgcagatgacttcagcaaggtggtggatgaggagttctgtgccgacatcgagctgatcattgatggcaacaagaacatggtgctggaggagagctgcagccagccctgccctggggactgctacctgaaggactggagctcctggagcctgtgccagctgacctgtgtgaatggagaggacctgggctttggaggcatccaggtgcgcagcaggcctgtgatcatccaggagctggagaaccagcacctgtgcccagagcagatgctggagaccaagagctgctatgatggccagtgctatgagtacaagtggatggccagcgcctggaagggcagcagcaggacagtgtggtgccagaggagtgatggcatcaacgtgactggaggctgcctggtgatgagccagccagatgctgacaggagctgcaaccccccctgcagccagccccacagctactgcagcgagaccaagacctgccactgtgaggagggctacacagaggtgatgagcagcaacagcaccctggagcagtgcaccctcatccctgtggtggtgctgcccaccatggaggacaagagaggagatgtgaagaccagcagagctgtgcaccccacccagcccagcagcaacccagctggccggggccgcacctggttcctgcagcccttcggcccagatggccgcctgaagacctgggtgtatggagtggccgccggggcctttgtgctgctgatcttcatcgtgtccatgatctacctggcctgcaagaagcccaagaagccccagaggcggcagaacaaccggctgaagcccctgaccctggcctatgatggagatgctgacatgtag

SEQ ID NO: 173199 - DNA, 2010 bp, synthetic construct
  misc_feature 1..2010: note = Description of Artificial Sequence: Synthetic coding sequence
  source 1..2010: mol_type = other DNA
atgtctgccctgctgagcctgtgctttgtgctgcccctggccgcccctggccacggcacccagggctgggagccctgcacagacctgcggcccctggacatcctggccgaggtggtgcccagtgatggagccaccagcggcatccgcatcgtgcaggtgcacggggcccggggcctgcagctgtctgtggccgcccccaggaccatgtccttccctgccagccgcatcttcagccagtgtgacctcttccctgaggagttcagcatcgtggtgaccctgcgggtgcccaacctgccccccaagagaaatgagtacctgctgactgtggtggccgaggagagtgacctgctgctgctgggcctgcggctgagccctgcccagctgcacttcctgttcctgcgggaggacacagctggggcctggcagaccagggtgtccttccgcagccctgccctggtggatggccgctggcacaccctggtgctggccgtgtctgctggggtcttcagcctgaccacagactgtggcctgcctgtggacatcatggctgatgtgcccttccctgccaccctgtctgtgaagggggcccgcttctttgtgggcagcagaagaagagccaagggcctcttcatgggcctggtgcggcagctggtgctgctgcccggcagtgatgccaccccccggctgtgccccagcagaaatgcccccctggccgtgctgagcatcccccgggtgctgcaggccctgaccgggaagccagaggacaatgaggtgctgaagtacccctatgagaccaacatccgggtgaccctgggcccccagcccccctgcacagaggtggaggatgcccagttctggtttgatgccagcaggaagggcctgtacctgtgtgtgggcaatgagtgggtgtctgtgctggccgccaaggagcggctggactatgtggaggagcaccagaacctgagcaccaacagcgagaccctgggcatcgaggtgttccgcatcccccaggtgggcctgtttgtggccacagccaacaggaaggccaccagcgctgtgtacaagtggacagaggagaagtttgtgtcctaccagaacatccccacccaccaggcccaggcctggaggcacttcaccatcggcaagaagatcttcctggccgtggccaactttgagccagatgagaagggccaggagttcagcgtcatctacaagtggagccacaggaagctgaagttcaccccctaccagagcatcgccacccacagcgcccgggactgggaggcctttgaggtggatggagagcacttcctggccgtggccaaccaccgggagggggacaaccacaacattgattctgtcatctacaagtggaacccagccacccggctgtttgaggccaaccagaccatcgccaccagcggggcctatgactgggagttcttctctgtgggcccctacagcttcctggtggtggccaacaccttcaacggcaccagcaccaaggtgcacagccacctgtacatccggctgctgggcagcttccagctgttccagagcttccccaccttcggggctgctgactgggaggtgttccagatcggggagcgcatcttcctggccgtggccaacagccacagctatgatgtggagatgcaggtgcagaatgacagctatgtgatcaacagcgtcatctatgagctgaatgtgacagcccaggcctttgtgaagttccaggacatcctgacctgcagcgccctggactgggagttcttctctgtgggggaggactacttcctggtggtggccaacagctttgatggccgcaccttctctgtgaacagcatcatctaccgctggcagggctatgagggctttgtggccgtgcacagcctgcccaccgtgggctgccgggactgggaggccttcagcaccacagctggggcctacctgatctacagcagcgccaaggagcccctgagccgggtgctgcggctgcggaccaggtag

SEQ ID NO: 173200 - DNA, 1800 bp, synthetic construct
  misc_feature 1..1800: note = Description of Artificial Sequence: Synthetic coding sequence
  source 1..1800: mol_type = other DNA
atgtctgccctgctgagcctgtgctttgtgctgcccctggccgcccctggccacggcacccagggctgggagccctgcacagacctgcggcccctggacatcctggccgaggtggtgcccagtgatggagccaccagcggcatccgcatcgtgcaggtgcacggggcccggggcctgcagctgtctgtggccgcccccaggaccatgtccttccctgccagccgcatcttcagccagtgtgacctcttccctgaggagttcagcatcgtggtgaccctgcgggtgcccaacctgccccccaagagaaatgagtacctgctgactgtggtggccgaggagagtgacctgctgctgctgggcctgcggctgagccctgcccagctgcacttcctgttcctgcgggaggacacagctggggcctggcagaccagggtgtccttccgcagccctgccctggtggatggccgctggcacaccctggtgctggccgtgtctgctggggtcttcagcctgaccacagactgtggcctgcctgtggacatcatggctgatgtgcccttccctgccaccctgtctgtgaagggggcccgcttctttgtgggcagcagaagaagagccaagggcctcttcatgggcctggtgcggcagctggtgctgctgcccggcagtgatgccaccccccggctgtgccccagcagaaatgcccccctggccgtgctgagcatcccccgggtgctgcaggccctgaccgggaagccagaggacaatgaggtgctgaagtacccctatgagaccaacatccgggtgaccctgggcccccagcccccctgcacagaggtggaggatgcccagttctggtttgatgccagcaggaagggcctgtacctgtgtgtgggcaatgagtgggtgtctgtgctggccgaggccaaggagcggctggactatgtggaggagcaccagaacctgagcaccaacagcgagaccctgggcatcgaggtgttccgcatcccccaggtgggcctgtttgtggccacagccaacaggaaggccaccagcgctgtgtacaagtggacagaggagaagtttgtgtcctaccagaacatccccacccaccaggcccaggcctggaggcacttcaccatcggcaagaagatcttcctggccgtggccaactttgagccagatgagaagggccaggagttcagcgtcatctacaagtggagccacaggaagctgaagttcaccccctaccagagcatcgccacccacagcgcccgggactgggaggcctttgaggtggatggagagcacttcctggccgtggccaaccaccgggagggggacaaccacaacatcgacagcgtcatctacaagtggaacccagccacccggctgtttgaggccaaccagaccatcgccaccagcggggcctatgactgggagttcttctctgtgggcccctacagcttcctggtggtggccaacaccttcaacggcaccagcaccaaggtgcacagccacctgtacatccggctgctgggcagcttccagctgttccagagcttccccacctttggagctgctgactgggaggtgttccagattggagagcgcatcttcctggccgtggccaacagccacagctatgatgtggagatgcaggtgcagaatgacagctatgtgatcaacagcgtcatctatgagctgaatgtgacagcccaggcctttgtgaagttccaggacatcctgacctgcagcggcggcagaagaggcctgcacgccaggagagctgagggctag

SEQ ID NO: 173201 - DNA, 1569 bp, synthetic construct
  misc_feature 1..1569: note = Description of Artificial Sequence: Synthetic coding sequence
  source 1..1569: mol_type = other DNA
atgtctgccctgctgagcctgtgctttgtgctgcccctggccgcccctggccacggcacccagggctgggagccctgcacagacctgcggcccctggacatcctggccgaggtggtgcccagtgatggagccaccagcggcatccgcatcgtgcaggtgcacggggcccggggcctgcagctgtctgtggccgcccccaggaccatgtccttccctgccagccgcatcttcagccagtgtgacctcttccctgaggagttcagcatcgtggtgaccctgcgggtgcccaacctgccccccaagagaaatgagtacctgctgactgtggtggccgaggagagtgacctgctgctgctgggcctgcggctgagccctgcccagcccccctgcacagaggtggaggatgcccagttctggtttgatgccagcaggaagggcctgtacctgtgtgtgggcaatgagtgggtgtctgtgctggccgccaaggagcggctggactatgtggaggagcaccagaacctgagcaccaacagcgagaccctgggcatcgaggtgttccgcatcccccaggtgggcctgtttgtggccacagccaacaggaaggccaccagcgctgtgtacaagtggacagaggagaagtttgtgtcctaccagaacatccccacccaccaggcccaggcctggaggcacttcaccatcggcaagaagatcttcctggccgtggccaactttgagccagatgagaagggccaggagttcagcgtcatctacaagtggagccacaggaagctgaagttcaccccctaccagagcatcgccacccacagcgcccgggactgggaggcctttgaggtggatggagagcacttcctggccgtggccaaccaccgggagggggacaaccacaacatcgacagcgtcatctacaagtggaacccagccacccggctgtttgaggccaaccagaccatcgccaccagcggggcctatgactgggagttcttctctgtgggcccctacagcttcctggtggtggccaacaccttcaacggcaccagcaccaaggtgcacagccacctgtacatccggctgctgggcagcttccagctgttccagagcttccccacctttggagctgctgactgggaggtgttccagattggagagcgcatcttcctggccgtggccaacagccacagctatgatgtggagatgcaggtgcagaatgacagctatgtgatcaacagcgtcatctatgagctgaatgtgacagcccaggcctttgtgaagttccaggacatcctgacctgcagcgccctggactgggagttcttctctgtgggggaggactacttcctggtggtggccaacagctttgatggccgcaccttctctgtgaacagcatcatctaccgctggcagggctatgagggctttgtggccgtgcacagcctgcccaccgtgggctgccgggactgggaggccttcagcaccacagctggggcctacctgatctacagcagcgccaaggagcccctgagccgggtgctgcggctgcggaccaggtag

SEQ ID NO: 173202 - DNA, 1605 bp, synthetic construct
  misc_feature 1..1605: note = Description of Artificial Sequence: Synthetic coding sequence
  source 1..1605: mol_type = other DNA
atgatggaggccctgggcttcctgaagctggaggtgaatggccccatggtgacagtggccctgtctgtggccctgctggccctgctgaagtggtacagcaccagcgccttcagccggctggagaagctgggcctgcggcaccccaagcccagccccttcatcggcaacctgaccttcttccggcagggcttctgggagagccagatggagctgaggaagctgtatggccccctgtgtggctactacctgggccgcaggatgtttattgtcatcagcgagccagacatgatcaagcaggtgctggtggagaacttcagcaacttcaccaacaggatggccagcggcctggagttcaagtctgtggccgacagcgtgctcttcctgcgggacaagcgctgggaggaggtgcggggggccctgatgtctgccttcagccctgagaagctgaatgagatggtgcccctcatcagccaggcctgtgagctgctgctggcccacctgaagagatatgcagagagcggagatgcctttgacatccagcgctgctactgcaactacaccacagatgtggtggcctctgtggccttcggcacccctgtggacagctggcaggcccctgaggacccctttgtgaagcactgcaagcgcttctttgagttctgcatcccccggcccatcctggtgctgctgctgtccttccccagcatcatggtgcccctggcccgcatcctgcccaacaagaacagagatgagctgaatggcttcttcaacaagctgatcagaaatgtcatcgccctgcgggaccagcaggccgctgaggagcggcggcgggacttcctgcagatggtgctggatgcccggcacagcgccagccccatgggcgtgcaggactttgacatcgtgagagatgtgttcagcagcacaggctgcaagcccaaccccagccggcagcaccagcccagccccatggcccggcccctgactgtggatgagatcgtgggccaggccttcatcttcctgattgctggctatgagatcatcaccaacaccctgagctttgccacctacctgctggccaccaacccagactgccaggagaagctgctgcgggaggtggatgtgttcaaggagaagcacatggcccctgagttctgcagcctggaggagggcctgccctacctggacatggtgattgctgagaccctgaggatgtaccccccagccttccgcttcacccgggaggccgcccaggactgtgaggtgctgggccagaggatcccagctggagctgtgctggagatggctgtgggcgccctgcaccacgaccctgagcactggcccagccctgagaccttcaaccctgagcgcttcaccgctgaggcccggcagcagcaccggcccttcacctacctgccctttggagctggccccaggagctgcctgggcgtgcggctgggcctgctggaggtgaagctgaccctgctgcacgtgctgcacaagttccgcttccaggcctgcccagagacccaggtgcccctgcagctggagagcaagagcgccctgggccccaagaatggagtgtacatcaagatcgtgtccaggtag

SEQ ID NO: 173203 - DNA, 1602 bp, synthetic construct
  misc_feature 1..1602: note = Description of Artificial Sequence: Synthetic coding sequence
  source 1..1602: mol_type = other DNA
atggaggccctgggcttcctgaagctggaggtgaatggccccatggtgacagtggccctgtctgtggccctgctggccctgctgaagtggtacagcaccagcgccttcagccggctggagaagctgggcctgcggcaccccaagcccagccccttcatcggcaacctgaccttcttccggcagggcttctgggagagccagatggagctgaggaagctgtatggccccctgtgtggctactacctgggccgcaggatgttcatcgtcatcagcgagccagacatgatcaagcaggtgctggtggagaacttcagcaacttcaccaacaggatggccagcggcctggagttcaagtctgtggccgacagcgtgctcttcctgcgggacaagcgctgggaggaggtgcggggggccctgatgtctgccttcagccctgagaagctgaatgagatggtgcccctcatcagccaggcctgtgagctgctgctggcccacctgaagagatatgcagagagcggagatgcctttgacatccagcgctgctactgcaactacaccacagatgtggtggcctctgtggccttcggcacccctgtggacagctggcaggcccctgaggacccctttgtgaagcactgcaagcgcttctttgagttctgcatcccccggcccatcctggtgctgctgctgtccttccccagcatcatggtgcccctggcccgcatcctgcccaacaagaacagagatgagctgaatggcttcttcaacaagctgatcagaaatgtgattgccctgcgggaccagcaggccgctgaggagaggagaagagacttcctgcagatggtgctggatgcccggcacagcgccagccccatgggcgtgcaggactttgatattgtgagagatgtgttcagcagcacaggctgcaagcccaaccccagccggcagcaccagcccagccccatggcccggcccctgactgtggatgaaattgtgggccaggccttcatcttcctgattgctggctatgagatcatcaccaacaccctgagctttgccacctacctgctggccaccaacccagactgccaggagaagctgctgcgggaggtggatgtgttcaaggagaagcacatggcccctgagttctgcagcctggaggagggcctgccctacctggacatggtgattgctgagaccctgaggatgtaccccccagccttccgcttcacccgggaggccgcccaggactgtgaggtgctgggccagaggatcccagctggagctgtgctggagatggctgtgggcgccctgcaccacgaccctgagcactggcccagccctgagaccttcaaccctgagcgcttcaccgctgaggcccggcagcagcaccggcccttcacctacctgccctttggagctggccccaggagctgcctgggcgtgcggctgggcctgctggaggtgaagctgaccctgctgcacgtgctgcacaagttccgcttccaggcctgcccagagacccaggtgcccctgcagctggagagcaagagcgccctgggccccaagaatggagtgtacatcaagatcgtgtccaggtag

SEQ ID NO: 173204 - DNA, 1380 bp, synthetic construct
  misc_feature 1..1380: note = Description of Artificial Sequence: Synthetic coding sequence
  source 1..1380: mol_type = other DNA
atggaggccctgggcttcctgaagctggaggtgaatggccccatggtgacagtggccctgtctgtggccctgctggccctgctgaagtggtacagcaccagcgccttcagccggctggagaagctgggcctgcggcaccccaagcccagccccttcatcggcaacctgaccttcttccggcagggcttctgggagagccagatggagctgaggaagctgtatggccccctgtgtggctactacctgggccgcaggatgttcatcgtcatcagcgagccagacatgatcaagcaggtgctggtggagaacttcagcaacttcaccaacaggatggccagcggcctggagttcaagtctgtggccgacagcgtgctcttcctgcgggacaagcgctgggaggaggtgcggggggccctgatgtctgccttcagccctgagaagctgaatgagatggtgcccctcatcagccaggcctgtgagctgctgctggcccacctgaagagatatgcagagagcggagatgcctttgacatccagcgctgctactgcaactacaccacagatgtggtggcctctgtggccttcggcacccctgtggacagctggcaggcccctgaggacccctttgtgaagcactgcaagcgcttctttgagttctgcatcccccggcccatcctggtgctgctgctgtccttccccagcatcatggtgcccctggcccgcatcctgcccaacaagaacagagatgagctgaatggcttcttcaacaagctgatcagaaatgtgattgccctgcgggaccagcaggccgctgaggagaggagaagagacttcctgcagatggtgctggatgcccggcacagcgccagccccatgggcgtgcaggactttgatattgtgagagatgtgttcagcagcacaggctgcaagcccaaccccagccggcagcaccagcccagccccatggcccggcccctgactgtggatgaaattgtgggccaggccttcatcttcctgattgctggctatgagatcatcaccaacaccctgagctttgccacctacctgctggccaccaacccagactgccaggagaagctgctgcgggaggtggatgtgttcaaggagaagcacatggcccctgagttctgcagcctggaggagggcctgccctacctggacatggtgattgctgagaccctgaggatgtaccccccagccttccgcttcacccgggaggccgcccaggactgtgaggtgctgggccagaggatcccagctggagctgtgctggagatggctgtgggcgccctgcaccacgaccctgagcactggcccagccctgagaccttcaaccctgagcgctaccgctgcagctag

SEQ ID NO: 173205 - DNA, 1383 bp, synthetic construct
  misc_feature 1..1383: note = Description of Artificial Sequence: Synthetic coding sequence
  source 1..1383: mol_type = other DNA
atgatggaggccctgggcttcctgaagctggaggtgaatggccccatggtgacagtggccctgtctgtggccctgctggccctgctgaagtggtacagcaccagcgccttcagccggctggagaagctgggcctgcggcaccccaagcccagccccttcatcggcaacctgaccttcttccggcagggcttctgggagagccagatggagctgaggaagctgtatggccccctgtgtggctactacctgggccgcaggatgtttattgtcatcagcgagccagacatgatcaagcaggtgctggtggagaacttcagcaacttcaccaacaggatggccagcggcctggagttcaagtctgtggccgacagcgtgctcttcctgcgggacaagcgctgggaggaggtgcggggggccctgatgtctgccttcagccctgagaagctgaatgagatggtgcccctcatcagccaggcctgtgagctgctgctggcccacctgaagagatatgcagagagcggagatgcctttgacatccagcgctgctactgcaactacaccacagatgtggtggcctctgtggccttcggcacccctgtggacagctggcaggcccctgaggacccctttgtgaagcactgcaagcgcttctttgagttctgcatcccccggcccatcctggtgctgctgctgtccttccccagcatcatggtgcccctggcccgcatcctgcccaacaagaacagagatgagctgaatggcttcttcaacaagctgatcagaaatgtcatcgccctgcgggaccagcaggccgctgaggagcggcggcgggacttcctgcagatggtgctggatgcccggcacagcgccagccccatgggcgtgcaggactttgacatcgtgagagatgtgttcagcagcacaggctgcaagcccaaccccagccggcagcaccagcccagccccatggcccggcccctgactgtggatgagatcgtgggccaggccttcatcttcctgattgctggctatgagatcatcaccaacaccctgagctttgccacctacctgctggccaccaacccagactgccaggagaagctgctgcgggaggtggatgtgttcaaggagaagcacatggcccctgagttctgcagcctggaggagggcctgccctacctggacatggtgattgctgagaccctgaggatgtaccccccagccttccgcttcacccgggaggccgcccaggactgtgaggtgctgggccagaggatcccagctggagctgtgctggagatggctgtgggcgccctgcaccacgaccctgagcactggcccagccctgagaccttcaaccctgagcgctaccgctgcagctag

SEQ ID NO: 173206 - DNA, 1743 bp, synthetic construct
  misc_feature 1..1743: note = Description of Artificial Sequence: Synthetic coding sequence
  source 1..1743: mol_type = other DNA
atgatggaggccctgggcttcctgaagctggaggtgaatggccccatggtgacagtggccctgtctgtggccctgctggccctgctgaagtggtacagcaccagcgccttcagccggctggagaagctgggcctgcggcaccccaagcccagccccttcatcggcaacctgaccttcttccggcagggcttctgggagagccagatggagctgaggaagctgtatggccccctgtgtggctactacctgggccgcaggatgtttattgtcatcagcgagccagacatgatcaagcaggtgctggtggagaacttcagcaacttcaccaacaggatggccagcggcctggagttcaagtctgtggccgacagcgtgctcttcctgcgggacaagcgctgggaggaggtgcggggggccctgatgtctgccttcagccctgagaagctgaatgagctgggcctgctgatcatgcaggagcgcatcaagggccacatgggcggccagcaggccccccagagaattcctcccacccggctgagcaagcccagcggcatctacgtgaacctgcactacgccaccctgcccttctgcatggtgcccctcatcagccaggcctgtgagctgctgctggcccacctgaagagatatgcagagagcggagatgcctttgacatccagcgctgctactgcaactacaccacagatgtggtggcctctgtggccttcggcacccctgtggacagctggcaggcccctgaggacccctttgtgaagcactgcaagcgcttctttgagttctgcatcccccggcccatcctggtgctgctgctgtccttccccagcatcatggtgcccctggcccgcatcctgcccaacaagaacagagatgagctgaatggcttcttcaacaagctgatcagaaatgtcatcgccctgcgggaccagcaggccgctgaggagcggcggcgggacttcctgcagatggtgctggatgcccggcacagcgccagccccatgggcgtgcaggactttgacatcgtgagagatgtgttcagcagcacaggctgcaagcccaaccccagccggcagcaccagcccagccccatggcccggcccctgactgtggatgagatcgtgggccaggccttcatcttcctgattgctggctatgagatcatcaccaacaccctgagctttgccacctacctgctggccaccaacccagactgccaggagaagctgctgcgggaggtggatgtgttcaaggagaagcacatggcccctgagttctgcagcctggaggagggcctgccctacctggacatggtgattgctgagaccctgaggatgtaccccccagccttccgcttcacccgggaggccgcccaggactgtgaggtgctgggccagaggatcccagctggagctgtgctggagatggctgtgggcgccctgcaccacgaccctgagcactggcccagccctgagaccttcaaccctgagcgcttcaccgctgaggcccggcagcagcaccggcccttcacctacctgccctttggagctggccccaggagctgcctgggcgtgcggctgggcctgctggaggtgaagctgaccctgctgcacgtgctgcacaagttccgcttccaggcctgcccagagacccaggtgcccctgcagctggagagcaagagcgccctgggccccaagaatggagtgtacatcaagatcgtgtccaggtag

SEQ ID NO: 173207 - DNA, 1605 bp, synthetic construct; identical to SEQ ID NO: 173202
  misc_feature 1..1605: note = Description of Artificial Sequence: Synthetic coding sequence
  source 1..1605: mol_type = other DNA

SEQ ID NO: 173208 - DNA, 453 bp, synthetic construct
  misc_feature 1..453: note = Description of Artificial Sequence: Synthetic coding sequence
  source 1..453: mol_type = other DNA
atggaggccctgggcttcctgaagctggaggtgaatggccccatggtgacagtggccctgtctgtggccctgctggccctgctgaagtggtacagcaccagcgccttcagccggctggagaagctgggcctgcggcaccccaagcccagccccttcatcggcaacctgaccttcttccggcagggcttctgggagagccagatggagctgaggaagctgtatggccccctgtgtggctactacctgggccgcaggatgttcatcgtcatcagcgagccagacatgatcaagcaggtgctggtggagaacttcagcaacttcaccaacaggatggccagcggcctggagttcaagtctgtggccgacagcgtgctcttcctgcgggacaagcgctgggaggaggtgcggggggccctgatgtctgccttcagccctgagaagctgaatgaatag

SEQ ID NO: 173209 - DNA, 1602 bp, synthetic construct; identical to SEQ ID NO: 173203
  misc_feature 1..1602: note = Description of Artificial Sequence: Synthetic coding sequence
  source 1..1602: mol_type = other DNA

SEQ ID NO: 173210 - DNA, 459 bp, synthetic construct
  misc_feature 1..459: note = Description of Artificial Sequence: Synthetic coding sequence
  source 1..459: mol_type = other DNA
atgatggaggccctgggcttcctgaagctggaggtgaatggccccatggtgacagtggccctgtctgtggccctgctggccctgctgaagtggtacagcaccagcgccttcagccggctggagaagctgggcctgcggcaccccaagcccagccccttcatcggcaacctgaccttcttccggcagggcttctgggagagccagatggagctgaggaagctgtatggccccctgtgtggctactacctgggccgcaggatgtttattgtcatcagcgagccagacatgatcaagcaggtgctggtggagaacttcagcaacttcaccaacaggatgccccagagcatcatgcccaacagccgccaccacgtggccagccggggcatgtggccaggcggccggcggctggcctgctacctgcaccccttcaggatggccgagggcattgctgaggtgtag

SEQ ID NO: 173211 - DNA, 1401 bp, synthetic construct
  misc_feature 1..1401: note = Description of Artificial Sequence: Synthetic coding sequence
  source 1..1401: mol_type = other DNA
atggagctgaggaagctgtatggccccctgtgtggctactacctgggccgcaggatgtttattgtcatcagcgagccagacatgatcaagcaggtgctggtggagaacttcagcaacttcaccaacaggatggccagcggcctggagttcaagtctgtggccgacagcgtgctcttcctgcgggacaagcgctgggaggaggtgcggggggccctgatgtctgccttcagccctgagaagctgaatgagatggtgcccctcatcagccaggcctgtgagctgctgctggcccacctgaagagatatgcagagagcggagatgcctttgacatccagcgctgctactgcaactacaccacagatgtggtggcctctgtggccttcggcacccctgtggacagctggcaggcccctgaggacccctttgtgaagcactgcaagcgcttctttgagttctgcatcccccggcccatcctggtgctgctgctgtccttccccagcatcatggtgcccctggcccgcatcctgcccaacaagaacagagatgagctgaatggcttcttcaacaagctgatcagaaatgtcatcgccctgcgggaccagcaggccgctgaggagcggcggcgggacttcctgcagatggtgctggatgcccggcacagcgccagccccatgggcgtgcaggactttgacatcgtgagagatgtgttcagcagcacaggctgcaagcccaaccccagccggcagcaccagcccagccccatggcccggcccctgactgtggatgagatcgtgggccaggccttcatcttcctgattgctggctatgagatcatcaccaacaccctgagctttgccacctacctgctggccaccaacccagactgccaggagaagctgctgcgggaggtggatgtgttcaaggagaagcacatggcccctgagttctgcagcctggaggagggcctgccctacctggacatggtgattgctgagaccctgaggatgtaccccccagccttccgcttcacccgggaggccgcccaggactgtgaggtgctgggccagaggatcccagctggagctgtgctggagatggctgtgggcgccctgcaccacgaccctgagcactggcccagccctgagaccttcaaccctgagcgcttcaccgctgaggcccggcagcagcaccggcccttcacctacctgccctttggagctggccccaggagctgcctgggcgtgcggctgggcctgctggaggtgaagctgaccctgctgcacgtgctgcacaagttccgcttccaggcctgcccagagacccaggtgcccctgcagctggagagcaagagcgccctgggccccaagaatggagtgtacatcaagatcgtgtccaggtag

SEQ ID NO: 173212 - DNA, 1032 bp, synthetic construct
  misc_feature 1..1032: note = Description of Artificial Sequence: Synthetic coding sequence
  source 1..1032: mol_type = other DNA
atgtggcccaacggcagcagcctgggcccctgcttccggcccaccaacatcaccctggaggagcggcggctgattgccagcccctggtttgctgccagcttctgtgtggtgggcctggccagcaacctgctggccctgtctgtgctggccggggcccggcagggcggcagccacaccaggagcagcttcctgaccttcctgtgtggcctggtgctgacagacttcctgggcctgctggtgacaggcaccatcgtggtgtcccagcacgccgccctgtttgagtggcatgctgtggaccccggctgccgcctgtgccgcttcatgggcgtggtgatgatcttcttcggcctgagccccctgctgctgggcgccgccatggccagcgagcgctacctgggcatcacccggcccttcagcaggcctgctgtggccagccagaggcgggcctgggccaccgtgggcctggtgtgggccgccgccctggccctgggcctgctgcccctgctgggcgtgggccgctacacagtgcagtacccaggctcctggtgcttcctgaccctgggcgctgagagcggagatgtggccttcggcctgctcttctccatgctgggcggcctgtctgtgggcctgtccttcctgctgaacacagtgtctgtggccaccctgtgccacgtgtaccacggccaggaggccgcccagcagaggccccgggacagcgaggtggagatgatggcccagctgctgggcatcatggtggtggcctctgtgtgctggctgcccctgctggtgttcatcgcccagacagtgctgagaaatcctccagccatgagccctgctggccagctgagcaggaccacagagaaggagctgctgatctacctgcgggtggccacctggaaccagatcctggacccctgggtgtacatcctcttccggcgggctgtgctgcggcggctgcagccccggctgagcacccggcccaggagcctgagcctgcagccccagctgacccagaggagcggcctgcagtag

SEQ ID NO: 173213 - DNA, 1224 bp, synthetic construct
  misc_feature 1..1224: note = Description of Artificial Sequence: Synthetic coding sequence
  source 1..1224: mol_type = other DNA
atgtggcccaacggcagcagcctgggcccctgcttccggcccaccaacatcaccctggaggagcggcggctgattgccagcccctggtttgctgccagcttctgtgtggtgggcctggccagcaacctgctggccctgtctgtgctggccggggcccggcagggcggcagccacaccaggagcagcttcctgaccttcctgtgtggcctggtgctgacagacttcctgggcctgctggtgacaggcaccatcgtggtgtcccagcacgccgccctgtttgagtggcatgctgtggaccccggctgccgcctgtgccgcttcatgggcgtggtgatgatcttcttcggcctgagccccctgctgctgggcgccgccatggccagcgagcgctacctgggcatcacccggcccttcagcaggcctgctgtggccagccagaggcgggcctgggccaccgtgggcctggtgtgggccgccgccctggccctgggcctgctgcccctgctgggcgtgggccgctacacagtgcagtacccaggctcctggtgcttcctgaccctgggcgctgagagcggagatgtggccttcggcctgctcttctccatgctgggcggcctgtctgtgggcctgtccttcctgctgaacacagtgtctgtggccaccctgtgccacgtgtaccacggccaggaggccgcccagcagaggccccgggacagcgaggtggagatgatggcccagctgctgggcatcatggtggtggcctctgtgtgctggctgcccctgctggtgttcatcgcccagacagtgctgagaaatcctccagccatgagccctgctggccagctgagcaggaccacagagaaggagctgctgatctacctgcgggtggccacctggaaccagatcctggacccctgggtgtacatcctcttccggcgggctgtgctgcggcggctgcagccccggctgagcacccggccccggcgcagcctgaccctgtggcccagcctggagtacagcggcaccatcagcgcccactgcaacctgcggctgcccggcagcagtgacagccgggccagcgccagcagagctgctggcatcaccggggtgagccactgtgcccggccctgcatgctgtttgatcctgagtttgacctgctggccggcgtgcagctgctgccctttgagcccccaacaggcaaggccctgagcaggaaggactag

SEQ ID NO: 173214 - DNA, 1422 bp, synthetic construct
  misc_feature 1..1422: note = Description of Artificial Sequence: Synthetic coding sequence
  source 1..1422: mol_type = other DNA
atgagggaggtgcgggcccggctggccgccacccaggtggagtacatcagcggcaaggtgttcttcaccacctgcagcgacctgaacatgctgaagaagctgaagtctgctgagcggctcttcctgctgatcaagaagcagttccccctcatcatcagctctgtgtccaagggcaagatcttcaatgagatgcagaggctcatcaatgaagaccccggctcctggctgaatgccatcagcatctggaagaacctgctggagctggatgccaagaaggagaagctgagccagagagatgacaaccagctgaagaggaaggtgggagaaaatgagatcatcgccaagaagctgaagattgagcagatgcagaagattgaagaaaatagagactgccagctggagaagcagatcaaggaggagaccctggagcagagggacttcaccaccaagtctgagaagttccaggaggaggagttccagaatgacatcgagaaggccatcgacacccacaaccagaatgacctgaccttccgggtgtcctgccgctgcagcggcaccatcggcaaggccttcaccgcccaggaggtgggcaaggtgattggcatcgccatcatgaagcacttcggctggaaggctgacctgaggaacccccagctggagatcttcatccacctgaatgacatctacagcgtggtgggcatccctgtgttccgggtgtccctggccagccgggcctacatcaagacagctggcctgcggagcaccatcgcctgggccatggccagcctggccgacatcaaggccggggcctttgtgctggaccccatgtgtggcctgggcaccatcctgctggaggccgccaaggagtggccagatgtgtactacgtgggcgcagatgtgtctgacagccagctgctgggcacctgggacaacctgaaggctgctggcctggaggacaagattgagctgctgaagatctctgtgattgagctgcccctgcccagcgagagcgtggacatcatcatcagtgacatcccctttgggaagaagttcaagctgggcaaggacatcaagagcatcctgcaggagatggagcgggtgctgcacgtgggcggcaccatcgtgctgctgctgtctgaggaccaccaccggcggctgacagactgcaaggagagcaacatccccttcaacagcaaggacagccacacagatgagcccggcatcaagaagtgcctgaaccctgaggagaagacaggagccttcaagacagccagcaccagctttgaggccagcaaccacaagttcctggacaggatgagccccttcggcagcctggtgcctgtggagtgctacaaggtgtccctgggcaagacagatgccttcatctgcaagtacaagaagagccacagcagcggcctgtag

SEQ ID NO: 173215 - DNA, 873 bp, synthetic construct
  misc_feature 1..873: note = Description of Artificial Sequence: Synthetic coding sequence
  source 1..873: mol_type = other DNA
atgagggaggtgcgggcccggctggccgccacccaggtggagtacatcagcggcaaggtgttcttcaccacctgcagcgacctgaacatgctgaagaagctgaagtctgctgagcggctcttcctgctgatcaagaagcagttccccctcatcatcagctctgtgtccaagggcaagatcttcaatgagatgcagaggctcatcaatgaagaccccggctcctggctgaatgccatcagcatctggaagaacctgctggagctggatgccaagaaggagaagctgagccagagagatgacaaccagctgaagaggaaggtgggagaaaatgagatcatcgccaagaagctgaagattgagcagatgcagaagattgaagaaaatagagactgccagctggagaagcagatcaaggaggagaccctggagcagagggacttcaccaccaagtctgagaagttccaggaggaggagttccagaatgacatcgagaaggccatcgacacccacaaccagaatgacctgaccttccgggtgtcctgccgctgcagcggcaccatcggcaaggccttcaccgcccaggtgctgtacatgggcctgagccctggcccccggctgcagatgcacatgaggagccagcagtgccgggaggagaggaccccccagacagtggccatcacccggccccaccagctggccctgaccaagttcagtgatgtgaagggccactggagcgagtacttcatcaacctgaagatcagccagaccctgaagggcggcaggaagagcaactggaactgctactatgagaccctgtggatggagagccggctggaggagagcaccatccgggacctgtacaccagcaagtag

SEQ ID NO: 173216 - DNA, 1512 bp, synthetic construct
  misc_feature 1..1512: note = Description of Artificial Sequence: Synthetic coding sequence
  source 1..1512: mol_type = other DNA
atgtctgaggcccggggggagcccggcagcggccctgaggccggggcccgcttcttctgcacagctggccggggcctggagccctttgtgatgagggaggtgcgggcccggctggccgccacccaggtggagtacatcagcggcaaggtgttcttcaccacctgcagcgacctgaacatgctgaagaagctgaagtctgctgagcggctcttcctgctgatcaagaagcagttccccctcatcatcagctctgtgtccaagggcaagatcttcaatgagatgcagaggctcatcaatgaagaccccggctcctggctgaatgccatcagcatctggaagaacctgctggagctggatgccaagaaggagaagctgagccagagagatgacaaccagctgaagaggaaggtgggagaaaatgagatcatcgccaagaagctgaagattgagcagatgcagaagattgaagaaaatagagactgccagctggagaagcagatcaaggaggagaccctggagcagagggacttcaccaccaagtctgagaagttccaggaggaggagttccagaatgacatcgagaaggccatcgacacccacaaccagaatgacctgaccttccgggtgtcctgccgctgcagcggcaccatcggcaaggccttcaccgcccaggaggtgggcaaggtgattggcatcgccatcatgaagcacttcggctggaaggctgacctgaggaacccccagctggagatcttcatccacctgaatgacatctacagcgtggtgggcatccctgtgttccgggtgtccctggccagccgggcctacatcaagacagctggcctgcggagcaccatcgcctgggccatggccagcctggccgacatcaaggccggggcctttgtgctggaccccatgtgtggcctgggcaccatcctgctggaggccgccaaggagtggccagatgtgtactacgtgggcgcagatgtgtctgacagccagctgctgggcacctgggacaacctgaaggctgctggcctggaggacaagattgagctgctgaagatctctgtgattgagctgcccctgcccagcgagagcgtggacatcatcatcagtgacatcccctttgggaagaagttcaagctgggcaaggacatcaagagcatcctgcaggagatggagcgggtgctgcacgtgggcggcaccatcgtgctgctgctgtctgaggaccaccaccggcggctgacagactgcaaggagagcaacatccccttcaacagcaaggacagccacacagatgagcccggcatcaagaagtgcctgaaccctgaggagaagacaggagccttcaagacagccagcaccagctttgaggccagcaaccacaagttcctggacaggatgagccccttcggcagcctggtgcctgtggagtgctacaaggtgtccctgggcaagacagatgccttcatctgcaagtacaagaagagccacagcagcggcctgtag

SEQ ID NO: 173217 - DNA, 486 bp, synthetic construct
  misc_feature 1..486: note = Description of Artificial Sequence: Synthetic coding sequence
  source 1..486: mol_type = other DNA
atgaacctggccatcagcatcgccctgctgctgactgtgctgcaggtgtcccggggccagaaggtgaccagcctgacagcctgcctggtggaccagagcctgcggctggactgcagacatgagaacaccagcagcagccccatccagtatgagttcagcctgacccgggagaccaagaagcacgtgctgtttggcaccgtgggcgtgcctgagcacacctaccgcagcaggaccaacttcaccagcaagtacaacatgaaggtgctgtacctgagcgccttcaccagcaaggatgagggcacctacacctgtgccctgcaccacagcggccacagcccccccatcagcagccagaatgtgacagtgctgcgggacaagctggtgaagtgtgagggcatcagcctgctggcccagaacacctcctggctgctgctgctgctgctgagcctgagcctgctgcaggccacagacttcatgagcctgtag

SEQ ID NO: 173218 - DNA, 486 bp, synthetic construct; identical to SEQ ID NO: 173217
  misc_feature 1..486: note = Description of Artificial Sequence: Synthetic coding sequence
  source 1..486: mol_type = other DNA

SEQ ID NO: 173219 - DNA, 480 bp, synthetic construct
  misc_feature 1..480: note = Description of Artificial Sequence: Synthetic coding sequence
  source 1..480: mol_type = other DNA
atgttcccctttgccctgctgtatgtgctgtctgtgtccttcaggaagatcttcatcctgcagctggtgggcctggtgctgacctatgacttcaccaactgtgactttgagaagatcaaggccgcctacctgagcaccatcagcaaggacctgatcacctacatgagcggcaccaagagcacagagttcaacaacacagtgtcctgcagcaaccggccccactgcctgacagagatccagagcctgaccttcaaccccacagctggctgtgccagcctggccaaggagatgtttgccatgaagaccaaggccgccctggccatctggtgccccggctacagcgagacccagatcaatgccacccaggccatgaagaagaggaggaagaggaaggtgaccaccaacaagtgcctggagcaggtgtcccagctgcagggcctgtggaggcgcttcaaccggcccctgctgaagcagcagtag

SEQ ID NO: 173220 - DNA, 192 bp, synthetic construct
  misc_feature 1..192: note = Description of Artificial Sequence: Synthetic coding sequence
  source 1..192: mol_type = other DNA
atgtttgccatgaagaccaaggccgccctggccatctggtgccccggctacagcgagacccagatcaatgccacccaggccatgaagaagaggaggaagaggaaggtgaccaccaacaagtgcctggagcaggtgtcccagctgcagggcctgtggaggcgcttcaaccggcccctgctgaagcagcagtag

SEQ ID NO: 173221 - DNA, 705 bp, synthetic construct
  misc_feature 1..705: note = Description of Artificial Sequence: Synthetic coding sequence
  source 1..705: mol_type = other DNA
atgagctgcatcaacctgcccaccgtgctgcccggcagccccagcaagacccggggccagatccaggtgatcctgggccccatgttcagcggcaagagcacagagctgatgagaagagtgcggcgcttccagatcgcccagtacaagtgcctggtgatcaagtatgccaaggacacccgctacagcagcagcttctgcacccatgacaggaacaccatggaggccctgcctgcctgcctgctgagagatgtggcccaggaggccctgggcgtggccgtcatcggcattgatgagggccagttcttcccagacatcgtggagttctgtgaggccatggccaatgccggcaagacagtcatcgtggccgccctggatggcaccttccagaggaagccctttggagccatcctgaacctggtgcccctggccgagagcgtggtgaagctgacagctgtgtgcatggagtgcttccgggaggccgcctacaccaagaggctgggcacagagaaggaggtggaggtgattggaggagctgacaagtaccacagcgtgtgccgcctgtgctacttcaagaaggccagcggccagcctgctggccctgacaacaaggagaactgccctgtgcctgggaagccaggagaggccgtggccgccaggaagctgtttgccccccagcagatcctgcagtgcagccctgccaactag

SEQ ID NO: 173222 - DNA, 705 bp, synthetic construct; identical to SEQ ID NO: 173221
  misc_feature 1..705: note = Description of Artificial Sequence: Synthetic coding sequence
  source 1..705: mol_type = other DNA

SEQ ID NO: 173223 - DNA, 924 bp, synthetic construct
  misc_feature 1..924: note = Description of Artificial Sequence: Synthetic coding sequence
  source 1..924: mol_type = other DNA
atgaggcctggcctcttcaagggccaggcccctggcagcagaagaagacccacagctggcctggccgtggtgcgggctgacagccacaagaaggagccccgggccagcggcagcgcccggcctgccatgctgctgtggcccctgcggggctgggccgcccgggccctgcgctgctttggacctggcagccggggcagccctgccagcggccctggcccccggcgggtgcagaggcgggcctggcccccagacaaggagcaggagaaggagaagaagagcgtcatctgtgtggagggcaacatcgccagcggcaagaccacctgcctggagttcttcagcaatgccacagatgtggaggtgctgacagagcctgtgtccaagtggagaaatgtgcggggccacaaccccctgggcctgatgtaccatgatgccagccgctggggcctgaccctgcagacctacgtgcagctgaccatgctggacagacacacccggccccaggtgtcctctgtgcggctgatggagaggagcatccacagcgcccgctacatctttgtggagaacctgtaccgcagcggcaagatgcctgaggtggactatgtggtgctgtctgagtggtttgactggatcctgaggaacatggatgtgtctgtggacctgattgtgtacctgcggaccaaccctgagacctgctaccagaggctgaagaagcgctgccgggaggaggagaaggtgatccccctggagtacctggaggccatccaccacctgcacgaggagtggctgatcaagggcagcctcttccccatggccgcccctgtgctggtgattgaagctgaccaccacatggagaggatgctggagctgtttgagcagaacagagaccgcatcctgaccccagaaaataggaagcactgcccctag

SEQ ID NO: 173224 - DNA, 744 bp, synthetic construct
  misc_feature 1..744: note = Description of Artificial Sequence: Synthetic coding sequence
  source 1..744: mol_type = other DNA
atgctgctgtggcccctgcggggctgggccgcccgggccctgcgctgctttggacctggcagccggggcagccctgccagcggccctggcccccggcgggtgcagaggcgggcctggcccccagacaaggagcaggagaaggagaagaagagcgtcatctgtgtggagggcaacatcgccagcggcaagaccacctgcctggagttcttcagcaatgccacagatgtggagggcctgatgtaccatgatgccagccgctggggcctgaccctgcagacctacgtgcagctgaccatgctggacagacacacccggccccaggtgtcctctgtgcggctgatggagaggagcatccacagcgcccgctacatctttgtggagaacctgtaccgcagcggcaagatgcctgaggtggactatgtggtgctgtctgagtggtttgactggatcctgaggaacatggatgtgtctgtggacctgattgtgtacctgcggaccaaccctgagacctgctaccagaggctgaagaagcgctgccgggaggaggagaaggtgatccccctggagtacctggaggccatccaccacctgcacgaggagtggctgatcaagggcagcctcttccccatggccgcccctgtgctggtgattgaagctgaccaccacatggagaggatgctggagctgtttgagcagaacagagaccgcatcctgaccccagaaaataggaagcactgcccctag
